United States Patent Application Publication US 2014/0057251 A1 - sequence listing, part 79

SEQ ID NO: 124183 - DNA, 2319 bp, Cannabis sativa
ttaacaaagtttatagagggccattattatatagttgaagtttattatagcttccaagcattagacaaatggtaagttcggaggaaaatcaagtattaaatgatatactacaagtttatgtgaggaattacaagaatgtatagaataagtatctattttgattaagctctcatgcaaccaacaattatcaaagtgtaatagggattgttccgtatatgatgttaaatggtatgaaaagttattttgctttgaagctcggaataggaaatatctacatccaaggttagttaagtagactagtatgacaatagagaatattatggtcagggtacttatttctctaagcagataataaaatttatgttaaccagaagctcaaaaattgagaaatccccaagtaggggaaatattttgaggtcaaaggtaagatgtgccctaggttcctagacttttagaacattttgagaaaatcaggttcttgtttagccttgtgattatcattggtagcatacatgatgtttccatgttgtatgatgagaaatttgactcataacttaaagttataaaagcctagaactttagttagacctatcttatgaagagaaataatttgaaattctcgataagaaaggtaaagttatttgaagaagaactatagtattggtcaagatacttgaagaaaaattaaggtggagggaaccacctcggaattaaaatatgacctgtgtgctcaatgtccaaagctattcatattagattttgacgatgaaatccttttaatgtgggaataattgtagtgactgcatagttaaatcatgggaattagcagatacttaagaggttaaagattagtatgtgattttgtgcctcttagtagaaattatggcatattattagaaataggccttaagaagttattttcctaattacagagatatatttgaatgtttagtgcaataattatgatatatgcaaatttttatgaatttcatgttttacgccagtaacagtggaatgcgacatatagcctatttagtcacttagatatagtttagtaatatattaatagtggagcgatatagtaagacatttggatgtcaggctgtttacggggttatagtttaagactattttatccctaagtatgttagttgcttcctaattaagaatgggtaaataagtcttttaccctataatagagttatccttttagtgggaattgatttcttttgtaaaggttatctttagaatattaagcttaattaagttagaatattaagcttaataaaataattaagctagtatttctttttagtcatttactgaaaagttagaaattctcaaacctctctctactgggccggtcaccaagaacactaaggaaaccatcaaattcattctcatttctgaccaattctttgaagtttgagctgctgaagcgcaaatgatgggtgaggtaaacttccctcttctttgttcctttgaattctagtcttgagattaggtttttgtgtatgtttttgagttaggttttgttgtacgaatttcctaagtttaattgaattttatgaagttggtatgtgatgatttaagtaattttaagcttgatcgatttcttgttgttttgtttgaataaagtttagagctcaaacttttaccttccatggtgggttctgtttgagaggttattatgtagttcttttgcttgaagtatgtttgttgtgaccttattaggtggtttggaaggtttgaattaatttggggtttaattgagttgtttgtggggtttttgagtttcccacattgaatcggtcaaccagttcaattttaccctgtagaaccggtatactgcttcccccagacaactttagaaaccaattttctggttgggaattcgatttacgcgggttgtagaaattttggcaccttagattttcatattttagcaatacttaggatattgtcatgtcatccattaatagggaaacttttagtttgagtgtaagtctctgaaaagtgatttagtgtataatttatgagttttgcgtatgttgttacttaggggtctgtaaatcgtcgagcagcagtttccacttagggttatcaaaataactgcatttggaatcaaggtaatattagtataatagttgcattatgtatacatgtttagtgtgcatgttgcttgacgtcagaataacatatcagggtatcagtgaggtatacatagagttgcaccgagataccactatctatatgttaggcaagtcaatagccatcagattagcatatcagggtatcactgaggtgtacatagagttg

SEQ ID NO: 124184 - DNA, 1248 bp, Cannabis sativa
cggtaacaattcgattctatgtaataataaattaataaaaagatgagttaatttggtttatatataaaacgaactgcttatgtcactgattacgaagactaaatgtatttgaaagaatatattggctagatgcacttttgttgagtaccttgtcaagttttaaggaaatagagatgtagtaataaattagctaaacgacagcatatctacacaaacgacaacaaagaaaagtgtgtgtagaggcagtcactcatagttggtatgtttagttgagagagtcaacgaataaaatggactattaagttaacaattatgtgaaatgggaaccccaaggcccaaggtacatttatccgagttgaggtatgaacgtttgagtctacagtattgtttaagagcggagtgaataagatatcaacacgatgtgattttcatatatttaggcgatttaggcatagtataattaattgcttagtgtgagatgtctttttaattttaaattttaattagttgctaaggtggcagttcttttttctatatatacatataaacttaagagactggtctgtagagtgttgtaaccctcttgacaggtcacagcaggagattcaacctcgaagagcttgatttgtaattctttgaagattatagagattctagtgggatttcagcttactggtttaagtttaattgctagacttattctaatctgagaaaagtttgtcagattaaagtaaataggagcaatgagtgaataaatcatcaatcatcaacaacatactgcaacaatgccaacaaataggttgatttggattgtcattatgtgataatgataaataaaatactataatgaaagcaaaaacaaacaaaaaaaaaaggtgagtgcaaagaagccttcttcgaacacgagtctcaaccaattagcgaaccccctcaccaaattgatgacttttttttttccaaattgatgaatttattttctaacatgatattttcatacatggaagaagaataaaaaaaataaaaaataaaaaatcatttttacactttaaaataattttttttttgcatttttatagaattctacataaaaactccttttgcaatttgcaattagcgctgcaacctaaattgcaacagaaaatcatataaaacctttagggaattttaattttatatacttaaaaaattaaaaaattttattattataccaaaaacttaaaccataaaaaactatacttttttttttca

SEQ ID NO: 124185 - DNA, 1974 bp, Cannabis sativa
atatgagactagaagagatgaaatcgtttggctgctctctaggtcctatttatagaacatagcacccctagagacagccacaaaaatgatttcccaactgtacaaaactttcttaaaaaaattcctgatttgcagcatcagaatcgggttttatagcagttaggaccagaaaggaaactttccaaattgaacaaagatcacgaatttggaatcaaacctgccaaataaagtttatttgatttgttctaataaaggcaaaaccgaaatcatccattagaaaaagggaaagtcaagtttcccaaaattagacaactttccataagagaattccttctcttacaagaagtttcctaaacaaaaaagagaccagctgagaaggaatctttccttagaaaaaaagagtaattaaatgtacaaaatcaatgtaataaaaataatttaaatgctcaataaaaatgtatattaattaaaaaatattttgacaactaaattgccaaaaaaaatgacctaacatcgcagacaactagagagttttgagacctccttcttccttcttttattttgaatctccttcattattcttcattaaatttcgagtctatagtgagtaagtgcatgcccactcatagcaagtctagtttcaatcatagtgtgtaagactgaagaatccaacaacctgaaggagtattgggctcagatcttgataatactctgcgacaaaaaggaacaagggttaaagatctgagtgggaggaatcatatattccgttacaatcaatgtaagatttctcaattttatacttgtttaaattctattattttataaattcatatttatgatgttaataaacatactttgtagtaaatttagatcctggtaaaatatttttcatcaactttctagtagggtgtggatctcgtttatcttctctcatttttagctattgatttatccgttgtgatgtttaatctcttctcttcttttcactcaatttcctttttttgaaaaggtcaatttccttctttcaaacaacaattgaatcacattacctacccgcatttaactctttcctctttctctccgctccatcatttattgtttttgctattatgttttttttattttagagctaatggagaaacaaataagtggtaaaaggttaaagagtattattgttcagcacttctggtgtcggacacctccctacgtggcttacatatatgttatttcttttacattatttaattaaagttttttatttattaaatgttgtaagatcccaccacttcttgtaagtcaagcgcttttttctctgcccacaactaactattgtaattctaaactctagcaaaaaaaaatattgcaattctaaaagtgactattgagtttcgtcctctttctttgctctttttcttctattattcctacagagaacatagtacacacaatttaatattacttattctttttttgtcattttcctataccaacagtaagtaattttactttattcccaattataatttttttaaaaaaaaattatctattttcatgatttgtttgtaactcaatatatattttgtatatatgtatcgattataagcagattttgaagagggatgcacatttaataagaatacaaaggtcacgtaaaaaaaataagaatactaagaaaaaataggtaagccccacttcccttttactttttcaaagtatttatattattctaaagttttgattattaatttattaatgaaatatctttcattttaagaaattttttacatgaccatatataactattaaaattgtttaaaattacatgtacaatatcttattcttaaaaataggttggtttataatgatgagtgaactacgtattgatttttacagagcttaaaatattattatctgaacaaaaaaatgattcttctgttagacttttattttgggcttacattaaattttattggt

SEQ ID NO: 124186 - DNA, 1691 bp, Cannabis sativa
  modified_base (26)..(39): a, c, t, g, unknown or other
aatcacttcaaatttcttagattgannnnnnnnnnnnnngtaatgggttttatttagggcacaaaacccaacatccaaaccaacttgttttgagcctttcataaccttcagcacaacataacagtctccccacacttatccttactgcacctttgcaaaacttgatcaaaccagctgctaatattagcagcaacaattggcctaaccccagccaaaagcctctgccagcattgagcagcgaatgaacaagatataagtgcatggaaaatagtttcctcatttttttgacaaacgggaaacataatttgaattgggaccctcttaccacttaattgagtcaaggtgggcaaacaatttgaagcagcctgccataccaaattgagagctttcggtggtacctttgaattccaaagcttgcgctagaacccaagagaatcagttgcaatccaatttcctttctgagcttgtatcaacttgtatgcactacgcacagtgtagaaaccgtgatgctccttacactagaaaaaatgatcatcagctacattcagactcaatggaactgctaaaatatgttgttgatcacactcgttaaaaagatctttgataatatctaaattgcattccctcttatcagtacacatcaacgacctccccttatggcccaccaaacattgggcatctaaagtaacaaaaggacacacatcatccagaagccatggttaatgcaaaatatcaaccttcgcaccaaaacctattgcccaatgaaccccaaacttgagaagctcttgtgatttgaatactctcttccacataaaacttggattattcccaagggatgctaaaataaaattactcttgggaaaatagcgagccttatacaacctactcagcaaagagttcagttttgttagtaaacaccacccttactttcccaacattcccaaattaaagtcacgaagattacaaaagcccattccacccatagttttatatttactcattctttcccaaatcatccaatgaataccgccatcgtgagaagaacttgaatgccaccaaaacttactcataattctttccaaatctttagacacatcaattgggagcaagaaaacactcatggaatacgtaggcaatgactgagcaaccgttttaattagaacctctttcctagcataagaaagaagcttcccatcctaatcttgaacccttttccaaattctatccttcaagaagcccagaatcacagacttagactaacccaaggtattaggcaaaccaagataagtcttgtgctcagaagctttttccatttgtagaacattacaaagatccaatcgactcgactctcccacattggcactaaaaaagaaattagattttgccaaattaacttgctaacatgatgcctcctcaaacttatgaagcaactcaaaaagtctcgtagcatctttaagggaagctttgcaaaagatataactatcatcagtaaaaaaactttagcccaagatatgttttccaagaaggggtgaattggaaatttaagctaacttcagaaatttaaaaagcccaaagaaaattcatgcaaatactcaagtttaatgcaataacaaagataatcacaagtataaacaaataacaagcttgaaatgtaaagagtttagggatagaaattgtaaactctcgatttt

SEQ ID NO: 124187 - DNA, 1117 bp, Cannabis sativa
attaaaaaaaacaaccgatctaaaataatcgatctaatctgcactattgcagattggattggatttaaactattatgcagatcagattggatccaaaatattaaatgcgcagttagtgcagattggatgttgttcgaccaaaaacgaacagtttagatcggataaacacccttactagctaaccactcacaaaacaatataccttatattgtcaatgctctaatttctgccatttagctagcagctcaatttgaatgacacgttgataaaatatgttaattcatagtagtcttatcatgtataatcaaattatacatagtacatttattaagtatctatctgcatatgtgatctgaattaaagttacacgcactagaatataataaaccatacttggtaatactatattaaagatttcatactttaatacattaccaacttattttattcatattgtatgatcttaattttcttgtactttcttacaagtagaggtggcaaaatgtgtcatcgtgtcgtgttcgtgttcgtgtcatatttcatgtgacccgcttttatatttcgtgtcagacatgtcgatccattttttgactcgtgtctaattttctcaaccctaaccggacccgtaaaaaatcgtgtcgacccactgtgacccgttttgctattattgaaactggagttataaagaaaaattataaatttagattccattagaaaacttatattcatttatatattatataatttgttatatatataataaaaataaatttgtttaaatattttcaattttatgctaaaaaaaataaatttaaaattttctaacttaacattaaatcactaaatatatatttttatataattatattattattaataattttgtattttattatatttaaaaaaatcgtgtcaaacgtgccaaattcgtgttaagcgggtcatatcgtgtttgatctatttttattttgtgtcaagtcatgttgacccgttttcaatccgtgtctaattttttgaccctaacccataaaattcgtgtcgtattcgtgtttatatgtgataactctagaaattagagttatttttcacatttttttaactaaaaattggtttagtt

SEQ ID NO: 124188 - DNA, 1321 bp, Cannabis sativa
cgatcattatcgagtcacaacgataataatcgtttcctattatatccctcgatcataatcgagtcacaaccaattcatatcgttaacctcgattaagattacatcacaacaacatatatcgagatttcaatcttaatcgatactataacaatcataacattaaccttatacaatatttaacaattttcttacctcagtccagaagtttagcgtgcatcctttctaaatggaatcaaagcttggaaatcccgggtcgtatgtcacgaaaacaacactcaataaatacttcaatcaacatctcctgaataaacttaattcctaaaaccggacaatccttatcttcaatagtcctaggttaggctttacaatttctaaacattccaaattaaacaccgaaaaccaccccgagccctaaaaccaacctggaggaaaagaattgaaaactctcccctgatggcaaccggtcgaccggttctgatacactagaaccggtcgaccggtcttggcagggcagcagcctagagttttctccccaaactcgagccaaatctgaacctcacctgcccatcacctccagatcaatcctatatcaccaatataacataatccaactatcaattcacaacaatttatccatttaatcaaaatagcataatcacttaaattttaagcttaaaaaccataaaattccattaactcaacactaacagctttgattctaaccaaatcaagcataaacaaactccaatataagcctagaaacttgttttaatctcaatataataccttaatcccgaaatcaccaaaaccccaactaatatcaaaccaaaaacctaagaaatcatcaagaacacatgaaaaacacttaccacaacatgattcgctcctaggattgaagattttgctagaaaattgatgaagtgagctaagcttgtccctggttttctgctgggttcttgagccgaaaagagaagagagagagagagagagataggtttgatttacttctattcactctaaactttcttttataagtttaatatattagcttaataaaatgtaacttcaccttaggataaaactaaagcattaaataaaataaagcataaaacttaacaaaattaccattttaccatcaataaacacttaagccaaaacataacataggggtatttggtcatttctaacatatccacaaaaccgaaaacttagaattttaaactagtccaataaaattcccattctaatccataattcattatcatgacatatccaaccattccgccaaattcccactatcgccgaacccgaagatatttta

SEQ ID NO: 124189 - DNA, 1188 bp, Cannabis sativa
  modified_base (26)..(26): a, c, t, g, unknown or other
  modified_base (1139)..(1149): a, c, t, g, unknown or other
ttacattgaaacagagttttatttanggcataaaacccaacacattatacgacagtgttttaacagtcaacatgtctcgtctacatctcttcatacgtagcgaggttggtgcctcactttgcattactgatgttgtccttatgatcgtgtcttcatatacgaaatagtttctcaccaatatgtaaattaatagtttgtacatccgtgtctcacttaagactttacagtcaacgagttatagatatattctatcagctctgcatttaatgagttattctattttaatatcttctaatataatagtcattacatttgttgattcgtattttcccaggttgacacatgtcctcctctaaagtacaagccaaatttcgggtataacattttgaatcaagtttttttttgcatacaatttttctttctatatatactaagtatgataaatataattcattattttttattttcaccaaaatctaaattctaaatataaagttaaagtttactagttaagagttacatcattgctggcgtcgtgatagtttgtataatatatatatatatatgtatttgtaagtagatttagaattggatgattatatatactatattgatggtgaaatgtagtttctcaccaccacctatgggtatatgtattgatctatgtttaattttaaggtctttgtttgtaagattgtaaaatgaaaaaaattaccgattcgagcaagtttattacggcagcgatgatgatggtgtggtcggcctagtcgcactatgctaaatttgtgaggttttgtggtttagattttcccgagaaaattagtaggagaagagaatttaattgagatttgtcccatttagatattaatttagaataaaggattcaatcttttttttttaaatatattgaaaacgatttttttaaaaagaaaaatcaaaatggatctggtcagatccgatccataaaaaaattaagcgggcaaagaggatctgatccaagatctgataagtatccgaatatttcggatcagtaatgatccgtcgaataggatcaccgacccaaattaatggatctttttgccatgcttacaaatgatctacactaaaaagagataaatttaccattctacccttcaatnnnnnnnnnnnttaaaacacttagctacttataaatgatatttcagtaaa

SEQ ID NO: 124190 - DNA, 918 bp, Cannabis sativa
  modified_base (864)..(866): a, c, t, g, unknown or other
ggactactgactgtcacagttgacgattcaacattcaaatcaatactttgcttattaatgcttgaaaccattttaggttggtttggaaaaggtgagggaaacacatgtgggtgtaaatatctttatgtgaagattggaatatgctggggagtctcaaaagagctaaaattttggtaagggaatgaagagattggataatttggagaatttaggttaaattgagaatattagaaattagaattttgggggttgttaaaaggagaattatggttcaattgagaaaattgaaaatttgaattttgagagttagtacatggaaaattttggttaattgaaaaatattgtaaatttgaattttgtgagttggtttgtggagaattttgataattttggttggattgagaagattgaatgattgtattcgcggagttggtatatggagttttggaaatccatttatgaatataagataatgttgaaaaagtggtttggaaaatgatatgaaatttgcgagaagaacaaaaaatagagaaaatttgtgataatagattttgtaaaaaattgtagaaatggtgtagaaaaagagtaaaaaataatgagtatttacaaaaaaacaatatagttgattttttttatttattaaattatttgaaacaaattttaaaattgttactattgccctgcatttaaaattaattttactttcatcaataataaaaaaattgaatagaacttttgctcttgcaagtttactccaatgtagagcgttggagctgctctaaacaaatagttgctcgtaaaaagaatgagaaatttgattttatatacttaaaaaattaaaaaaatttattattaaaccaaaannntaaaccctaaaaaactatgacttttttttttcaaaaccccaaaaatacaccc

SEQ ID NO: 124191 - DNA, 958 bp, Cannabis sativa
  modified_base (202)..(205): a, c, t, g, unknown or other
  modified_base (845)..(846): a, c, t, g, unknown or other
gatcgtgtgtatgccacattcacgtaagttgatccataagttgtagggattgagctgatgactcatgatgcgaaagatgaattcgctaagtgttgatcgcgctgcacggcttgttgaatatttcattctggatgtgccagtgaggcgtcctgcttggcctatcgttccgagcagatactccaagtggactccacgtgtcacnnnnctcgtgatgccacgtcagagtgccaaatttaggataacagtgctattaaaggctgcaaagtggccaatggagctcccataatttctcacatgctctttgctgatgatagctatatatattgtagggccaacgaacgtgaagctttgaatgtgtttcgtttacttggattgtttgaggaagcttctggttagaaagttaactatggcaaatcctctatttttttagcaccaatacctcgttgagaacgcggcaacgcatttatggttttcttggtatgtctgaagcggataagaacagtttctatttgggtctcccttgtatcatgcgttagaaaaaagacagcaattttgaatttcttgaaggaaaaaatgtagaagaagatcaatagttgggatggatgattcttatcacaagcaggcaaagaagtgctccttaaaactgtggcgcaagctcttccaagttatgctatgtctctttttctcttaccacttgaaacctatggtgagttagaaaaattaatggctaagcattggtggcattctaattcaaagaattctagaggggttagttggatgagttggaagcggatttgtgttgacaagaacaatggtggtctctgttggactttgtgccctaaatnnaactctatttcaatgtaatctttaccattcaattatcaataaagaaacagaattattttcggtacttatttagtatgccatttggttcatgtgatcatttatatgtttattt

SEQ ID NO: 124192 - DNA, 1310 bp, Cannabis sativa
  modified_base (43)..(43): a, c, t, g, unknown or other
  modified_base (86)..(86): a, c, t, g, unknown or other
  modified_base (114)..(114): a, c, t, g, unknown or other
aaataaatcatgtgaaccatgcgatatagaatgatttctgatnatgcgatatagaatgatttctgatgatattgaaatgggttttntctgatgatattgaaatgggttttattnagggcacaaaacccaacaagactaccacaataaccgcactttctagactcgtacaacaagtaagtaccctattgctttgttgactatttgttattttgtatatgagatagaaatacttagttcatgttaggtctaggattccttacatgtttgagtggtaaagtatggcccatagagttttatttctaggataggattatgtggaacttttttgtgccttggaagtgcttgttttgtttcaatggtttgagtagagctgtttatgcttatgtaaacgtttgcatgcttgtatgattctaaaatgagggctaaactaggtaggataaatttttaaacggacaacaggacaatgtatccactttgcacctatatggagttgttaggactccaaagcggcttcgatttctaaatttttactttaattgtttttttataatttctcatgggttctcgatctatcacttcaagttttccacaagaaaatagatttctcgaaatgataggtctggcaaggacctctcctagaaattttaggagaggccttcctcgatacccatttcatcatttagattttgggtgtctaattgcttggtttttttcttttcctctcatttttctagtgatggaattgaatcaagagttccatttttacatggtaaaattcgaggataacaccacagttgctcctgttgaggaaacaaccactgagggaactcaggtagaagtctctgtaggggaacttcactcggatgttgcccctgaggccattctagaagaggaagcggaaaccattctaaaaaatgctctattcaggacatctaaaaaatccaagaggaaagggaaggccaaggtccctcctcccactcaagtactcaaagactccatctaggagatgtaccaaaaagaaaatttcttatgttcatacaggatgctcaaatcgtacgccactaaagccaaactgctcaacattttgggattgatgtggcataggatggctacgctggaggaatctgcgtcagtgagcacggatgggttcaacgggtggagctggtcccatattttaagcagggcacatctccctttgagaacttactttgtagatttcatttgtaacaccctaactatatagccatgttaacgtgattttgaatgtactgtgcagttcgttgctaatcacgagattaatgaaaaacgtg

SEQ ID NO: 124193 - DNA, 1091 bp, Cannabis sativa
tctggtggggcgtggttagcagcccttaattgtattgttttgtttgtatttgttggttgattaatgaaaataataataataataataataataataaagagataaagtcagtgcttagtaatgaaacttctaaatattatagcatcattaatggagatgaacagttggtatttattgttaaaatgtatctcattttataaaaagtttgctctaatatggtgtctcaaaagttgatccaaatttattatactaaacgctaaatttaaattacaatatagaatgatgtaaaatttatatcacataaatatactattttgtattatttttaatattttattattaaatttagttattgaattaaattataaaccttttacaattattttaatttatataataaaattaatgatataaagagttctggtgtgaggcgtggttagcagcctttaattgtattgttttattttgtttgtatttgttggttgattaatgaaaatctctattcttgatcaaaatataataataataataataataaagagataaaaagtcactgcttagtaatgaaacttctaaacattaaagtatttctaatggagatgtatattggtaatctattgttaaaatatatctcattttataaaaagtttgctgcaatatggtgtgtcaaaagttgatcaatatgataggttaaaagttgatcgaaatttatcataaaagtttgatccaaatttaaattacaatatagcatgatacaaaatttgcatcacataaatacactacttttgtattagttttaatattttattattaaatttagttattgcgctaaattataaaccttttacaattattttattttatataataaaattaatgataaatttattattattatttatatttttaataaatatactaattaaatattaaattatgtattaagtcttttattttagagattgtattaagtttaatagttgtgcacattcactactacaaaaataccctttagaggcggttttttagccctttaggcgtcggttttcgcgaaattcgctaccgacgcctatcagggcgacgctaaaggg

SEQ ID NO: 124194 - DNA, 1559 bp, Cannabis sativa
  modified_base (1503)..(1532): a, c, t, g, unknown or other
ttaacaaaacacaaggtccaattggtaacttttataaaacagagggtccaaaatagtatttacccttattatttacatgtataaatataaatgtataaatccacatgtcgagtaaactaactatttattactatgattaatcttgtttttggggacatagttttgagtgtcttttgtttaagttactgcaattagtcttatttttgtgacgtgattttgcatttttttttgtttcgttgttggttcgtcttctttgttattcgtgactcgcatcaaatcgatgttaatggttaggaataacaagttttttacagctgaaggagttgttagtggtgcaattacataccttgtgcaatagttgactgctcaagctaaggggttgaatgaacctgcaacagtttttactgttgtgtcttatgagcggtggaggaaactgaatataagtgttcttatggctaattgtgatactgtaatcttttttatctgattttttatttttgttttttttattaaatgatcctggaattaggcgaccaatatttttttattctaatcttagtcgtttttccaagttccaaaaggagagatgtctcaattgaattgcaagctattattttagttgatgactatcaataaaattgcataattttttcaaaaaaaaaaaaaaataaatatattttcatttctttctttctaattttttgtaaaagatttacataatagaccaaaaattttaaaaaaattacaaaaataaatcatcacataaaatttttaatctctactctttgaacttttttattaaaaaaatatctcttcagtaaaaataataaatcatttttggttgttttatcgtttatttatagttgcattatagttgtcgtgatgatatttttctggttgttttataattgatttatagtagtcgtgaatttgatttcatgtttttttttgttttttgctaaacaaatgtatttttgtaattttaaaactttaaaaacgcatttttataattaaaaattttaggccttaaaaaattataaataaaatagaaaaaaaagggtaattttgaaaaattctttttttttttcttttctatccctcctaatttccttccttgctactaaatataataggctaatttaaatttttgacccctgaactttgacatacaccaaatcatgccttctaaatttttcagatcgttaaaaatttccctcgaacttttgagattgtagaatttaaagacttttgtctaattttactaaaaaatgtatgacatagatgaaaattttgggagcacaatttgatacatgttaaagttcaggatgcatgattttgtagatatcaaaattcgccatattaacaaaattgaataaaattaaacaaaaatccttaaatccctaaggcgtttggtaatacttttttaatcaattttctatttttaaaattgaaaaagtgatagtatttttcaaaaatatgttctataaaactgtttttattttnnnnnnnnnnnnnnnnnnnnnnnnnnnnnnaaaataaaaaaaaaattactttcaata

SEQ ID NO: 124195 - DNA, 1109 bp, Cannabis sativa
tatatatatataattatattatatattatttatttatttattttgacatagtgattagaattacttataaatttatgatgcatatatttgtaatcagcgcaagaccctcttcgaaccacgataacttatcgtctaattgaaaagcatgcttagttaaaccatgagctgctaaattcctaacacgaaccacgtgggacaaaattgcttctaaaatttaaacaataaaaatataacgccttcaaacagtacactcaacacattgaatacctttcccattataattataaactgaaaagttaaagaataaaacctatgcgggttacatcgggttaattgggcgagttttagccaaattaacatattggccagtttataatttaattaggttattttggtttgtatttttcattagtttttttagtttagtttgggtgggttatcgatttgggcagtttaggaaaacttttgtacaaccctagttggaacaatatgcgagcggaatccttgatccacttcattctttctcctctttctctctttctttctcaatatctctctctctttcaataaacttcagaaaaaaaaacattagttaccaacttattcgtaggactagcccatacttacatctttaaaactcagttgtacaattaagtgggaatattaataatagatatgtacatctatagcttctatatttattataggtgaaacgatagtttcctttgagtttagttaaagaccttaaatgattaaacgttcattcggtaattatattagtttctcaaaatatcacttacatgtagttaagtattttaaagataaaatacatattaaaagtaaaatggtaattttgtccctactcaatataaactgtctatataggatccgtgattgctgtaattgaaacaatagataaattataacgtatctatagttggtgtatagagtgttctatgtaaccaagagtgtaattttaaatgggaaatttgaattcctatacttacattacccaaaaaaaattctcttaaatgcaaagttattaaaattggtaatatatgaccattttaccaattttcctgaactacccctctcatttgaaatcagcc

SEQ ID NO: 124196 - DNA, 1515 bp, Cannabis sativa
gtccgatacacaccttagatacggaatgctgagtcctcttcgatagagaatgttgtccatcatcacataacgatgcgcttggtactgtatccttcgtgacagggccttttcttgggacaagtcgccttttgttatgtattcgatgatggggatcatccggttgagctcttgttcaactccccccacagtactcttggctttaatgcttcgttccgagaggcattccacgggcaccaccccaagcttctcaattttgatgtctgaggctaacttagccaaacagtctgcgtgagtgttcttttctctggggattctttctactttgtaattcgtgaactcgtgtagcaattcccagactattggtacgtacgtggccattttttctccgcatgtttgatattccctcgatacttgcttaactaccagttgtgaattactgaagacttctactctgctaactcccatgacttttgctaatctcagccccgctatcagggcttcgtattaggcctcattgttagaagttatgaattcgaaccgtagggctacctgcagtcgaagtctgtttggggatatcattgctacccccactccagatccattttcattggaggcgccatccacaaatactttccacgctgggacttacggtgtgggcaggcttgcgttagcctttgcctcatggcactctgtgatgaagtcttctacgcttgcccttttacggaggtgcgtggtatgtaatgtagatcaaatttgcttaattccatagcccatttgagaagtctcctagacgcctccagcttttgtaggacttgtcagagcgggtggttggttaatactttaagtgggtgagcctgaaagtagggtcttagctttcttgaggccattaggaggtaaaaaactagtttctcgatcaccgggtatagcgtctccgctcctatcatgcgtttgctaacatagtacgcgggatgctaagttttttcctcttcccgtactaaggccgcgctaatcgcgttctcgtagacgaccaagtataagaacaagtcttctacgagaacaggttttgataggattgagggtttagccatgtgttgttttagttttttgaatgcctccttgcactcgtcgaaccattcaaattttttgcacttcttcaggatgttgaagaaaggaatgcacttgtctgtcgatcgggagataaaccgcctcagggcagcaacctttcgggttaagctttgtacgtctttgtgatttttgggagaaggcatattcaggagagcttggattttttctgggtttgcctctatctctcgttggctgaccataaagcccagaaactttcctgatttgaccccaaaagtgcatttctttaggttaagtttcatcccgtatctccgaaccacttcaaagtattcttcgaggtcatcggcatggctcgcgcatgcctttgatttgaccaacatgtcatccacgtacacttccatgttccgtcccagaaggcctttaaacatccgg

SEQ ID NO: 124197 - DNA, 1163 bp, Cannabis sativa
  modified_base (1108)..(1109): a, c, t, g, unknown or other
ccccttactttttctccagcttggttaaaaccttgaattgtcaatgatgatggagacaattgacgtgggtgtaaaccaacatctctcaaggtttttaaggggcgtacagtcacaaccgatccacaatccaacatgatgcagctcacgtaaatatcaacaatcatacccatcatgtagagaggctgattatgcaaggcaactcccaactgacgatccttatcatcaaaggttatgcatgtcatacaagaggtatgcatatcaagtgatgtaggtttcactggctctattttctccatataaaattcaggacttgtcaatgcaacaataactgcatttctatgctcaggagacatttgcagtgcatcataaacgcttaagagagcagggatgcaatttagatgagctaatatatcattttcaccagtgcttttgtcttttcgattgtcattagcaaattcttggttggccgaagatgaaggcttttgaaggtcttgtttagtttttcaagctcttttgcttctttttccttctttgcaaaaattttccgccgcatatcttgcaaggtgatttcatctacctctttttcactttcaagtggggtaggttcaggatcttttgccaataaggtcatgaagcaacctgacacgttgtcgtcaccaatagttgccttgtcatgtaactcttttggtaaaaattcctccagagtaataggattttcgttttggctgtttatatccttttcttattcttttgattctttatatctggtctacctcaaaatttgactctggggtgtccagatggtttccaagatggaattttcgtaaggtctttttgagtacatgtttgccatgtacttttcgaattctcttcactatcataccagtcatcccaaatttctagattgggctctgtcatgagctcatcaatgtaggaatatttgggtttcctggctttggcatgtcaaagtgggtctggattatcgtaacttccttgtcaacttcaaatgccatagaaattacatccctttgagtgagatcatttggtatttggtcattctcaattaaggagttgtatttgtcaccgcttttccaagagaagagtcaanntcaatctcttttctcttgatcatgccttcgataatatttttaaggatgtagcaa

SEQ ID NO: 124198 - DNA, 2194 bp, Cannabis sativa
taaaatttaacagtttcttaccacacgcataagaaaaaaagtcacgcttgcaataaaatatgagaaccttatttttggtattgtacattatttgatttttcaaaaaaatttacaggtgatcctatatagttggaatgtacgcaatcataaaaaaatgactaaaaactcttttaaatgtcgagcagatagcaagtctaccaaaataaccctttaggagggtgtactaagacttaccctttgttatttaaattttagtttagctcccccccacatctaattctagctccgccctgagagtaggtcatgactcattgggtcgaaaagtgataggccatataattataggttggttatgggtagggcacactttaactctatataattcaacccaacctatttttttgagagacgttccaaattcgaaacaactttcatatataaaatatattttccattcgcaaaatattttaaaaaaaatatatattctacattttaataaataaattatattattataataactttaaagagtgaaacggccaaaacacaccactaacaagtagtctatagttaccctattatttctatacaaacaagtctaacgtgataatcaatcaccgttattaatattgctatccacacaatgatactaccaacaccttatattttttaaagtactatatttacacacacacacatatatctatatttatatatatatatatcatttttttgtgtatgcactaggttaaattattttatcattaaatattaaagcctaatatagtcatctcaacccaataggctcaatctaacttaccccctatattattgtactaagtagggttgcattgtctaataaaaaataattcaattgtttataacttcttcaaactgtagtcattgggttggcccatgaaaatacctctaacctagctaacccaacccatatgcacctctatgagacagtagtggtattttcatgaggtggcacctttgtgaatggttaataatatttacaaaagttgttgtattaaatagggatatgggcggtaaaaccacctatactttagaatttttaacaattaactacattaatcaatttttggtggcaaaacgatccaaaccctctttctattagcaatttactcatttcgtcgaaaagtctcagttaaatatctcagtggactgcctacatgtacataagtgtacatgtgacacatttttagtgatccacataatattaataaaaataattttaaatttaaaaattagaaagaatatttaaaaatttaaagaataaaaaaaataaaaaaaaataattttttttacttttacttttctttttcttcttcttcttcaaaccttaatctctctctatctctatctcccagatctccctctccttctctgttagccattaacgaacccccaactcctaatacccagatcgacgatcaaaccccatacccaaaaaactccaagacccaaaaacacataccccaattctctctcgatcgcgtgctcctatctcggtctctcttgcactcactctcctctctcatctatctctctctttgatgaagaagggcagtgggccacgatccatctctggtcatcaatcgttgaaggtgttgggcgatgaccccacccttcctctatattttttttatatctatatttgtttttgtctgatttagagaaaattcttttgatggtgataatggttgttgaaaatattttaggtttagtgaaaatgtggtggtggtggtaatggtggacagtgatggtgataatggtgattgaggtgtgacaattattgtagtgggatcgtggttgtaataaaagaaagaagaagaagaagaagaagaagaagaagaagaagcaggaggaggaggaggaggaggaggaggaggaagaagaggaggaggaggaggagaagaagaagaagaagaagataggaggagaagaagaagaagaagaagaagaagaactgacgctgatccaagcaatgctacaggattgaaaacaaccgacgcaaaagtgtaccctatggcattggttatttgatagtaatcgatgccatatatacactatggtgtcggttatatataaataactaacgccatatgcactaataaccgacgttaaaggcttaacaatcgatgtgtaacgtccccgcttcaagcctcca

SEQ ID NO: 124199 - DNA, 894 bp, Cannabis sativa
tcttgggagtaataatggtaatagtacctcgctgctatatattgaaaggtttgtcaatgaaggaaaataatctcctaacaatgtcactttgagtctctcacaaccttcaatatgaagattcttaagccgaggaaaaactccaccttcaataaatgaccattcttcgaattcaggcataaagtaaaatttcaaggtctccaaagacctaaagaatgactttgattgtattacaacagaagaagaagaagaatcaagactagtagagtaataaaactctgaatctattctcaccaaaccattaacatgcataataacaaggtctttgagacatggcagttgtcccaacgacggtagaaaactacaattattacaattaaaaatcttcaagcttactaaattagacaagcattgatggtctcccatccaatttgggaaactgttgccattgtagctgttaatctcaagttccttcaggtttggatgaggctggagggcattgagtagctctctttctttttgcaagtcatcaagttcagcttcacgaccatattcccattccaaacatagctgactaagaaacttcttactctttaataatggagttgctgcatctgaaacatcctcaaagctactcacattttctagtcctctaatataaagattcttctgtagatattgaaactctttcaacaactcaatgccaccagaatctctatttcttcccacaacaaatgtattaagtgtttgaagattttgtagcttccccaattgttgtggcatctctatgaagaactcacgaacactaagatgccgcaacttgattaaatttcctatgtcagttggtagtctagtaacacatgtatgctgcaacaatagtgtctccaaattatacaa

SEQ ID NO: 124200 - DNA, 1028 bp, Cannabis sativa
gtgctgtactatttcgaggcccaatatggggaaagaagaaaagagagaaaaataaataaataaataaaggagaagaatatattatatatttgataacgtagagtgaaagatattacaattattaaaaagctgatttctatggttggaatccaccatacctgaacatataaatatctataaatataaataaatagatataaaagggcacatttgaaacacgtgtacgaatacgtaattgtaattgatacaatgtatatatataaactataatggcacactatatgatatttatcaaatccacactacttttaagagagaaagcgagatgtatgatgtatcaataaggccaggccagtggttgtattgtatatatattgtataataatgataataataattatatcatattcctaaaatgttagtgtgactccaaaattaaattgataattaagtgattagccaaaactaaagaaatgattaagtattattgttatataatataaatgaaagatatatgtataaagagattatggtccatattatcccccttggccgactcccggcactagcaactaccaactataatttttcaaaattctcaagcaatgtaatacattctcatttgtcaccttctttatatcttttccctactttataaaattataatcatagttttgtatactaattctactctctactccatatagcttgtaggttatttgtatatctaaatttacatcatcatttactatttttttattgttagtatttaacaaaaatgcagctttttgctttttgcagttttggctattgcaaaataaaagatctgctttgaattatatatattgagtattaaaaggcaccatcgtggcgttttataaatagttttcaatatatttaattttgggacaaaaataataaaaaaaattacaaaaatacggttttacggaattttaaatatttttacagtttttttttttattttatttacagaaaatacatactttttatgttgtattcatgttgat

SEQ ID NO: 124201 - DNA, 709 bp, Cannabis sativa
gatccaattaattttaattatctaatccatctaatatccaataaatattaaatatagttctatctattaaattatatattagtttaatttgagtttatctaatattttaaacctagtttttttgaattggagtagatatatttaatattttaggtccagtatatattgaattagattggtcaatgttaattttcatatatacatatatataatttacgtataaaaatataaaatctaattattcatctaaactaaataaaaatactaatcagttcaattagatatagatgtatatcatgtattggatttttgaacacctcatccaatctgatccaattaaatatttaaaaataacttctaatttgatctgatcataatttgatattcaataattgacggtcagttgtcattataacttagatcgatttatgaaaattccatccatgtccatgtcattttaattggaatatcattgtgcctctttataataattgtaatttttaaaaatatatatatatacatatatatattttttatgaggaacttagttttatatatacatatacattataaaaaatctaatttttattcacaacaaaatttgagactaaaagtaaaaagattgtcactaattataaatgattattcctatattgtgactaaaaggtctgtggctaaaggtattagtcataaaaattacaatttgttg

SEQ ID NO: 124202 - DNA, 893 bp, Cannabis sativa
atgtcaaaagacaagactaatggaaaaactaaattaatttcaatacataaacatgatcacaacataaaattaattaaggaataaactccttacaactatgtaaaatataattaactaacctaaaactatgctaaataattaacaatcaaaactacacaattaataaaataattaagtaattgaaacaacacagaaaaaaaaatgctagttattaaaaaaacatatatactaaatatactatctatatgttaaatatacaaacttaggttctattgataagaaacaaccctaagcatttagtgtgacttttctttttcagaacatatatagtcattaattattattaccaataaatgtagaacatatttggtataaatcttcctcataattttgactattttatgttttttttagatactatttatatatattgataaaattcattcaattcatagcattaatccaatcactaaaactttatcataaaacatatctttatgtatatatataggttacttatcagttatattctaccaaacatcattcctatattttgtttgagagtgatggtatacttaaaataaagcttaaaaataataactaagaaatttagtaatcgttcctcttgcatatttcaactttgcgagtagctaaaaacttgacatgaataaagcacgagtagacaacaaaagtttaaatggtaaaaaatatgtactcacaaattaataacccctaaaatgatagtgttagaaattttataacaatggaatagaaaatcaagatattacagctctattgcaatattaatacaaggaccaacaaagagattaaagaaatgttacaacacataatatacaatatatatacactatatatattgttaattccatttt

SEQ ID NO: 124203 - DNA, 524 bp, Cannabis sativa
ttcaaacatttcaaatttctttttgcataaggtaaaatctagagtgatcgttttaagaatatgggacaaactcggacctcccctacttagtctaatgcctttgatattcccttttccaatggcctcctccaaaaaccttgataatacttcagcagcacatatgaagaggtagggagaaagagggtcaccctgccgaagaccgcatgatggaaaaattttaccaacctgcccccattaagacaaatgttgagagtggttgtggagatacactgtgaaacccaatgatggaacttctgggggaacccaaagcagtcaagagcacagtcaataaatttccaactgagtctatttcacatatgtataaagatattgaaaaattaatactcatacttatatttatttcaattctatttgaaaactaaaaatataatactacagtagaacctttatttaagaataatctattcaagaataacctctaatttgttataaaaaaaatgaagtctcaatttgggtcagttata

SEQ ID NO: 124204 - DNA, 1169 bp, Cannabis sativa
  modified_base (78)..(99): a, c, t, g, unknown or other
taaggtttactaaactttatatttgtttatttcatcgttttagaaagttcatagttagggtgttaatcaacatacttnnnnnnnnnnnnnnnnnnnnnntaaaataatttccaacagataaatcttcatagattactgattctagagcaactaatcatattttctcttctatgcagatacttgatttatcacggaagttggttgatggaaaggtgacaaaccaggttgggaatggagcacaggtatcagctaaatgtgttggccaactccaattgaactttaaaattaatttttcattcttaaacaatgtttatttcattcctaaatgtaccaaaaatattatttctttatgaactttgcatgaacaatattttaacattgaatttattagtaatgagattattatttccaaatttggaatgccaaatttttctccaaagcaaagaaacatactttatgtgctcaaaccaagtgagcaattaattttatataatgaattatttagagtagcattggctcaaaaaaataagaggcaaattatttctgatgatgataaaatgtatctgtggtatctatctttaggccacattgacctagatacaattaacccattgaagatggatggtcttttcagagaactaaaagttggaactctttccatatgcgaatcttatctagaaggcaagatgacttaaagaccttattttacgaaaggcaatagagccaaagaacaacttgaacttattcctactgatatgtgttgactaactaataatcaagctcaagctggttatgaatgctttgtcacttttattgacaattattctagatatggacatacttagctaatgtccaagaattctaaatctttcaaaaagttaaaagatttcaaagccatggctggaaaacaattaggtaaatcatgaaagacatttcaatcagatcatggtggtgagtatttggattatgaattcaaatgctatttgctggaagaaggcctcttatcacaacttatagcacctaaaacaccttagcagaatagtgttgtagagagtagaaattggactttgtttgtgatagtcagtagtcccgtgatccataatgggaaataccgggaagctgtgcaatcccacatcgcctggcgaaggtctgttggaaatattttacca

SEQ ID NO: 124205 - DNA, 1058 bp, Cannabis sativa
  modified_base (49)..(63): a, c, t, g, unknown or other
aacaatctcaatagttcagggggactttttaacggccaaaaaagttcannnnnnnnnnnnnnntacatgtcaaagttcgggaaaaaattgctaattagccattaactaaaatataataattgagtgtaaaagaaaaattagttgttaatctgtccaaaccgactaatttcattaaactactaattttttttcttaattagacgaatttcacttatatttttgtaacccaaattttacactgggttaaataaaatataacataaatcgactaaactgaccgacgtacaattctaatacaacattatgttaatttagcacagaataaatatattttatttaattacaattttgtcattaatttaataatagacatcaatgcatttttgaatgacaatattgttagtaattattttttaaatatttaattttattttctgaattgaataagaactttcattaaaggcagacaaccaatcaatagtctggagacttaaacaaagttgggtagccctagccactacacatttgccaaatctgaagataaaacaattttggtgagactatgagccaccgaattcacagagcaattaaatatttaatttagaatgatatttttttttcttctaaatttgttcttaaaatgatattatgcattagagcataatgaaaaatattataataaatataacatttgtctatattttgaattaaatttagcacactatctaaactttttattagacacagtttaagtattaaaagagaaatagtagacaatccagattgagcttacatttaatattactagacatcaatgatgcaactatttatatgtgacgtcttataaatagttaacgatttttaataatagttattaaattaaattatgcgggactcgatacataattacagtagtaacgatatgacaccataaataatattaggcaccattagtatctttttaacatttctattttttttttttgacaaagtgattagaatcactcatgaatttacgacgcaaacgtccgccaccggcgctggaacctcctcgaacc

SEQ ID NO: 124206 - DNA, 1141 bp, Cannabis sativa
gaatactcgcatttgtcatctctcaaataattctcttttttatcagttaaattatactttttggtgttgcgaaattagctcgacaacaggaatagttgaataatatttatgttcaagggtattttggtattatgtaattaattaattaactatgcaaaccttaactctaacctagaaatctaagttcagattaagcttgatactagcctccaagctcaaagcctaagtctgataactcttctcttcttcattctctctctcacacgcccatataagcactctcaacacttgagatttaccaatcctgattcatactttgtgcccttaagggtgctatataagatccctcctatagcaatgtgaatagtattaaccctcagtattaatacaactaaaagggaagtagatcattacccattataaaagaaggttgaacctctataacaaatctatgtgctctttacttttttattctatttgtgtaacccgtggaaagtatcaaatccatatgatctcactgtcggctaatcacttttcaaggccaacaataaccatgttatctcatacaagattttaaacaagaaaataacataaaaacaatctcataacaatattttttaactaaacattgttaacattgcatataattgatattgatccaatatctttaaaaagataagttatatacgtatatatttcttttaaaataccaattttttcacacacttcttaaatgaccatataatgttaagaaacttatagacaatatcatctcgaaaatattgaaatgttctttgtatgtaatcactatatttaataatctcaatataccattgacctaaccatctttgtatcaataacaatataaaaaaaattaaagaactatatgaaatatgaaataactaataaaattttatcccaacaactaaatattttattgtagtagtttgatagttgatgtagtgaggttttaaatcttcttttgccatcttcttgcacgtctttctattatttctattttgtccacatttgctgcactctgtagataggaggagacactattatatccttgaaaaacttaagtagatctagttatcattggttcccaattggatatatatactgtttcttgataggtttg

SEQ ID NO: 124207 - DNA, 1778 bp, Cannabis sativa
  modified_base (26)..(37): a, c, t, g, unknown or other
accgtatttttgttgtttttttgttnnnnnnnnnnnnttgtgaaattaacccaaaaaataaagaagaggatgaatagtaagagagaataatggagaagtgagattaaagtgaaagaaatgagtattaaatatttatggtaacatatttttatcatcaattttaattaaaaaatatatatatatgtcactaaagtgacaacacaagtcacatcacacttttatacctttaaaaaataatataattttaattaaaagaaaattaaaaaaaaacccactcccacaagttttttagagtttatataatatatatatttatttaatgtgataggcagattgtgacaagtaaaaaagtaaaaaataaataaataaataaaaaaacagtacacatagtataaaaaatacagtaaaaatgtattattttccttatagcagtaaaattgaaataaaataagaaaaaatagtatggagtgtaaatttcccaaagacaaccccatatacccatatagttataaatttaagaacgagaaaccttaattttattttttttaatctaatttcactctaactaattgatctaatcattttaatttattaagaaaaagattatttattttataatggatctaactaaaaatatattttttttattgtgaaaataattttattttattttaaaaaaaaacgtaaataattgaaaaatctataaaaaagacagaatcagtaaaaatatatatataaaaaatctataaaataaaaaaaaaaatcaaatattaagtgcattgtataaatttatccttttctaatgaattattttctcttttattttgttgacctcgcttcgacccttagttcagtaatagtctacttttctttttgttgttgcttatgaaagaatattaagatcacaaggtccgactatgtgagtttctcaatatctctcgaaaaggttacaagtatgttgcagagtattttttctcttgaaagtgcgtaaaaaaagaccccttaaatagtgaactggccttgctatatataggggagaacaaatacatttagccctgaaataataggagaaaaatcagtgtggatttgaatataaatcctacgattgtctcatttagttaaataaatctcatgatagtagggatttaaaattagtcctattattgtggagacattttgaggaaaatatcctaaaatatcttcagcgattcctctgatcaacaactcatgttatgcaggtggcttgcattgctcgacgtgaggtgaggtcctaagcccgttcacgtgttttggcatcatctggcctggtcaatataaactagcgttatattttgcccatggtcgaatttccttgccacatgtcagcttgccaggtgccacgtcattagtacgaattttcgaataacattttcctccaggtctgcaagaaaacttttgctcgtacaaggacttcctaggcttgcacattgcacgactaggtgacatgcgtttgttcccacgtgcttgcacggatgtgacatcagtgcctgaggtgtgcgaatctctccctgtctcttcaactccttgcattaattgcttttccttaaaaattgaaccttaaagattgtgcgctaatggttacacaaacccctgtaacgattaacttttcactttttggggagaaacatgatattttgaatttgataaccattatacctttcggtgaattgtcataatgaattatctgcaataatatgaaacagggaataaaatctcaaatcaataattgaaactaaatt

SEQ ID NO: 124208 - DNA, 1068 bp, Cannabis sativa
agcacttgtatctttctcgtgaatgaaaataagggaaactcctgaacaacttctcttgaaagaagtcttggagtgccctcaattgagatacatcaacttgggcacccactagagcctcggggcatgcactaggcacccaggtaggggtcgacatctttaaaattagtttcattgatgctcaatcttatttttagtgaaagtgctccatgtatttcaattttgtcaattttgcacgggcaaaacttggtaaacaaaatcggtgcccaagttgaaatgtcaacctgggcgcctatagttgtgtatgggctcatttaggatgtttttgatgaaatatcatgttcttgcaatgttccttgatggatttaagtaattagggtctaagtatgtccccaaaaacctaaaccctggccatagcgcccccaaatcgactatatgtcaacctgggtgcacaggttccatttcatgtaggctcatctgctaagtttgaaacttagttgggcatgtctctcatttatcttagaataatggctaagaagaatgcccataataagttaatgggaaccaaaactgatgcgagaaggtgcacaagatttcaacctgggcgccaacactgatactggacccagattgagccttgggatgtccacgtggcatccttagcttaatgattcatcattttaaggtcactaggacatgttcacttgaactttgtcgaaagatggtagctagaaacttcttcgcatgatcatagtgcctacctgggtgcttactagtgttaactagggcaccaacacagtttttagtgcctaagctaaccaccattattctcggtggttggggcccaggttgtttccttcttgtcacgtgtcaaaagttttgtccatgtcatcgggtcaaatttctaggtaaatacacttatattctatttcatccactgcccagaagatacaatagtagaagctgttgtagcaagttcattcaatctcgtagcttgagcactcaactattgtgtaaggtatgtaactacactactaatagccccttcaattgcaaagaacttgttatttc

SEQ ID NO: 124209 - DNA, 1836 bp, Cannabis sativa
  modified_base (1770)..(1788): a, c, t, g, unknown or other
agtaagtggcaactacttcacagtatctcatcaaatcttccacttttatttgctgatcttccttgtgtaaagcacataacaataacaatgacttggcctcctcctggtgacttccaagaaagtcgtaactcaaccgaatactctggtagactttgtcatgcattccctcaatccctgtaaagtttgaactttgtagtcgttgcaaggcatcctcccatatgaacaagctgtccatattgcatttcaaagcatgtgccactgttgtaatggaaatcggtaagcccccacattcattaacaatcttaagtgctggaccattgtaatctccattattttcaactttagtgtctccaatgattttcttaaacaaatcgatggcttcactcgactctaaagctccaattaagaacacatcactctcagccatacccatggagttacgtaaaacatgcagatatctagaggttactagaatcttgcacccgtcatggattccaatttcttctagattgagttccttccaaatatcatcgaggattaacaaaatcttgctttcatctctttccaatcgcattcgaagcagctctgctctcctgacaatgctttcattttggctgaaaattgtcatttccagcatttcagcaatatgttgctgaatctcttttacgtttggtgcttgagaaatagtggtgataaccactttactgaacaactcctcttccttagctactttggcaatttcttcggcaagcatagtcttgccaattccacccattccatgcaacccaatcctcttcctattaccatctctaacagctgccattatgccctccagaatgaccctccttgaattaaaactttcgtacccttttgttgctgttgttgctgctagtgttgttgttgctgctgctgttgtcgctgttgttgcagatgttgttgttgctgctagtgttgctgctaatgttgttgttgttgctgttgctgttgttgtagacagagtgtgtaggtgagggggatatgcaatggtatcgaatttgcattcctctttgagatcgtgtacttggatcgacatcttccttgctttcctgcttaaacggtgtcgcatcatcaaatgaggaggggatccacaagagcacacgacctttgcgtggtctggatggttgagaaatgtgttagcctctcgagagatttgaccaaaggtggtcagccatgtggtaacatcagcttcgattacttgacagttattttgggcatcctgaagacggcgttgcaatctgttttgggcatcattcaaatgttggagttgagtattgaggttctctacatttcttgcgtagtaaaacagataacccaactgccgacccagtggtgccaccgtatactcagatattttggccccaattgatacaacaatttccatggtaagtagccgcaattgccttctttcttaatttctttctgttattactcaactaattcaacataacaacaacacacgacaactaattattataattattattgaaataatataatataatatgatattaataagaaaatgattataaaaacatggcaaaagacacttaccttataatgaaagagaaacaagttatatctattcctttttgtatgtttaagttagctttaataaaatatattattaattaacagaatattcttttatttatttttatgatattattatatatatttaaagatattttaatcatattacaaaaaactgttatttttagtgacaactttttnnnnnnnnnnnnnnnnnnntgtgactaaatgtgacttttagtaacaacaaaatattacttgtgacta

SEQ ID NO: 124210 - DNA, 1626 bp, Cannabis sativa
acttctaagccttcatatttgtaagactatcactgttttcttgccaaaactaatcatctgttgtgcctcaggatcattattctatttcccaagtgcttgattatagcaggttggcaccatatttttgagctactattttggctatttctagccattctaaacctaagttttttcaggaaagctcggggcattaaagaatgggatgatgccatggatactgagattgatgctcttgagaaaaattactcctcgatagttgtttctctccttgcagatcatcatgcaataggctgtagatgggtttataagattaagtacaatgttgatggttcagtggagagatttaaagccagacttgtggctaagggttacaataaacaggaaggcatacattacactgataactttacttctgtgacaaaatttgttacagttaagctttttttagctcttgcagcagtccatggtttggtatcttcaccaactcgatgtcaataatacctttttgcatggggatttacatgaagaagtttatatgtcccttcctccagggtatactcccacgggtacacttcctccaaatgtagtgtgcaagcttcaaaaattcttatatggtttgaaacaagcatcaaggcaatggttccaaaaattttctactgtcgtgattgtagaaggatttcaccaccattctgctactgaccattctttgtttataagacaaaccaaagaagcttttatcattcgcttgatccatgttgatgatgttatattagctagcaacaatttagttgccttggaggctctcaaagtcaagctgaacaataagttttagcttaaggatcttggcaacctcaagtattttcttggattagaagtggtcaggtctaccaaagggatcttcatctcccaaagaccttatgacttgcaattatttgaagatcttggctatatgggatgcaagcctgttattactcctatgtaaagaaatctaaaattgtcaagctgaaaggataatctggcagatcccaagatgtatcaaacaaatgttggtaagctttagtatattaccattactcggctagaaatttccttaactgtcaacaagctaagtaagtatcttgctagttctaagtcttgtcacatgaaggttgctcaacgagttcttcagtacattaagagctgtcttggacatggattcttcttccctgctacttcagccattaaacttaaggcttatactgatgctgattgggcagcttgctctgatacaagacgatctattacaggctttcgcattttccttggtgattccttgatttcatggaaaagtaagaaacaacaaattgtttctcgctctttagcagaggctgaatatagagttgtggccaacacgacttgtgaattggtttggcttttatctgaccttaaagagctcaacatagatcaccaaggaccttccttgatgtattgtgacaataagtctgctcaacacatagcagccaaccccgtcttccatgaaaggactaaacatatcaaaatcaattgtcacttggttcgtgaaaagcttcactgggtgttcataaaatagtcgatccaatccaatctgcacgatccaatccaatccaa

SEQ ID NO: 124211 - DNA, 553 bp, Cannabis sativa
  modified_base (522)..(528): a, c, t, g, unknown or other
taaaagctatcacattaaattatatgggacccgatacttagtttgaccaatagcgatattgacacataggaagatgttaggcaccactggtgccctttagcatttctcattattttatatggaaatttataatttattttattttatttgtactattggtgattatcttacgacgagagtacttgtatgatttatgtagcatttagaattttcatgtttaatgtcttttatatatttaaaactaaatttatcacgaaatcgtaaaaaatttagttgagatttatatatcataacctgaatataaatttttttagtaaatctgctttcacatgaaaattaaaatttgtagttaaattatagtaaaccatagaaagtagattcaattgaaattaatcattgtaagctttgatcattgttaattgcatttaattatttattttctttttaagtagaatttaaaccttctttctttatttttatttttaccaaatataatttaagaatttaggtggcgtttggttnnnnnnnatgaaatggaatggaatggaaagga

SEQ ID NO: 124212 - DNA, 768 bp, Cannabis sativa
gggagcttcaattgattaggtaggcatttatgattataataagaatgaaaatatgttgtttgtggttgatcatactaaattcttcactcacctacaagaactaaacatttaaacaaccctaaaaacatagctaaaactagcctaacaaacactacaatttgcgttgcactatgcttgtaatataatgcacaaggcctctcccaacaacatagctccaattactcattaatattggccaaaaaaaacataccatatagatgtttttgagtgccttgttttagaagagtaagtttattgaaaaaaaaaaatatgtacatattttgtatctggtttaaaaatgtaaaaaagatcaatacgctcaaaattaagttgtccaaagtctttttatttgtttctaaaaatctcttaatcaacttttatgtctgaaattatatgtaataatatttttttttctagcttttgtttagtatttataattacaataagacatagttgttgatattctaatttaatagtggtgttaaaaaaatttcaaattcattttcggcattgctatattcaaaaatttatagagataattttatagctataagttaagccacagagcaactaacataacaacttaaatcgcaacacaatttaaatcgtaatttacatcggcaatctaaatcacaaccaacggaacaacttaaattgtaaaaataaaaagaaaaatacataaaaaaaatattattttttagtgacacttcaaatttttagtgacccaca

SEQ ID NO: 124213 - DNA, 788 bp, Cannabis sativa
atcacattgcacacaatatttgacagataataacatattttgattttttttcttcctttcattaaactaattaaataattttaaataattaatacttaatttttctgttattcatgcacaagttgtgagcaacctataatagttgtatatattattgtgagagagccattttttttaacaattaaaagagatagtagttgtacttctctatgatcgggaatgacattgcgtaatgcttagtttggtcgtatatacagttgcgtgcaagccagttttattactaaaatttaatcaaacatttggcgtaaacatttgattttctatttttttttcttctttttctccgaaagagtgtcttagcatatcattctgttcatatggtttgttctagtgccctttaatacttaaattgggtcactatataaaactttactttcaataaccaaataatattaatatatgtattttaaaagttcgtatgaagtctctttgttgcatttgagaaatgcaaagtcccacttacacaataaaaaatttacttttattcacaacaaaccttgtggctaaaaataaaaaaattgtgactaacggtaaacaatgttaggtgtacaatcaaagtcccacattaattaaaaataaaaagaatctttgggtatataagtatgaacactatctccattggaattttttaagaaggtgcccaaaaacaaatccgtgagggcttaggcccaaagcagaaaatatatatcatgttagacttcttatttgggcttacattaaattttatt

SEQ ID NO: 124214 - DNA, 1085 bp, Cannabis sativa
atattgtataattgttcagttttctgcaatttgtccattcctcagtgtaaatagcctagtattgaataagaaatgacattgtgattatatatcaaaggaatcaaaatggtctttcttatgatcttatgattattttaagattatttaatatgaataattagtaataagcatttgtgttttcaaatgtgataaataatttaaatttgatttgttagaataaaaagtccccagtagtgaagaatctttagatgcaattagtgacatcattccccactatgccttagcatttacggtaaaaaaattcagagattccatttggtcccggcgccttcaaggggtgcatttgagaaactttcaactttatctcttcagtgaaagggacaacagtaagcagagaattctcctcaagagagatagaaggagaaatgagtgaatctaactcatccgcatttgagaagaacaaagcctgaaattaatcattcaaaatacaccccttgtccctctctttagatcaaagaacaccattaaagtccttgagattctaagtatgattcctctttcttctaaccaaagttgaggcgttgaaaaatgaccctgcataagccacaactcccttgatctctattcccacataagttctttttgagtccataattcatggatctcattctgcacctctctctctttgcaaagatcagcttcatgagcttcgagcgactagagaaattagagtttatgttccaaatctctagtactcatgtaacaacatactagtttatgcgtgttatcgtaatttcttaataccatgcactcatttgttgatcaaatgatttatagaaaaacgtgaataatttaaatttttataattaaactttaaacaccttacaaaaaaaaaataactaaactttaaacttcaatatatagatactttacataattgggaatcccatttttaaagttacaatcgttttacgaaatacttagttaataaagttgtcacctcgcgactatcaaaataaagcttgttgtcccgaagatcgaacattctagctctaatcaccccgatatgtacaatcttcattagc

SEQ ID NO: 124215 - DNA, 1117 bp, Cannabis sativa
tagttgcaataggagtttctgtacgattttttttgttgaaatttaagttacagcgctagttgcaataaaagtttctatataaaattttgtaaaaatacaataaaaaatatttaaaagtgtaaaaatgaaaaatacttttttcttttaattagaattaacatagtaagcatatgaacgcaaccaattttcaggtccacttaactatttatatctaaaattggaaattcaacttaacatcaaaaataattaatacttttcacaatctacttttgtgtgttccatctaaactttttattaatatattgtacatatcaatttctttcgtgtttttttttttctcccgtttcacgcctattcatttttcctcttgcattcttgtgatcctatcatctaccaagcattgtttttactctcttttcacgttttatcttgcaattaatgatatggatagctaatttttaatataaagatatgtttcaagtgacgtacgtctaatactatgtataatcaattctttcaattaataatgttacttgttattttaaatacgtggcatgttcgcgtaaggatacgtaaaatacagtcttgtagcagaataaagtctctttacaaggtatggtacaaccgtcaagcaacaagtaaaatgagttaattaagcgagccgtcaagaaactgcacaaccacactactacaaaataagtctttagaggaatttttttcaacataatattaaataactgacggtatagggttggaaattttaagaaggaaatattacgccacttatggcgtcggttatttggaaataaccgacgccatagggtgtgcccccatgtggcgtcggttatttccaaataacaataaccgacgccaaaagggtttataaccctagcccagcccttcgtcttcctcattcgattagccaacccaaaaacccccaaaccagataaaccccaaaccctctctgccaaccacaacggaaaatcaccccatttcacaattttttcactattttaactcatttttgtttctgaattttctatttttcatacctaaaactatatacctgaaaaagatcacatttttcctcattttttagggtaaaccgaaggtagag

SEQ ID NO: 124216 - DNA, 1422 bp, Cannabis sativa
aaagaatatttgaaaaattagaaaaaataagaaaataaaaaaaatataaagagagttcatatatgccgccacgtcatctgtacaaacaacaacattatataattatatagataatgaaactttaaacaaaataaacttagttgtatttcatatctcacactttgtgatatcatattatgataaattaggcttttaattgattattcataattttaataattataaattaattttgaattcaattatttaaaataataaaactttaaacaaaataaacatagtttataggcaaaactataaaattattgtggataaaatcaaacagagattacatacttggtcgagcagacatctctcttttgctggtaaggctcaactaattcactttgttttatttggccttatggatgagtatctttattcttcctcatagtattactaaggaggttgaaaaactttgtcggggctttctttgggaaatgaatagtaatagaagtaagattcacattgcttcctgggagaaagtttgtttgccgaaggcttatggtggcctaggttttaaaaatggtgtcaaatggaaacaatccattctggccaagtacatttgggcaatttctactaagcaagacattctatgggttaaatggatagataatatctatctgaaatcggggagtttttgggcttatgatctcaaacctgacactagttggtattggcgcaaattatgtcatttgagggagaaatttaagaggtctgatatccttaaagcaggctctaaggatcagttcaagactaactggttatacacaacagtttagcccagaaccaggtcaactatcacatagctatttggagttcagtcattgtgccaaaacacagatttattttatggcaagtgataaactctcatctcctcacaagggacatctaacccggtttcatattgagccgagttcaactttgtgcctaatgtgtgaagctgagattgaatctcatgagcgcatatttttctcttgtgtgttgtcgagcagagttcttgatatggtgttcaactggatgggatatagaggatggctggttgattttgctggttggtctaactagttagcaatgagagggcaaggccctttgcaatggttcaatacctccattttggtagtcgtgacttacaatatttggcttaacaggaatagatgcatttttaagggttactcaaaatccatttgtggagttgttaatgatgtaaagaacactgttaagtatagattacaaattgtaaacataagaaaactgactactaatgggaaaatctacttgctaagtgttgcgatattttgcacacgcaagtgtacgatcgtttcaagtagtaaaactcacaaggagtgaggtcgatcccacagggagtgcagttaagtacgt

SEQ ID NO: 124217 - DNA, 942 bp, Cannabis sativa
aagaaaataacatcattaggaaaatataagtgagtgttatatacaaagatttattacatctctcatgaaaatgaaagtctttacctttacttattttcttcaaaattcgagatatatatatatttatataaatatatattccatcctaagcacaaaaaaaaataaaataaataaacctcattcaataacaaatttaattacaacacatcaatatttacttacatttccttataatatatatatatatatatatatatatatatatatacttgcatttctatttttcattttgttatttacatagatttacaaacttcttctttgatatactaattaagctatgggacctaactatggatgtcgatagaaagaaaagaaaggcaagatataatcattaataataatattaattatgagagaaaaaaaaataaagattgacatagatttatttgtagtcttatcaattataagatcaatggaagagaaattaaatttgacaaaaatatggtgattaatattaaagcgataaagtcttttaatattaattcttttctaattgattaaaataaaataaacctatcaaatcaaaccaatcttataataataaaagttatcttctagtgataatttttgttatataactaatttcaatttttgtaattaatacttttagtgtcaaatttttagtaataacaaagacttcataatatttttcagtcacaactttagtcgattgtatagcatgtgtgattaatttgtaaactattttaaaataaacttatttatttactttagtgtcactaattattatagtttattaatttttatataaggggagttctatttgcgccccatgataagtatatctcattattaaacaaaataaacttaaataatttttaaaaattactcttaataatttttaaatttttttcttcacat

SEQ ID NO: 124218 - DNA, 705 bp, Cannabis sativa
taaattgtgtgtaatatatgattagttttttggtgaaatgagaataagacactgttgggttggtgttcattttttttttcttgttcaccagataaaatatatgataattaattttattttatttttgtgttttgtggtgggggaaaactaattaatattaggaatataatataaatttaatatgacatttttcttaaaatttgtgaatatgacatatttttggcaaagaaccttgtcattgtcatatatattctttttgaaattaaacataggaaaaataaaataaaatcaaaggtgctaaagttatatgagactagttttacaataatggtttaattgttggttgtttaaaatgttcaaaaacaattttatatcctcattttaatgtataatatatagttttctttttaattaaaaatgcatgcgttaattacaataacaaatatattttttatatgttaatataaacaaggtatttttttaaaaataaataaataaataaataatttaggtttgaaaaaaaaaatgataaagaatcactttatacaatgtcataaacattggtcccttttaaaaaaaagttttttttttcactttataaataattaagtgtacctaaaatgacaaagagaaaagaagtttctttctcttgtaagtatcaattgaataccaaccactaaattttggtatgggaatcaattcatt

SEQ ID NO: 124219 - DNA, 2917 bp, Cannabis sativa
  modified_base (2395)..(2402): a, c, t, g, unknown or other
tttttcacaccaaacccgcttataaattccttaaagtttttggttgtgtttgcttttcatttctaagaccttacaactctaacaagtttaatttcaaaacttcagcttgcctatttttaggctatagccctgctcacaaaggctatcgttgtgtacatccctctggccgattgtatatttctaggagtgttacttttgatgaaacttgtttcccttacaaatcaatgtttaccactcctaaatctacatctgctatcaacactgttatgcctcaatttttgccacttcctcaggcaacacaccagaataatatcacaccagctatgactcctgaaccttcatcagatacctctctgacatctcattcccatcctcctggtttcccacatcctatatacccccccttttctggtgatcataccaccagtaaccatttcacacatgtccaacctactgtctctcacaatattccacctgagtcttccacctctgattttcctcttgtcccttctttacccactgccactacacaaatatccaacatacatcctatgcaaactcgttctaaaaatggcatcactaaaccaaagattttagcagctgaattaactattactaatgatgattttagtgaaccaaaaagtgtgaaacaggccctgcattcaccaaggtggaataaagctatggataatgaatattgtactcttaaaagaaatggtacatggactcttgtgccttacacagatgatatgtgcatagttgagaacaaatgggtttacaagaagaagttgaaggcagatggttctttggacaaatgcaaagctaggcttgttgccaaagggtttcagcaaactcttggagtggattactttgatacttttagtcctgtggtcaaggctagcaccatacggattatgttcactcttgctgtcacttttggttgggaaattcaacaattggatgtaaacaatgctttcttgaatggagatctcaaacaaactgtctacatgtatcaaccacaaggctatgtagatgaggcctatcctaatcatgtctgcaagttgaataaagctatctatgggcttaagcaagcaccaagggcatggtatgacaagctcaaacaagtcttggaatcatggggatttacaaattcagtttctgactgttcattgtttttccaaaataaaaacagtcaactgactttatttcttgtgtacgtcgatgacatccttgtcactggtgctaattctaatactatccagtaattgattcttcatttgaatcaacaatttgccctcaagattctcggactagtgagtaacttcttgggttttgaagtttcaagacaaggttctcagtttcatctgtgtcaagcaaaatatgctcatgacattcttagaaaaacgaatatgttggattccaagtcttgcagcactcctatgactcctagctacaaattaactataacaactagtgacaatttttcagaccctacactctatcgaagcactgtaggagctttacaatacttgactctcactcggcctgacttatcttttgttgttaataagttaagtcagtatatgcaatctcctactctcgctcactggtgtgcttgcaagagggttctaagatatatccatggcaccttaaattggggacttgtctttaaaccagctaaatggctctccctggagggattttctgatgccgactgggcatgtgacatcattgacagaaaatctgtcactggtttttgtgttatgttaggaggcaatttaattacttgggcttccaggaaacagaaagtagtgtctcgatcgagcactgagtcagaatacagggccctatctaccactgctacagagttagtttggatcacttcagttctcaatgagcttggaattactttgcctcaaaagcctaaactttggtgtgacaatcagggcgctcaaatgcttgcctctaaccctgtttttcactcaagaacaaagcacatagaagtggatgtgcactatgttcgtgatctggttttaaacaagcaacttgaagtttcctacataccttctgaagaacaacctgcagatatgttcacaaaagctctcacatttcctaagtttaattttctgtgtagcaagttgtccatggaatacttcccgaacaccttgagggggcatgttgaggaagttagtgatagctgtgattagtaactaactgtcagagttagttaaggttgttaggcttttctgttaggttgtttcagctcacttatgggctctctctttagtatagatatgttgcttgtatcacttgttttccctttccttctttctctctttctctgttattgattctgcttttgagaatcagcttaaactattcgaaattttttaannnnnnnnagggatgatgttgtaagcataacaaacactcccgtgaaaaaaaaatattccaacatgtattttcgggcgtagaggttgactaaaaaattataacaggaggttgacaatagcactcttcaaaaataattttatgagctatcatttttttattattattaggaatgagaataatgattttttttttaatggactagtttagactttggattttaagaaattacaagaacttgaattttgtaaagaacaagtgcgggtctccatactctacccattgaatcggatgcgactcataaatattagatctatttacaaaaatataggaaaaagaaaagaaaaatatttatggcataaaaatttaatggtattaaatatgatactttttctaagaaaaaaaactttcgaataataagacctatttttttgtcgcccttcatttcattaagataaagtataaaaatatagactcaagatagatcattatctaccgcatgcccctatttttttttttttttttt

SEQ ID NO: 124220 - DNA, 926 bp, Cannabis sativa
aagttcatcttcagtggtgaggaattcgggtggaatcgattttggatcaagaaatttgattgaataatggcctttgatggcagcaaagaattgatgtcgccatggtaggaagttttttatcgaattcaacagataacgagtgattgaaggtgagagtgtttgttttgggtaacgaagtagagagacttctggaatatgagctagaatcggccatggaggaacgacgaggaccatttaggcatttgatactatgttgagaataagaataaagaaaagttaaaaaccagaaataaataaaccagtgtgattgtattgatgaagatgaactgagctacactgattatacatgatagtttttatatacaaagctaggagaagaaaagttagttacagtaggaatttagttacaacaagattcaaacaactcacaataacagaaaaataactaaagtaattaactaaactatcatctaatattttcttgttttacatcttgtgcattggagcacaattataaatagtaagccaaatataatacaaatttattttttgtactaaatttaacacaaattttagatcttccattagaaaagatctaagctattcaaattactatgaaacatctccatgctttaatgattaatgctctctacctacataatggtgacaatacttaaatcaaaaaaatttcgtccttaaaaattaaactaataattacattatttagataatgaaaagtctaattgggtaaataaataaataatatatttatataaaatgaataatatggaatatattttttttatctcgggcttctctataattgtatagaaaacattaatcaatggagagggatgaaaaatagggtaaatattattttggattctgtgtttagtaaaagttactgattgaactttctgttttgt

SEQ ID NO: 124221 - DNA, 815 bp, Cannabis sativa
ctctctctctctctctctctctctctctctctctctctctctctctcggtaactctccctctccttctttctctttgactctcaccaaccatctgaaagacccacagacccacaacctccaaccacacgaaacccacaccttctgacgagacccatgaccattgacctctactccaccacgaaacccagacccattcccaagtcacacaaccccatcgtgaaacccacaacccaatcgcaaaacccacaatataatttttgaacccacaatgtaatcggcaaaaaaggtatttttctaaactttttattgattttaaatgagttttttgattttaaatgcttgattgttaggaattaggttatttttttgtgttttgggttgattttcactattgcctgttaaagttctaggttttcactgattatcgacattttgtaacattttttgcgacatttctcgataactcttccaaataaaaataatatgcagtagttgtgtgtttttgttaatgtttcacgacatgttgagacatctctatgcgacatgtatttagggttgatgtgtttttgaaattttaattgtttatctatagtttcacgatattgctaaaatgtcgttaatagtatcgctagatatcgttaatagttgaacaatgttttaattatttaaaatttgaaattttatattgttagatgtcatcaatattatcgctataaatcgttaaatcatggactgtgtttatcgcgagacggggaatgagaaaaaaattatgaatctcacctttgaaaactctatttttgagagagagagagag

SEQ ID NO: 124222 - DNA, 1271 bp, Cannabis sativa
  modified_base (68)..(75): a, c, t, g, unknown or other
  modified_base (1244)..(1245): a, c, t, g, unknown or other
aacagtataataaattatttagatagctataaataatttcataaataatcatgattaactgctaattnnnnnnnnaactaagcgggctttacacttacagtagtgtaggtatttgacttatgtatgtatatttttttatatataattttttatgataatcttttttttttttatttgcaggaagataaaaatattttttttgtaaggggagataaaaataattttgattcaaagtttttgtaaaatgataatagtaaaattttgaatgtgtttgtgcaacaaatattaatagtttatttatattttaattaaaaaagtgataaatatttttaaaaattgtgtagtaaaattattttattttttaattttaaatatgaattaaaatataaaaattgtcaatattattttaagttttcaattttacaaaagttatcaatctgtttatctatttttgttaaatgacaattgttgattgatatattcaataactaattaaatgaatgaagatttagagctggaaaaggaaagagactatagactttacggacgttgatgagccttaattcacgagtcaaagatagagaaaatgaagttctctctctaaaatttgacaagtattttggcttaacatcattgagagagaaagataagagcccctttacctgtgacctctggaagtgtgacgaaggtcgccgagcttcttacggaggatggggagtgggatattcctaaactccagactcattttgattcaggaactgtgcgcgacataatcaaaggaggtaaacctggtggagtaggaggagacatgtgggtatggaaaaaggagcaaaatgggctcttctcaactaaatcggcttacctggttcaggctttgggaagagctcctgactatgtcgttgcgccaggactttggaataaactctggagctccaaaatccaggagcggcataaggtcatgtggtggagcatcttgtcaaatgccctccccattaggggactcctggtgaaaagaatcaacattgacaagctatcgtgtcccctttgtggggcagatgaggaatatatggagcacttgttccttcattgtgattttgcgtaccatctgtggagagcttccctgtggggaatctttcctgtccccgactttgggggcagggtctgggattgggtaacatttatttggaacctgaagacgaaagggtggatacggacaagctgtttctgttgggttttatgccctnnataaaactctttacaatctgattagt

SEQ ID NO: 124223 - DNA, 1741 bp, Cannabis sativa
  modified_base (1712)..(1715): a, c, t, g, unknown or other
ggaaagatagatgaatgaaaaagtatctcattgcggattgaaaggacaaccccacattgagtcttgtatcaagatactaaagaaacaattcaatgcaatttcaaacatgttgagacaagcaaatgatttcggttggaatgagggtctaaagtgtgtggttgctgaaaagagtgtctttcatgattgggtaaaagttactttgttcaatttaatttacaatttgatcatatcttaattctttttatatgttttttattcattgcaaagtcatctaaatgcaagaagcttaaggaataaagcattttctcattatgatgactttgttactatattttcattatgatgactttgatactatatttgagaaggatcgtgcaaatggtcaaggtggtatgggattttctgaaacagtggatgagattgatagagaagcagaaaatgatcaacaatctgagttcgatccatttgccccaatggatgatcttgttagtaatgcaactgatagtcacacaagtacgggaacaacttcagcacaatcaagaaaaagaagtagaaagaggtctaggaatgaagattcattagttgatgtattgactaacacagtgaacaaatttggtgaaatacaagttgctgctggtgatagtattagaagaattactgattgtttccagttcgagacagaaggtgcaagtagaagattgaaaatgttcaatgaactgaaaaaaatcgatggattgtcatttgaacaacgaattgaagctggaaaacttcttgtccaaaatcaagcttacacggatctgttgttcactttggataatgaatacaagttggcattcgttcttggtttgtttaagtgaggtgagatttaatagttgatggaatttcgaaaaatactattgagatgactttataaaatgtaagtgttttacttttagaaaaacttttggctggttaatatcatcttttggatgaacttttggctggttaatatcatcttttggatgaaacttttggcaatataataatatgccatagtttggattataaactagataatatgcaaacttttggaatttaaaattttaatcaatatttgttgtttgagtgattttaactaacattcttaagatatactattatgttaaagaggttttattgttgtttaaattattgatttttgaaaaaattattaacaaattaattttgcaattaattgttgtgacaagtatatatataggaatggcaatttgggctattttcgcgggccgagtctttggcccgtgacaattggactttattcggatcattgacccgatctggcccggcccgataacagttgtatcagtcattgttagacaattattttttttcctggtacaggagagagatatagcttttaatattttctaaaaaaatatatgaacaacatcaaaagacaatatcgatttaacagaaatatctctgaagatgtattataaaaaatgatatttatagagatatctaaagttaaaaattctaccattcaaaaaaaaaaaggggccgagtcaagctcaacccgtttatctcgggtcaggcctgacccgccaggctgaaagaagtggtcgggccgggccggatcgtgccaaagagatatcgtgctgggccgggtcaatgtcgggttgagcccgacccgacccaattaacattcctatatatatatgtatattttactnnnnataattatttattattgttaattttt

SEQ ID NO: 124224 - DNA, 951 bp, Cannabis sativa
gctcatcttttatcatcttcttctcctttaatttagcaaaggttctatagatttatgatttatggttttctatattaaagcacttttaggaatctgtttagatctgtctccatgatgaccacaggatctgacttgtctgggtcgtccttcttttcgccaccatcagtaggcatgtcttggtaatcatctttcagtgtatcttggtgatcatcttcaagatcatctgaactattctctcctaattcattgtcttcgactataggatcattaggattttggtccttactatgttgatcctcgtggcgactggttaccttagttggatctattatatctcctgcgttagcaataggattagtatagtgacgacaagaattgtttcgggtgagtaccataattattgaacgtaatctgagatggtatcacttctttctttagcccttaatgatagcaccaaaatatttttttgagattttcagaaaacaaattatttaatgtaagaactaaggaataacaatcaaaagagaacactcagagtttttatgtggttggagcgttaaagagccttagttcacgagtcagttttattatctgctaggctagaaaagccaaggggattacaatcaatatatttgctctattctcttctcaagcttgtcagttaagaatttctaaccctttgcatgaaggatttgttgtgtatatatagagtaatagaggttatacttagttaccctttcataatacagtacattggatttatcatgaaaaccccagcccatgcggcaatgactgtatgctgacttggcaagttgatcacgatgatagttgttcatactgtgttctttaattgtgggcaattaattatgcattaattatttgatcttaaattatattattccccttttaagcttaatattgttctctatcctaggtttatttattaattaa

SEQ ID NO: 124225 - DNA, 1159 bp, Cannabis sativa
atcttgggaggaaccggataactagatctgaaatagaggatgctaatgactggttagctctgggcttggctgacaacctaaggaaaattgggtcgcattatacttggtccaacaatcaagggagaaaagatagaatttattcaagaattgatcatgttttcgagaatgaagaatggttggatttgtttcctaattcttttgtcaatatgagttgggaaattttatttgatcattgctcttgtatagtttcatctgcaatcactcaggacattgggattaagccttttaggttttataatcactggactgaacatgaagattttgttaaagtagtaatggatagttgggttaaactgataaaagcatcaggtcttctggccattcatctcaaatgccttcggctgaaacatgttttcagaagatttaataagatagtgggagatgtggagatcacttatcaacaggccaaggaaaattacctaagctcaaggcttgaagctcaagttgatcttgggaatttcagtttattggaggctgaaagggcagcagcagaggagtttagtaacagagataaaatgcttcatagcttccttaaacaaaggagcaaggtaaattggttgcaaaagggagatgagaataatgcatacttttatgcgtgcatcaaaaaaagaagagaggagaatcgaatagctttctttaagaatcagaatggagagatagttgatgattactcagaggtggtcaagcattttgtggatcattttactagctacatgggtagtgctaggcctgataatcaccaatcttttcattgccttgagtttggaaataagctttctttggaccagcatctgcttttaattcgtccattcacgaggaaaaagatcaagaaagcaatgttcagcattcacagcataaaatcgccaggtcctgtgtcctgatggttttagctcggaattttacaagagaatgtggcctatcttgggtgaagaattctgttctgctatccagagttttttcaacacaggaaacattctagaagaatttaatgagactacaatctccttgattcccagaacaaataccccttattctagtgcagttaactatagaccgattgcttgttgtactactatgtacaaatgcatctcaaagttgt

SEQ ID NO: 124226 - DNA, 1359 bp, Cannabis sativa
acttggttgatttctttaagagctgatcctctcagctccacgtgtcgtctttatactggtccacgtattttaggcaaaattaaaggcaacagattcattagattgagatgaatattttaggttttaatatttatgtacaaacatgataaaatgatacatatatgtttgcatatatgtaacaagacctgtttattatatgggttagacgagtcaacccaaacacgacccaaactcatttaaggcaaacccaaactcgctaactctcgtgcgagtttcgaatcgtgttatcgtgtctgacccattttgtcagccctaagtgagagtgtatatgtgtgtgtaaatatattgcttttaaaaaaatctaaggtggtggtagtatcattatgtggctagtaaaattaaaaatagtgattgatttgcacgttagatttattggtagaaatagggtaactctaaactatgtgttggtgatgtgttttgattaattcattttccaacgttatcataataatataatttatttattaaaatgtaaaaaatacatatttgtatatattttgtgaatgcaaaatatattttatatatgaaagtttttttcaaatttggaacatctctcaacaaataagttggattgggttatatagagttggagtgtgtccatcccataattatatgacctatcactttttactcaataactcattgacttactcttaacaaaaccccttactaccaaaaatgggttgggttttcctggttgaatagtttggcccatttttgtgcacccttaaaaactatatgtgtttacagataaaattaaaatattcaaaactatgttacagagacaagactaaaacactcaaagtcatatcagtttgtcacagagacaggactaatcgcagtaacaaaaatggaatggtaatagtaaaagcaacccccaccaagccacacctctaagcaaagggaaggtcggttgggctagtcgattggagaaaaaagataaccttcaatagatataaatttaggaacgagaaacctttaatttttttcttttagaataaaaaaaaaaggagaaacaactaagctgaagttgtattaaaaaaataaaggtggattactccttacactatttttttaactttttttttgttaatttacagtttgggttgctctagtgatttttatgtgggttgttatgtgaatttaagttgttctgtaaattttcaacaaaatacaaaaaaaaaaaaacctaatataaatatagggacacgattttctcccatgatgtactttcacgaaatgtatttcgtggtacattagatgagtctcggggtacattaaatgagtgtcagggtacgt

SEQ ID NO: 124227 - DNA, 1385 bp, Cannabis sativa
  modified_base (1294)..(1309): a, c, t, g, unknown or other
aagtttaaattctgcgctattttgattagtaatcccgcttaggggattagggttttcataaatattttgggtagtgtacctaaatatttagggcgttacagataagatgagagaggatcaccctgcctaagaccacgagtgggcttaagggacccatgaacatgaccattaatagaaaaagaaatggaagtagtggtcaaacaactaaagatgagggaaacaaaatgaacaggaaagttgaaatgaaacataaggtgtcgctaaaagtcccattcaacccggtcaaatgccttagccatgtctagcttcagggcagcccaccgccgcttacccatagtccgatttgtaaccgcatgcacaagctcattggcaataagaatattatcttagataatacgacccgacacaaaagcactttgacaaggggaaatgattttatccaagacctttttaagacgattagccagaatttttgagatgactttataaaaagtggtgcaaaggctaatgggtctaaaatctttaagagtatttgcatgttgttttttagggatgaggacaatgagggtagaattaatctcagtgaaatcactgccttggttaagacaagcaagaatagccttagtgaagtcagtccctaaaacagaccaattttttttggtagaaaaaagcattaagaccatctaaaccaacgactttgtcccccaaaagttggaagacagcttttttgacttcatcagcagtaaaatcttgagcaaggaaattaatctcaggatcatctaattctagacccaaggactcaaaaatagaggcagcagcttcaatatcactaccttgagaggagaaaagatcagaaaaataagagatgacaagctcagcaatgccatcttgagtgttaaccacaacaccctcctcatttttgagatattttattcgattaaatttcctacgtgaagaagcatgtttgtgaaaaaaaatttgtgtttcgatctccagccttaagccatcaaattctaaccctttgcttccaatagatttcatctttgtaaagcaaggaatctaacatagactacaactgggtaagtttaaaattatcctccctagtgagcgtatccttattttgcaggtaattgatttcctgcgtcaaatactggattctggagtgagacaaatgattactatttttattccaagtcttaagagcaaaaatgcaatgggcttgctgagcaaggaaactattaaaaccattactaatgggatgactgttaatttggaaattattttaccatgatcnnnnnnnnnnnnnnnngtatgttgattaacaccctaagtatgacttctaaaacgataataaattaaactcatataaagtatgagaaacctta

SEQ ID NO: 124228 - DNA, 1041 bp, Cannabis sativa
ttttattatgtaataatttctaaaaaattgataaaaaattattaaatttgataataatggggacttttcagaatataaaaaaaaaaagctagtgaagctctccgtttataggaaaggaggtccattcaaataataattatataatacaaaaaatatgagaaaattaatttggactgatcttggctactgatgacaatttaatggctataattcactatagataaaaattgtcaattttcggagctcaaatcgtgtctattggatcgtttctgggtagtttgggaaaaaaattgcacttgacttgaggatgaaatttcaacttgaaatctttagaattgtgatatgagtgtgaaacgtgaattggaagggttttgaaatagctttaaaacaaaagttgaatcacgtcaatcctgtcaatattgtgggagttatggccattttactgaaggttgttcagcacccaatgccaaggttgacacctagcgcccagattgacatgctgacgtcaacctggacgctgtatgagtgggaaaatatgtcagacttctatttttgatgccttagtgatatttgagattacttagtcaatttcttcaatctagtgatgaagtcgctcaccagttcccgaaaatgtcacttttcctcaaaattgggtagactcaaaagttttgatttgcggctaattttccaatatttcactttgccaaaaaggtgaaatatcaatgtgtgaatttgacttgccacaagtcagacctctcatttacaacagaataataatcaaaagctcgagatagaactgaaatcggataagcaaaacttagcgaaccaagtcatatgtcgacctaggcgctaggtgctcctcgaggggctttccagggctagttttcatacttctatggaattcgtaatggtggcaggtgttttcccagtggctatattctcggtggacttgtgtgaccatagtatttttgggctttgtgccctaaataaaattctatttcaatgtaatcttttctattcaattatcaataaagaaacaga

SEQ ID NO: 124229 - DNA, 1400 bp, Cannabis sativa
caaaacaaagcctgatttggcacttcattttcacaatgggactttaaaaaagtgaattaatagacaaaaggaatacaaatacaataaggaatatctaagtgttttttcttcctcaaaaaaaatatatctaagttttttttttgaaaaaaaaaaattagtaattggatgttgttctcacacgtaagagagctcaaaaaagatgcttattttttagagagaggggaagagggaggataaaaaagaccctaaaaattaatcaacttaataaaataaggtaaaattgaaggcaaattttgtccacataaagaaaaggtcattggattgacattgtacttaggacaaaacatttgtactcaaaaaattcacttactcgataaacttgaccaaatccatactcgaaaaaattaggtttaaaagaatacaatgtgggatcgagttaaacccggtaccaaatcagatcggatttggattctaaaaatttgacaaacccaaatattcgaccacctgaatctacctaaaaaaacccggttatataactaaaaaaaatataataatattgtgaattgattgtgtatgtatgtgagaatttgaatatgaatattattagggaacttacaaaaatactgaaatttaggttaatttttataaaaatactgtcacacggaaaaccacccaaatttatggcacccataaccattgattttatgatccgacgaaaaatacttttcattcgattctaaactgacagaatacactacttttgtagtagagtactcatatattttatttaaaattaatgaagttaaagtttctcactaatttttttttttttattttgtgaagaacatgaaattacaattgaataaatgtacaacactatatattccacagcatggaaaaatatggtttttccagagataattaatgctatctaattgtgtaattaatttttgattggtggaatatatgtaaccttactattagtgtttcatatttcaaatcctattcttacgagaaaagcaacatgtcaccatatgagatatggaaaggaaaataattctaactcggactatcttaaacttttgatttcctatccttattgtaagaggatctttaaaagattgaatttatatatttgattgaaagaaattaaaacataaaaataaaaatgagaatagaatggaattaaatttaaataaataaaaaattattaaattttttctcatcttgtattttaatgattttttcttttattttaaaatagaagggtcatcacactaaaatggtaaaaaagtgaatttattggaatgatattctaatactttaaaatacaactaaataaaaaaataaaataaaacttaattttattttatttcattatttccaatcaaacgtcacat

SEQ ID NO: 124230 - DNA, 1433 bp, Cannabis sativa
ttttcttctttttttgcaactgcccacacatgcttagccattgcagccttattccattcttttactctcttgaatccaatccccctagctgcttttgtctagcaaaccatgtctcaggctatgagccctacaccctggaacagatgctggcctttccacaagaaggccctgcatattgcctctatctccttgatcactttcttgggtagcaacataacttgactctagtaggcatggatagttagcaaaacataattgatcaagaaaactctcccagcaaaagataaatgcctagtgctccaagttctgatccttgcagtcatcttctctgctaaaattgaacaatctttgctcgaaattctcttagcacagattggtacccctaagtaagtaaagggtagctcctgttgagagaagccagaagctgcaagtattctagatacatcatgccctgccatgttactgcagtatattgcagatttagctgcatttgggaacaaccttaaagtgtgggaaaaaagtttcagaccctgcagtaaatcgatcacacttttgttatcaccattacaaaataacaacacaacatcgacaaagttgagataattaagttgtagttgttcagatctatcatgaaactagaagtcacattttctctccactcttttcatgattcttgtcaagtactccattcccaacacaaatagtagaggggacgtggggtcctcttgtctcaatcctctctttgaagcaaaaaatccacgcattgacccattaaataagggagaatttgggggttctaacacaattcatcacaaggtgaataaattgaggagaaaattcaaatgcagttaaaatttcctcaataaaacccattctattatatcataagccttctgaagatctaacttgatcatgcaactacgcttattagatttcctcccataatgcctaattaagtcttgacatatcattatgttgtggcctatgtatctgcctttaacaaatcttccttgattctgtgcaactaaattaggaaggatatgtttaagtcttgagcaaatgagctttgttgccaccttgtagatcacattgcagcaggcaatgggtctgaaatcattcactgtattagggcatttcaccttagggaccaaagtgagcactgtagaatttgactctttcaaaatgtttccagtttcaagcaatgaaatcactgcttcacataatacactttccacaatatcccagttatcctgaaagaagaaattggagtacccatcagcacctggagctttaaggccagagatgtcaaatattacctatttcacttcctctctagtgaattttgttaatagagcaccagcctaatgtggagtcactgttggtgttggaaattattttaccaggatcttatatctactcacaagtatgtttat

SEQ ID NO: 124231 - DNA, 948 bp, Cannabis sativa
gaattaattacttttccattgctttggattttgctatgaaaagaaatataaatttccaagttaacatattatcaacttttcaaagaaagctatctttgctactaattataacataagtacacttttttttttcttacaattttacacgtgagccctaaattactaattaacttgaatagattcctaaggacaaataccaacttagaccattgttttatcttttgtatttgtaatcttacttagtgaaaaataaaaggaaaaataatagaaaggtaaattaaaataatgttagaagtctaagcaagtaccatttatgagctggatttggaatttaatatagacatttttgaagtttgataaaaaaaaataaaatggtacatgttgatttgtactctaatgtctttctgtatcacacaatatggtaaacagttttcgaaaaataaaaaataataaatgtgtttttgagtatttcacattgataataattagagtaaatagtaaattattggttttgtacgtttttgtgcattaacatatgtgggcccaaaggtgggctttgatgtgattgacttgctaacgaaacgaaaccgtttgtgggcccagtcaacagcaaatctagtggattatgggccctacttcactaactcgtggctataatagacttcaaaggatgccatcattaggtgttgggcccacataggaatgccaattgtttcacgtttggacaatttagatcaaaggttggtgaatttgtccacttacaaatttaagatggcttgtatttgggcttaatataagcccaatccaactaaaaaaaaaaaaaagaaaaaactagcctaatctcaattttatttcaaaattgcaattttatttcaaaaagaaaggtgtggttagaagatctaataaaaagagagtgatctgaagaggattgtttgaatccttcactta

SEQ ID NO: 124232 - DNA, 1310 bp, Cannabis sativa
ttaataattaaattggatcaggggttgcaattggagctggatggcaagctgcagtggcatatgtgaacattgtttgttattatgtatttggagtcccacttggtcttctaatgggctataagctcgacatgggtgttacggttagtaataattgataaattcatttaaccactaattatatttagaaatttttacatcaaatactgaaattttgtactttttttcatctttattgtggatgagatttttttttttcaaaaatactgtgtactgtgttaagttttcagttattccactgttattttttaattattacactgatatttttaattgttttgttttgttatttaacagttgttttataaaaagacagtatttttgtaaaaaaaatttgtgtgtgacaataaaattataaatttttttccaaaatttaatacttttgtgaaaatcccttatatttatgacagttttttctaacaataatatttctgaaattttttaggggatttggtgtgggatgctctcagggacagtggtacagacgtgcgttcttttcttcatggtgtacaaaaccaattggaacagagaggtattattaatattagatatatatatacatattagtagtttaatagttttggtaaattaacctaattatttataattgttatgagagtttaattgtaagtaaaatgcaggcatcagtagctgaagacagaataagaaaatggggagggccagattccaaagaagacaatgatgtgtaaatgcaattatgaaagaaaccatttttttttttttgtcatagttctttgatattgggcaccctacaacattacactcgcgttgtttgtgggtgattactagtttttttatattatttattaaattaaaatttgtaggacccaatattaattgtaccaataagtatgacatctcttatagtatttgtcactctaaatatcttttagcatttttcttaatatttttttcttctaggattacattttctcattattttttgacattaattattaccctataactaaaaggggtgttttctagctatttcagatgagacttttctccaagaaaatttcaattaatgccaaaagtaatatttatcatgtcttttgtctttttttctttatgaaattgaaatttccattgttaatcttgatatatatagggtaaataatatttttggaccctgtgttttgcaaaagttacagattagaccttgtgttttgttaaatgacaaaatggaccttgtattttctaaaatagtaaaaataagaccctgagcttaa

SEQ ID NO: 124233 - DNA, 1521 bp, Cannabis sativa
taatttccatctcttccaatgtatcttcgagccatctttgtttgttccccaccagaaattagccatcatggattcaatttgattacaaaacccaataggcaatctgaaacaacaagatttatacaattaaatttagaggtttttacaaaaatattaaattttaaataaaaatttataattttattgtcacacggaatatttttacaaatatactatctttttataaaataattgtaaaataacagaacaaaacaattaaaacaacattgaaataatagtaaaaatttaacacagtatacaatatattttaaaaaacacacaattttttaaaaaaattttgccaaacagtaaaaaaaaagtaaaaaaattaaaatgtaacctcttaaatttaacaggaatgaccttaacaaaaaataaaaaacattaacaggcccgaccttaaccgtgggtactagatctccaagttaaagcctcaaattttagaaaaataccatagttttataacaaaaaaaattcaattttttttttgaacaaaaaaatagaataagaaaaaaaatacaattttatataatttttttaaaaaatagattggcagcataacatctctgcttaagaatcaaataaaaaaccattagaaaaaaagaaaaaaaaatacaacatcaataagcaatagtgaaattatggatttagctcaacatgtactacaagctagttgggacttgaggtctcaattgtgtttgttggccaagcttgaaaaaaataaataacatgtactcacaagttgtcactaatacatatttgtggcttagattttgcttggactaatttacgtactcacaacaaattataaagttttgtgaaacacttctacatgttctagtgatgaaatgggtataataacaataatgtttaatagtcacaaaatttttgtttttaatgataaattatgttgttgcaaaatttttttggtgtgtgtgaataagactgtacaaaaaaaattcgtaaaccgcctaaattgaataatctgcctaaaccaaaccaaaaaaaaaaaaaaatcggtgcaagttgaagatggatacgtaaacaacctcatctttaactggcaactaaaggatgtactaattttttttttttttttttttacgtttgttttattgttgttttatagttgttgttaattttgttttttatttatttatttgcattttcaatttattcatttttttatatgtttatagttttttattttttgtgttgttgcagttaaaactgaaaaatatttttgcaacatcagaggagagagtaagtttaaacttgactaatcatttctcggatgacccgactctgtcctttattaaggttaaaggtaaagacaatcaagattaagattctaaatctgtcctgtaaaccagaacatgtgtcttaattagctgttctgttcttcggttaagatagtttagttttgtaattagtttgttaaagattctgttatgattttcttgctttgtaatcttgtgcaat

SEQ ID NO: 124234 - DNA, 981 bp, Cannabis sativa
ggtattatttttcgatcggttgaaaaaaataaaaaaatagagtccttacatattttttatataaatatatttttgatatagtttaaaaaaagatatttttttatatatatatatttgaattaagtagttaaataaagtatagaaactaaaatttcaattttgttattcttacatataaatctagtaatttaatatttttttaaaattaatatttatagtattaaatttgacttatagatatgttttatataaatatatttttaatatagtttaagaatatatatttttttattaattaagtagttaaattaagtataaaaattaattaatatttataattaaattattttagtaatgatacttattaaaaagtgttctacaaatatatatatatataatattatcatatacattttatattattatcaattcttaaataagaataatatataatgtttttcctaccaaatatattgaatgtgaaacatactctttagctgattttaaaagacaaattcggaagagaagtaaaggaattaagcatatagaactaaaaattgaaaatgattgctgatatgtgtgaatcttagacaacaaggtgcgtgggagtaaaatcattgtattcgaaggctttattagattattctagtcaaaaaattcatttggcttataattaaataagtaaataaaaacatgcaaaacacatggtgttccccctcaaaaatcaaatgtatatataaataaaaaataaaaacatggttcaatattgaattgaattgaattgctttcaccatcatggtttccactacatttttctgtttgcctgtttatttagtaattatagtattaattcctcaaactattgagagtgaattttctttctaaagaataattaaggctaatctctagattaaatattatatattttttcaattggtcttataaactttctttctttttcttcttctgtttttttttttt

SEQ ID NO: 124235 - DNA, 721 bp, Cannabis sativa
atgtaagtacttaatttaatatatttgtttgagaatgtaattataaaataattatgtattgtaagtgaagataattgaggaattataattacattttgtagttctcaaaatttttgtaagaaaattaaatgtaattatgaaatattactattttaaaataattaattattatataatattctatgcaatttaacaacttatttctcaaccatacaaataagaatttatatgtaatttttacttgatatctaaatacactttgtattttaaaataagaaagtaattttttttatttaaacgtttatatattacataatgtataagttgagactcgaactcaagactttcaacacattctataaccacttgaattagcctcaagtggttcaaataaaaaagtaattactacactatattattatactatcttgtaattacacaattacattaaaacgcgtttgttttcaataaaaaaaaatacaattagtgtcatgtgaattttttgaattcaaaatatacaaagtgaatccaatgaggtatgagtggaaataagttcactaggaagtgatcgtatgtaccccgacaaatggtatcaagagaccttcgaggagtattacctaaaggctaattaggaatttttctccccgaactttgacatgtaccaaatcatgcctcctgaacttttttggtcgttaaaaatttctcctgaactattgagatt

SEQ ID NO: 124236 - DNA, 2715 bp, Cannabis sativa
  modified_base (2645)..(2677): a, c, t, g, unknown or other
cactgtaaaacttttgtaaatattttattaacgggatctcggtttaatataagtgaattattttgggtatttataaataattaaataaagttctaattattcacgattttcaataaactcgttgattagcaataagctacacaattaaattaagaatcacgttaacacgcctaaactagtagggtgttacaatggtgctcagcacgtttgctgagtgtttggtggtgctcaacatgttcattgaatcatttcatggtgcgtagagcctatggtgagtctttttttgatgctcaaagcctatgctgagacttttatcatttccatggtcgaagccaaggatgttactctctaactcaaaataaagatcaattttacttagccctgagctaaagtttttgttgttttggttctaccatttcgcacataatgttattgaaattcctcatgtatttcatttattcttgaaattaacaacttcaaatggtagaaagttagttgcaaaataatatttttctgtagtatattctatttatcaaaaataatatttctttaaaggcattgagttccaagtgtttagtaccacccttccagtgctaacttccttgaggatgtatctcactttgcctaggacctcatggatccaatatggtccatcctagtgtggctctagattctttgaagctaccgatcactttttgagcacccattctcctactgaaaaggttctttagttgagttgagctcttagatgcttctcgtttgctctcaaatatttcacttgtctgatttgggtgatttgtcgaacttcttctagcagatcaagattatgagagatctaagcatgattctgatcctcgtcttttacgatttcacttcgtaaggtcagtaaacctatttatgttagaattagtgcttccattccctagaccgtggaaaatgatgtttctcgtgttgggggttcttttattggttcggtacgcccataaaacctttggtagatcttcttgccacttagctttactgctcttcaagtctttcttaatattattgaagatggtcttatttgttgcctcaacttgtccatttccttgtggatatgtgatgaaagaaaagtttaagttgatcttcaaagtgtcacagagctctttaacttttgtattctggaacggagtaccgttgtctaccaccaattcatgtagaatcttaaattgacaaattaattatgtgtttctagataaaaatcaaggtctttaccttcgaaaccgtcacatattcttctctgactacccacttggtgaaataattgattgctaagagcacatatctctttcctcttgcagctcgaggaagttctccaaccacatccattccccatttagcgaaagtccaaggtgctattacactgttcaatgcttaagctagtctttaaaagcttagtgcatgcctttgatacttatcacatctttttgcatagaaagtggcatctgccatcatgtatggctaataataacatgttgctaatgcactttgagctaggcttctttctcctgaatgattcttgcacatcctttcgtggatgtcaatcaatagtctttgagcttaaccaggtcttaagcattgtaaatatggtctgttgaagatttacgatataattttcctgtcgggatgacatatctttctgattttatcttcaagatttttgcctccactttatctcttgggagctcgctcttatctagataggtgaatatcaaatccatctagcatggttctaactcctctatctgaaaattttggtaaggttgaagcttctttctaaggtcactttaaacctttaagtgaattattgccatcatttttgtgcaccgaagtgaagctcttttttggagctcattagctctttgattcatttctcttggtaccccctttatttcacattataagaattcatcctatagattagtaataattcccaagaactttttcatcctaggacaccttgtatcaaattttctgcctatttggtgaaccaccaacatggaatcataatgaatttgtactcttttgatcaccattgcgagagctagttccatgtcataaatgaatacttcatattcagcttcgttgtttatacaataatctttgatggggagttttcaactctgagggaaattcctttaaaattccaattccggctttaccactatttactgctttgtcaacatgaattttccatatccattcagattccaagagctcaagaatgaccttttctgggctggagaaagagttgatctaccctgcaaaattttccaatacttatcccttcttagcctttttagggagatatgtcatgtcgtaggctcccaattctatcgcccactaacccattcttctgaaaaggtcaggtttgttcttctctgaaacgtacaatgctaattgctacttcactgacttctaggtacataaaaagctcctcatttgttttttgaggcgggcagaaaaggtggcgtactcagatagttcttgatctgttctagagccttcactttctctattccctggagtttatttaagctcttcttaatacaatcaaagaaagatttgtatttgtcaaacatttttttgttgggttttgtgccctnnnnnnnnnnnnnnnnnnnnnnnnnnnnnnnnntagttaataaagatcagaaatcacattttatgttgcat

SEQ ID NO: 124237 - DNA, 1422 bp, Cannabis sativa
  modified_base (26)..(28): a, c, t, g, unknown or other
  modified_base (55)..(57): a, c, t, g, unknown or other
  modified_base (84)..(86): a, c, t, g, unknown or other
ttaaacaacatacttctgagtagatnnnaacaacatacttctgagtagatctaannnaacatacttctgagtagatctaagatnnnggtaaaataaattccaacacgtccttcctctagagttgttaatttctatttcttgattgtgttgaatctggtcttgatgtgctctgataacactgttagaagttagcaactcttttaaccctgaatcaagaaatacacattttagtgattttatgctaatataatttataaaagttggtattattgtatagttaaaactcatgcatccatgagtccaatttaacaaaaaactatcctaacaaatatagctcaataacccttggttcaaaaccaaaccctttaagatagttcttcttcagttctaagggtttgaaccactttaagaaaccctttggaagaacacttcttctagagttagagatttgcgcacaagtcacaaagagaaaatagatgaaatcaaaatcacaaagagattagagataaagaataccacaatgtcaaggttcacccttaaaaagatgggctacgtgcttatcgagcttgccattgagaaacttaattttccactattaaatcaggtatggttacatctttctttgatttcgagtcacattttttcggttgataattaatgatacaaactttgaatctctctattttccatttacaatgaatttgccttaactttcttttgctttactttcaaaacaaacacaaatgaagctcaactcttgcactcgtctctctctctctcttattctaaatcttctctctctagctctggtataaaatttaacattgatctagtttaaataggtgttgcaaagtctgttggagaagtctttgaatatttgctaagctagaaatcaattgtaaatgtttctgtttgagtagataaggtctatattttttgttctgatgtagtcttgagccttcgggaaagtgtgtaacaactgtaactaatttgaatgtaatgcttgagctcaataagagaatttattcttataatgatattagtagatagtaaacagggtgtagccatgattcgtaggatatgtgcataatagaattatttaaactacatcaatatttattaatcttttgtagatttaatgtatgcatttaaattgaaagtgcataacatataattttactattcgtgacataaaaaaatattatttgacaaaatttgatgaactttttgctcaccgttagcataagcctttatatattcattaaagattgattatatattggcatactttcataaatacttcaaaataacaaaatgtcactactaggggagttcgcggtacggtggtgcagtttttaactattttttcaaatcaacccgcacatgcagttttttcaatttctcaaaccgcacccgcaccgc

SEQ ID NO: 124238 - DNA, 1918 bp, Cannabis sativa
ttttttatttttttaaaactaataattaatttatttatttttactgataattaaaatgtgtgattctatttatttatttgtttatttgtctcacaataaaaaaacttaattaaattatatattttttttattgaaatttcattttttttcaatttaatagataatatgtaccacaataaattattcttgtaatttcttttataataaatgttggtcgtttactttttaaaaaatggaaaaatatttttttttcataaattttgcactaatattttagaggaattaccccatatattatttttaattttttttaaatttacggtttggatttctaaagtagtttctatagaagtttttatgtgggttgtcatacgatttttgcttgcgatttagattactccactagttgcaatatgtgtttttatgtagaattccgtaaaaatacaaaatatatatatatatcattacaggtcatgtcttcttcatttcccttttccattttcacttttttatttatttctcaagtggttcagttgatctcttactaattttctttagaaaatctatcattattatgcgtctctagatcatcatcactactctcaagttgttcatgtaaattttcagtatcattaaaaggtttttcaaactcagatggaattattccagatgaaggtgtccaagtatactctcctgtagaaacagtgttcataaaagttttatcttattttttctctaattctggtttaattccccgaatgcgaaactttgcagcaccgagatgagtctacaaaaagaattttgttaattaaatgtaccattcataaaaaagtcttttagtttcatataaatatttaaaagattataatgtgtacttgtaatttactattccaccaatcttcagttgcatcaattgtattcttttgcatactctatcctaaaccagtttctttcccttgagttgcttccaaagcttccattcatttttcaatccatcccacttatttttcaactgagctctagtgtaatctctttcagttatttttttcatatttgtaatcaagtttagatatctaattttatctaaataagtagttggacgacgaccattatcaacctctttgatacagaattctaagaaaaaattcactctcataattccatattgctttacctcgtggtactactacatctttagtataaatatttttttttctttctccacctaattaaattaaaataataaattttattaagaagtaaaatgtaaaataatgagttgtaaagctaaagactaatttaacacgaaaaatacataataagtatgatgaaagcatgtatcatcatcatcctattctacttgggtacctaaaaattgtaaagagtgaccaaagtaatgtaaacacttgataggatttttcgatatttaaatatataatatatatacatatatatgttctttcatagcttttttgttagtactttaaaaatataataatcgtactataattaactggttattatatagatatgagtaacactatgatgccaattttattaaggtcatagtttatcttgtttatgataatagttagcttaattacctcgattatatatattatttttatatagttttgatgtgatcgatctcttcatatataattttcaacatatatatatatatatatatatatatatgagttcatggtagaaatatcaatagctttctcaaacacatatagttttttttattttgccaaatactttttaagcaatatttttctcaaaaaacacttttaattttttaaaaagccaccccaaacggacccttaatatatatacagtagaacctctatccaagaatacacttaggactaagcaaattatattctaattaagaggttataactaaatagag

SEQ ID NO: 124239 - DNA, 1980 bp, Cannabis sativa
aaagaaagtcatccagaggacacctcagggatcacagaggaccaacacaactaaaaccctcatttagagagaaatgatggaaatttcaatccaactggtgaacaaatcccagagaagcaaagtgaagacgcctatcatcccaccagatatatcccactggtggaattagaaaataaaaaactttgacagtgcctggttgaatcaaattgaagaaaatgttgagttggaacaagaggctatggcagccaggattgcacagagaaccactcctcaaactcaacctgatccatctagaaggcggccacagggaagacctcaaggctctaggaccaggaggcaagaaaataaccaagggaatcccacaaatactcaggaagaacaacctggaaatacaagggatatccaatggatagagaaaattcacccaatattggaaatacaagaaatcaggagcatcgacgtgatgttccaaaaacattccatggatttacaaaccaggggaatgaacaacctgatatactggaatcctctcgcatgaatgcaaatgcaagaaagtcacaaccaagaaaccaagaaatccctcatcatgatgggaaaaatcctggaaatcaacctgggacaagtcaacctcctaggcattcacaaaggccttctcgtaatgacagagaaaatacacacacatatctaagtagaggttgtgtatcgactctctttcaaaaaagaaggccaatgcaagatgaatcgcgaggagccagctctagtataagggagtcaagatcccacaggcacagtaggtcaactgggactcatagacaaatgtgagatggggataggacacgacattattttactgatcaagaaagtatgagtaactcgagtagttactaatctaaaagttactcgaagactagattcgtgactaattacgaccagagatgtcgtgaacctgacctccgtgaataattaaatcgaagacaaccagacctatgagaacatttaaaccgtaatgcacaaaattttcttaaccaacttaatcaaaacgcgaatcagtagcctgtggatcccatacagtttcaagtaatacagttggaagacaagttcaaaaaataccaggatggagagtatggaaaactaccagggtatgattcagatgaagagacagagacattctaccctgatattctaaactctcaatttccccaaggatttaaaaatccacatatctcgcaatatgatggtaccaccgatcctatcacacacctgaataattttaatgcaataatatgagcaagtaatgtttcaaacaacttacgatgcatattgtttctaacttcattaataggggtagcaagtagttggtttgacaagttcaccaaccattccataacttcctgggagcaattgtcaaagatttaaaaaagcaatttcaagctgcgagagatcgtcgaccagaagcatcttcattaactaatgtcaagcaacgaccaagagaatcccttaaggcgtacttaagtcattttagtacggttgtagccaaagtcagaaatttgaatgacaacattcaattaatagcccttcaagctagaatcacaactgacttgtcaactacaggggagaattatgggatgatttgcaaggacgtcctgtaagaaatatcaacgagttcagtgaaagaacacatatttttgtgcggaaagaagaggcacggaatgagattaagttgttaaagtctggctcgggagataaacccaaaactagcacagaaatagcgagcactgtgactgcaaaagtggaaaattcgaatggttcaaatactaagaggaaggatgattcaagagactcatccaaggataagaaaaagcaaaaagaaacatgagaagtgttgggattttatgccctaaataaagcccatttcaatctaatctgatttgttatcaatagaagattagaaatcatttatgtttacatgtagtttttcat

SEQ ID NO: 124240 - DNA, 1331 bp, Cannabis sativa
  modified_base (1012)..(1016): a, c, t, g, unknown or other
tatttaagttgaaaattagtttttcaaactaattttggatcaacttaaatttgaatattttgaaattaataattaagtcgaatgttctggaaaattagttattcagatattctttaaaatatattttaagtttaaaatttgttaattttggatcaacttaaatagggatatttttcaaattaagttgattagttcaagatacttaatttgatatttaattaaattttgaaaaattatttatgtaatatcccataaaatatatagatatttttattggacatattttattaaatatgtgattaagtgggcattagagtaggattataatcctacttaaactaattacgagtttattagggaaatgtgaataaataaagcgtaatttattaattatagaaactatattggaatatgtgggtgtcgtaaataccataattcaaataaaatatttttgggccccgtgatcgtaaaaaattggacagagtggttagaaatgtcacgacaataaatgatggatttgtatttgaaatataccagactagtttagattttttttaagatgtcggtttggcgcattagttaaaaattacccaaacgcccttaagttatgttatagtttatgttttgaggagaaggatagcatggtcattttacaagattgatttttgtcttctagtgttttatattggctgagattttggaatatttgagtgaatatgctgattatattgtgaaaggatagacggataacttaaaaggtttagggaaaaaggaaaaaaatcaagaaataacacttttcttcttcttcttctcctttcttcgaaccctaaggaccaacaaaccagggaattttctccttcaattcattctattgcatctgtttgcaagagcttacggttgtctaagtttttgaggactcgaaattgtcgagcatcattctactcaggtcggcccacatacttgactttggctttgaggtaagaaaagtattaagcactgtttatggttaatnnnnngattgttatggtctcgattatgattgagatcgcgatatgtatttgttgtgactcgagcttgattgagattaataatatgtatttgttgtgactcgatggtaatcgaggtaatgatgagaaacaaatattgtcgtttgtgagtttttcatgaatgagggaagaacacggttatcaccgttgttgtgaatgaattaagatacggtcattaccgttatgagtaattactcttaaaaccgttgataggtttcttacttatcgtttgattgaccgggcaacgatagtgacatactgataactctaagatttagagttatt

SEQ ID NO: 124241 - DNA, 1308 bp, Cannabis sativa
gaaggaatgacttttaccactatctcggacttcgaagccgcccaaatcttgaggatgcttagatcctaggactgctcaagtccaaaagcttgtcgagtgctattcctccgctcttggagccacctgaaatctgagggtgctcagatcgtgtggaagaagcacaacgacgatggactcaaaaaattctatgtacgaccatagctaataacgaagaggctattctcaatagagaatcgcaaccttggagaatctcaaaaatcaaaatgaagaagtccacattcttccgacaatcttttagagaaacacaatcatccatcttgttgtctttctcgtcgccggaggagaagatggagaatatgccgtcgaaatcgaaactcacctagtcgtctctcttgtcgctgatcgaagaatttcaagcgatgactctatgttttgaattgaaacgccagtaacagagacgtcaacctttcaacaatcaaaataaattaatgcagtgacaattatgtgtgacgtgaagaacccaaaacgctttgatcaatctcgtcatttgagagaaacgtttttggaaaatttattacaaaaacttatcggcgctaataatagttgaagcgtgtgaaagaagactccaagatgtatgtatattagtggatccactataagtgatccaattttttggagtgttcagacccaagtcaacgcaaaaggagatcaatactatgggctatatatttaacccaatatagttggggggatgaactaattttttgtccattcaaattggaggcccaatttcagagtctagatgttcagcgtggcccaaattaaataacgaaatgacgttttgaactcccgtgctataaatatttccaggttctaattttcctttttccattaaattaaggccttaaattaaatatgcctacgtatatttctacatataaatttaatgggggagataatagtataatactagcaaataggcgagcataatatagagctcatttttgcataattatttagcgaacctgctatatttatttttcgcataatcgcaaataggcgagcctgatataatgctcatttttgtgttatcatttaacaaactcgctattatatttctatttgcaaattggcgagccctgtgtgtgctcatttcttgcaaaattatttgacaagttcacaactatgcttatgcactctcaaagaggcaagctcaaaatctaattctttgtatactaaaatactaagtacatggcgaactcgcgatagtgctcaattatttttacccattagcacatcgcagatatg

SEQ ID NO: 124242 - DNA, 940 bp, Cannabis sativa
aggactaactaactgtcctgacactatgcaaatgtaggcatatggagcatctacccattgtgttaatgagtatgttcgaattggtaaaagtatagctattgaatgccttgtcaactttgttcgtagagtgaatgaaatttttgagaccaagtatttaagacaatcgaatgtcaaagatattcgtcgcttacttcacatgggcgaggttcgtggttttccaagaatgttagagagtattgattgtatgcactgaaaatgtaaaaaaaaaattgcatggaaatgtcaatccacgtgaggtgatcatggcacacatacaatcatgctggatatagtagtgtcacaagatttgtagatttgataagaattttttgtgattctaaatcaaataatgacctcaacatgttaaatgaatctcgattattcattgatatcttacaaagacaagcacccaaagttgagtttacagtgaatgacaaacaataaagtaaggaataccatttagtagatcgtatctatctagaatggaatacatttgtcaaaattattctgctacctcaaggggagaatagaaaactatttgcccaataccaagaaataggttacaaatgtgttgaagaagcatttaaatattgagaaaaaaatctaatgcgcaacaaaaaatgtggtaatggtaatacaacgaacaacaaattttttacatataaataacttttatatgcaaaatttttaatatgcaatatgataatcaacaaaaaatttatattatacgtctgtacatacatacatacatacatacatacaaaagagatgatacgaaataatctactacttatagcctttcaagaatccttaaatctttttgtataagggaaatttgattttctatacttagaaaatcaaaaaaaaatttccctaaaccaaaaatttaaaacctaaaaaa

SEQ ID NO: 124243 - DNA, 1490 bp, Cannabis sativa
ctaaaatttattaaaacaattgtttagttttctcaaaatgaaaaaaaaaatagggtttcgtgtttctaaatctatagctattaaaggattgtttttttttctccggccaaacctgtcagccttctctgagcttaaatgtaatttggtcgggattgtgttttgctaatgtcatttaatttatgcgggatcgactctaagtataggcaatctaaacccatgcctaagacctatactttccgggggcttaaaattaaaaaaaaaaatgaaatgtcttattagatttttatttaagtaaaattaaatatattgtaaacaacacatgttcacaacttggttggttggggtgaatgacacgttacacgatggtgtaggttcgaggctcatgactcttttttaatatttttttatatatatttttgaaagtgagggccccaaaatttaaatagtcttacgccctccatgtattctgagggtcaaccttgtctatgtagcataattttgagtattttagtcttgtttgtgtgacgtgattttgagtgttttagtcttgtttatgtgacatggttttgttttgttttgttttgttgttgattctttcttgttcttcaatggctcgccattaaatcgttgttactggttgggaataacaatctttttgcgactaaaggggttgttagtaatttagttacgtaccttacacattagttgagagttcaagctacggagttgaacatgctgcaacaatttatttcttaagattaattgtgatgttgtaattttttcatctgattttattttaatttttttgtcaaataatttgggaattatacaactaaatattttatttgtttctctaattctataatcctagtcatgtctctaacggggaagatgtcttggggaagatgtctcgattggattacagactattattttaaataattgttattaataaaattctataatttattaaaaaaaatattagaaaaatctttttaaaaatagttaagttgaatttttgtttactaaactttgatgtgtaacaaattatgttttacagattttacaagtcattaaaaatttctttaaactattaagagattgtaaaattgacagacttctgtctaattctgcttaattttattgatatggagattatacaaaattgtagaccctgaattttgatgtaccgaatcacatatgtataaaaaaatatatttttcaacttctcccaaaaaattttaatagcaatttatctcaccactaaatatggattttaaaaattaaatatataaatacatgacataataaataaaataatgagaaattactctatttattatttttttaactttttttttttaaaaatttatggtttctaaagtggttgcagcgctaattgcaataggggtttctatacaattttttgttataatttaggttgcagcactagttgcaattggagtataattccgtaaaaatgcaaaaaa

SEQ ID NO: 124244 - DNA, 1813 bp, Cannabis sativa
tctaagatcctagtaaaatatattccaacaaggttttgcttcacctccagtgaatggtcacgttgctacaatatctagaggcccatacattgctgaaagtaccaaaaacactcaaaaaagatgcctcaatgagcttgaacaagaaagtgcaaacgccaacacaaaggccttgaatgataaatttaccaataacaatcattgaagaagatgcaagatatgttcacttttcccacaatgatccattcgtgattaaggctcatgccaataaaagagtatctagaatcttagtagataatggaagctcagtcaatatcctgttcaaggccacatttcaaacaattgggctaactaaagcgaacttcatgccctatctaattcatcttcaaggattcaatggagactccttactcccatgggaaagatccaacaaataattatgttgaatggaaatgtagccagaagcaatacttcctctgctttctattagttttgtgttactaaatcaaatgcgcgatgaaagcatttatagagattatcatcgtaccacactcaaagatctccatatgtacatatattgaatctgaaataaaagaaaatatatatatttacttcttgaagtgaatcagggtatcctcaaatctttttgtaagttgtatccttaatatggtgatgacaaacccacactgcgatcttccaaatccaccaccacacataagaatgattgtgggctaatttggataaaaaatatatatgttcttgagttttcctcaacacatgagcaaaaaaaattattttctatctaagtgaataataatgaaaagttttttttaacctattgaggtttcttaaattatacgtatatatagatttaggatataccaatatattaatttaaactactaaaataataaaggtttaattaaataagatatatattatttcaaaaattaaaataataatagttaaatatttttgaataaatatttgtacctgattttgttatagatatttattttaaatttatatatttagcttaaacttaatatctaatagtcaattgagagaatctctcaaccacttgagagaatatctcaaccatcaggagagaatctctcaacaactttgagagaatatctcaaccaccataaatatttgtagccactttttaaattcaaatttaaataaatatttatcttataaattaattaattaatctaaaaataaatctagtggggctcatcttacctcatagatgcctatcaatgtgtccttacatagtgactagcatcaacattatcttaaccagacaatggtgatggctttgtcttgataatactttgtctttttcgcaatttatttaaataataaattttaagaaaattatttattacaaaataaattattgacctcacttttagccaacgaagatatgtcaattaaagcgataagaataaatgataagtattaaataaaatcaagcaataagaacacacaaatttatagaggttcaactccgtgatagtggtaatagcctactccccttttacttgtattacttgtgagaagagaagcaattgagtttcttgatctctctcgaaagcttacaattttacagcataagagctctcttgaagaatagaattcagatccctgaataatgaaatggcttctctatttataggaaagaaacacatcaattatctttcccaaataaatgagaaataataacgcatggaagtgacagctaaagatagggagagagaaaggctcagggttttctctgaaggaaaaatagaaaatttaagtgtaattt

SEQ ID NO: 124245 - DNA, 2242 bp, Cannabis sativa
  modified_base (362)..(374): a, c, t, g, unknown or other
aaactctctctttgagaatagaggaacacctatatatagttgttggtggggtcccctttaagttggtattaaagccaactgttataactagcagcaactttcttcaaattcaactgatgagccaataactggacatactgacttgacaagttaagtgagtttaatcccaacaataagttttaaaatcccatagtgagtgtaaatggggtttggggatctagacttttgagatgtacagggtttggtggtggagctcgttgggctgttgggaggcctaagatggctcatttggtctactggagctgtgcacaaaaagattttaagagaatgaggagatggggaaagagagagagagagagagnnnnnnnnnnnnngagagagagagagagaacagagaacacagtagtttagggtttttatttttttttcttttcttttatttatttattttcttatataatttagaaaaaaattactggacttaaaatcagaatttcatgacatcacgtggctttagtgatcttataaaaaaatgtgactaaagtgacgcgttagagttgggacacgctagcgtgactctatagatgagtgttttaatttcttttttttttcaaaaaaaaaacaaaatattatagatattattttttagtgaccgctcatatttttattaaattatattgtaggaaactaacactgattatttagaatctaattacgtaggctactaaaagttactcctaactatttagtaacccacactttctatatgatcattaaatagtgttactaaaaggtgaaattatagtagtgatttaaaaaaacaaaataagcatgcatataaatggatgtaccaggtgattccagtcggccctgtccctgggagggtggcttctttcatctttaacagcatgacttgggacctccatagtcttcataatagctacccccacatattgttcaagatattctttccatttccctccagattcaccccattgatgacgatctaatttggaaactcacaaagtctggaatttactcggtcaaaactggataccatctcagtttttcttctacctcccctcccgatattccctcatcctcctctccttctccttggtggaaaaacctttggcatctccacattctgcctaagatgaaacattttgcttattgtgcctccacctctaccctccctaccaataggaaccttgcttctaggaaaattatccaatgcccggtttgtgatcgttgtggaaaccaggaggaatctgtttctcatgccctgttcttttgcaagagcattcgaagcgtctggaaaggtatagttttttacccatattttctctacttctaattacactgtttctttccatgatattgtacacataatttatactactttaaccaaggaagaggtcgaatgcttcctttttgttgcttggtttatttggcataacaggaatagagctcttaggaatcaagcgcaagaccagaaccatgccatattcaacctggccaatggctttctggcagaatacaagtcatcatctcaagctcgctagcactcggttcagtggttcagtcaccaacagcctcaaactggtctcccccgcctcagggtcatctcaagctgaacactgacgctgcaatcccaaagaaaaattcaaaagtgggtttcggaggagtcatccataacactgaaggtcaagtggtagctgttgtcgcttcttcccacttaggaggaggagatgtggccacgcttgaagcaaaatctctcctcacctcgctcctctggtgtatcgaagagagtttccctatccaccaggtggaaacggattgcaaatctattactgacgccttggcgaatcccaaagaagaccttttcgcttttcggtgatatcattaagcaaattaaggcagctttgtctcttctccccgatgctcgtgtctctcacattaggcggtctacaaatatcttcgctcataaattagctaattgggctttggggttagatgaagtagcggtttggattggtgatgacccatgtaatctatttcttttctttttctttaagggcatccctctcttcaaaaaaaatatacaaatagatgtgtattctttatgtcatatatatatacataaatatcaaatatgacatatatactgtacacagagccggcccaagtattttgggggccttgtgcaaaattttaaaattgggctctttagaaaaaaaaa

SEQ ID NO: 124246 - DNA, 1403 bp, Cannabis sativa
  modified_base (1054)..(1059): a, c, t, g, unknown or other
caattaaaataaatttaccataaaaactaaagaatatttaatttatattaattatatatgtataaataaaggcttaaaatgtaccaatatgagtcttaatcaggcgtatccttatgaatttggttgactgcttccaattttccatttactcgtggataggcaaccactgagaaactgttaatgattccatgtctgatgcataaattattaaagagatcgttgtcaaaatgtgttttgttgtctgacattatcttctgtgggagtccaaaacgataaataatattcttgaccacaaaattaagaaccttctttgatgtgatagtggctaagggctcagcttcggtccatttggtgaagtagtctactaccactaatgaatatttaactctgcctttcatcataggtagtgaacctatgaggtcgattccccataaagcaaatgtttgcatactctaaactttgtttggggcagctctaggtattttggagaatcattggcacttgtcacccttcctgacatagtccatcgagtcttctatcatagttggccaaaattacccttgtctcaagatctcctttgagaggcattgaaaagcttcttttgtacattactccatccatgatgatgaagcaagctatttttctattggtttctcagcttcgttcttctcagttggaagaataccttgttctaagtactgtgcaattggggtcatctatgatggacagttttcgatcatcaagatagactctgagtcttcattaatactttgattggcaagctatttaacgggaactacattgagagtgtcataatttgttgtactagacaatttagctagtgagtctatgtttgtgttctgtttacacgacacttgttggatggagtagtgcttgagctgggctaatagatctttagatttggttaagtatgtgatcatgttcgtgttggattatattttaccaggacctagattaactaacaagtatgattttaacatcctaaatatgaatctctaaaacgattaaacttaaatacatataaagtatgagnnnnnntacattggttgcagcagaattaaatgactccttccactctgatctctaacccttgttcctttttgtcgcatagtataattaagatctgagcccgcactcctccagttgtttggattcttcacagtcttacagactatgattaaggactaacttgctatgggtgagcatgcactcaatcactaaaggctcgaattttgatgtgaagaacactataggattttgaaattagaagagagaagagaatgagaagaagtctcaaactctctagttgtctgacaagatgtaaactaggttcagagtccttagttggattatgagactattcttttctttttatactaatt

SEQ ID NO: 124247 - DNA, 3474 bp, Cannabis sativa
  modified_base (930)..(930): a, c, t, g, unknown or other
  modified_base (982)..(991): a, c, t, g, unknown or other
aaaaaaaaaaaaaaaaattcagcaccaaatattattttattctaacaataacactaaaaattattttgtttatcattattttatatttttaatataataagaatattaatttaatattaaacaaaaataatatatattaaagttactgtaaacacattttttttgtcccaccttataagtcggacacttaattaaaccacattaaaatatttttttcgctagtgggacactatagaaaaattaaaaaaaaaattatttacacctcaaaaatttataaaaacactttattttaataatttttattttatataaaatttataattttaattgtattaagtttttttttcattttttttctaattaacattcttaaaaaatatatctattaaataaaaataaattattttttaaatattataataaaagaattaatataaaaaattatataattttttttttttataaaatagaaaaatatatgcataatttagaaaaaaaagatataaaaacaaaatcaaaataagtattgaaattaacataaaataatatgagtaagaaatttaaaatatatattaagagtaatttttaaaaattatttaaatttatttttttttaataataaaatattattattattattttatgaggtgcaaactcaaataggagataagataagttttgtcgtgtcattggagttggcataaggtataaacatagcggggttgatttttattattttcatgaaaaattgtagttataaattataatagctaaatcttttatttattaattgggtattaatagcaaaatatgacaagcaatggaataattacataaggcactatttttttgtaaaatatttatatttttacgtttgtttttttacatttttacggttttccaaataataacacgaaaacaacataaaancaacaagaaaactacttaaaagtaacatgaaaataacaataaaaaataacannnnnnnnnnaaaaaattaacaacaaatgaacaagatttcaacataaaaaaaccacattttatgtaaataaaataaaaaaaaaatcgtaaaaatgtttaaaattccgtaaaaccttatttttgtaatttttttgttgttcttatgtttttgtgaaataatccctattgttttactaaattacaaattttatgggtttttaaactttttttgcaaaaatatagcttttttttcaaaaatactattttatgagaaaattgaagaaaattttggcaaaatcgtgtaaggataaccagaaggataactagttttcataagggagtaatcaggtaccttatgttattttttttataaattttaattttttttaaaaaaaattctcataaaataattttttttttttacaaattatactttaaaaatttcccatattattttttcatatgtccagatctatataaaatcaatatgattagttgtaaaaagttaccacctttaataaaaatgtaaataagtgaagtaaaactaaaatatatttcatttgataaaaatatgctccaattgtcaaaaaaaaaaaatgatgcaaatttgacatatataacaaataaagtgtcactgctatgataaaagttttgcatcactataaatataatactttttttaatttatttttatgctttttttatttttttttatttagtatacttacccataatattaaatgatgaacaatttatacataatttttattataattttacataataaaataataataaaattaataataaagttgctattttttaaacttttattaaaaatattaattttgcaccatgttttgtaattgtgcttagagtagaatactaaaaattaatgcaaatatattacaatttttttttattcatcataaataatacaattttgaagatggtataataggttagtgtgaaaataatgacttgaaagttgaaaaccacgtatctatatagtctatcttcaaaaataatacaataatattgtgttgttttggagttgtaggttttgttcattcacaagtacagtggtaaaatggtgattgatagtgcaattttgataagcttcagttacgttttctccacagtcaacatgatttattgtaactataaactgtaccccaacattattcaaggccgtactactaataatattgacaatgaccaatattattcaactaccccaacatttattgatatgaaatactttggagctgtcctatttttggtaggcacaagtgggaacttctaccaccattgccttctttcccaacttaggaagaaaggagatactaaagaatcatcatcatcatcctacaagattcccaagggaggcctctttggcttggtgatttgtcctcactacctctttgagattttaggctatgtgggaatttcactcatttctcaaactttatatgcttactctttcacattaggcactattttctacttggtgggaagaagttatgccaccaggaattggtacctttccaaatttgaagacttccctaaacacgtcaaggctctcgttccatttattttctaataagcttaattagtttatgattgatacgagtgctcatattgctattatataccactgtggcactgtattggactatatttaattcatttaagtgagtgtgacttgtaacctgttgtgtgttataatattatcggtagaacttctacttaattatttgtcatataatagtatagtataattatttgtcatatattatttgtcatataattgtcatataggaagttgtaaaagattgtaggtgtttttataatagaatattaacccgatgcctcttgattttaaacataataatcatcaacttgatttattcgaaattcgaataggaattcccaagataaagattgatgtcacgaggttcaaataagtccctaagtaattccaaatcctaacctctttcagttgtaatcataagctgattacagtacttcaaggagaaataaccaaaggattttcattgttaggcaactaataaggtgtatccaaaacattaatttttgtaccattgcccacacactactgggtcctttttcgaacaatttgttgagcttcccaaacactccatacataaaatttggattatttccaagttgggcagtaagaaaagaacctaaaaggaagtaccttcacagcttcacttaaatatttttgaggctaccgaatgaggtcttgtgagtaggactaggtgcacatttatattatggattcaatccaatttgcatagtaattcaaatctaatttaatccaatctataaaagtgtggattgaatcggttatttcggattagttactttttaatattaaattatttaatattttttttaacatatcgaacgaaaaaaataaaataaattaatattgttttatgtctttaacaataaattaaaataaaataaaataacaaataacaaatt

SEQ ID NO: 124248 - DNA, 1423 bp, Cannabis sativa
aatattattttacatatttatttaaggtagaattttattatagtcaacctatattgaattaaaattacttaaaataaaccaattcagttattaattattccttatttaatctctaaagaaaggttgtaaaacttatatattattatagccttttaaattaccataaaatgcctttataaggatatcttcctatacgacttaagtacaaactaatatctcataaatttcccaaatatatctgaacacaatatatttacaattgacaattagtgttcccacctcccattattacgagatcctcatgtttattattttccaatttacttgattaattttaaattatattattagaatttgaatactaacaattccaaacactttcccttatttgctaaaaatttctaaataaatatgattcaaacatagctaatagctattaccctttaagctttaatcctcttaaaaaccctatttcactttaaaatattccttaaacataccttaaccaaaataatcctttaatcccaactagtaaaatctgtttagtgcataacttgttaactttaaaattttattatactttcaatacaggaagacgtgaaaaatttaaacaacttactctaaataattaagggctcgccatataataggcgcaatagccttgtaaggcgctaaatccataaataatggtgcaaatataaaacaaaaccaataataaaaagtttacagttagaattagaaaattttaaatttataataaaactattttgattaggattagaaatagtgtttacttgtgtcaatatatatatagaaagtattgtattacattacatctggatgaaatagaagttaataaatattagtgacattagtaatattagataagagattgagagagataaaatttaaaaaatttgaagatggaaaaatatagagaatgagatttagaagagagtttgcattcttctctatgttggattaggggttcgatgttaggaaaaggtggatttggttcagtctactctgcgagaatggctaaagaaccattgtcattttatggaactacgctcgtttgtggcttccattcaattaccgcggtcaaaacttcgcgtcttgaaaagagtgaagaattaaaaaatgagaagaaatttattgaatatttcgatgattgtccttacattatagaatgttttggtcatgatactactcttaatattattgatggtaaagagaaagtgttttacaatgtcttcctggaatacgctgttggagggacactatttgattttatcatagcttctcccatttacaacgaatctaaacaagtcaaagagttccttcaacagattcctataggtgttgactatattcatgagaaggggtttgtactgagaacgtagtcaaagagataagagaagaa

SEQ ID NO: 124249 - DNA, 1774 bp, Cannabis sativa
cagactttggcttggctagaacttttggtggagaccaaattgaaggaaacacaaacaaagttgtaggaacttagtaagtcatcttgaaaattcttttagtttctttaatataaatatattgcaccctaacaaatagtattatgcaactgtagtggttatatggcaccagaatatgcttcccatggccgattctcaataaaatctgatgtgtttagttttggcatattggtgctagaaatagtaagtggaaagaaaagtagaggcctttacgacgaagataacattcttaacctcaactggattggtaagtgtacatagaaaaaaaactttattaaattttacattggttcttagctcgttttcatttatatttttataatgtttattaggcgtggactttaatgaaagaaggcaatgcatttaagcttattgaaaagttcttgttaagtgatccacacatcaacatggaagaagcattgcgttgcatccacattggccttttgtgcgtgcaacaaaaaccgtttgataggcctaatatgtcttctgtcgttctaatgttgggtgataagagcatattgcctcagcccaaaccaccagcctatttcactaacacagatttatgggaaggagctcattcccccgctcttaggcccccatcatgcaatacaagcataacaactgtcgaggggcgatgagaattcacacaaaagatcaatgtagtttccgacaagaactttgagaacttagagagaagctttgttcctaaagtcttgtaactcgtttgtgttcctaagagaactttctttgtaatttctttgtaaaccagttggtgatcaataaagagatgatgataatgtgttgttcctttcttcttagctattaccatgttatattgacacactatctaatataacaaaacaagctaagataagacaaaacaataatgttgctcttgtcaagtttgaaacttcactaccacattgaatttttccacaaggaccaagacctttccacaaacaagtgtaaaaactaattcaacatcatgaactaatctagaacaacttctgctgtggtttatacaattagaccttcaaatgttctatgagacaacacagctttattggtatttgaagaaggaaggtttgcactgagattctttactccaaaactattccatcaaataatggctatctgggaattggttataaatgtagtttgggctgcaaacccaaacattcatttggctcattgactataaatgacacaaaaaatcttgtgttttttttagggtaatttttggcgaaatttcattatgttttaatttttatacatttaacttttttatttattttttttgttggcaaaacctattaatgtttaccttttttttttctataaatttgagacgctagttagatataactgttaaatattaattaaattattattgtattggtttcgaggttttagggttatatatagaagtatatacaatagttatttagttgatatttgacaattatatctagccaatgccgttttaaatattttgaagattctattgtaattttaaaaattaggcccctaacaaaatcttaaagggctttgccaaaaaaataaaataataaattaagtacataaaaattaaaacatattttttttttttgcacaaattacttttgggtgattctataatgcacccccttaaaagagatgtactgatacactcttgacttgtttcggcatccagaaagattttttagtctattttttt

SEQ ID NO: 124250 - DNA, 879 bp, Cannabis sativa
aaaaaaaaaaaaaaaagttaaatcttgaaaatctaaaagaattaaaactaaacatcaattttttaagaaaataaaaaattactccttgtacttttttttaagatttttattactactttggtacttccatcatttcatggtgtgactccttttaattttttaagatttttattgttaagaattaagatacataaaaacaaggaattacatactcaaaatattttcgtaaaagatatagggaaaaattacaatttagtggatgttgtcatttgttatccgtgttttcggatagaagatactagacagatgacatctaacaaaggtttaataagcttttgggcctactaataggcccgggaagatttatgaggtagtattttttctttataaatataatctcaaatcatatatccagatctcatgtaatgctctggatttgtcagctttttgtagacaacaattatgacattttttggtcattaaagaatcctaaagtagaaccctcaagggtcattcgagaatggaagttcaaaaggtatctaggatagcctatagtcctggagaatgcttacgtggccccccactgacacaatcccaaggaatctggcgacttctcccctccgtcagattcaaaaaaggctcacggcaaaaaagtagttacctttttgtacattgcaccactactttgaataactcttaaaatattatttattaaaattatgaatttaaataaataatttatcattaaaatataagatatgataattaattaacttaaaaagttgcattcaatgcagcagattgcgcatattcagtatgtgtcacatttgcaccaaatgccatgtacacagcaaacactgcatatgcagcagatgcctt

SEQ ID NO: 124251 - DNA, 1702 bp, Cannabis sativa
  modified_base (1221)..(1228): a, c, t, g, unknown or other
tcttctagcaaggctctagtttgaaggtaagcagcgataggtgtcatccatgttggagtgtcatccaacatgtcagcttcttctgggacaacaatgctgggttcttctaaaaactgtatgggcaccaaattttctttgtttgctatggtgctgcttgccagacgggcaagtgcatctgctgtggcattcagttctctaggtatctagttgatcatgtactggttcagctgacttaacaagtatttgatttggctcaagtaggcaaccattctatcacctcgaggtatgtattcacctaagacttgattcacaactaattgggaatcactaaacatgtctaggtggtcagcccgtacttcatgtgccagcttgaggccagctattagggcttcgtactcaacctcattatttgaggcttttaagccgaatttgattgctccgtgcagttgttgccccaggtgttgtaagggcaatgcctgctccaaacaattagtcagtgcaacttctgtcaacatggagtttccatgttatttcttcgagattttgttactgctcttgctctcgcttcttctctggctcttgtggttcttcatagtcttgaggggtctcaagagttgagttggtgcactcagcctttatggttgttcttcgtttgtacgtgatctttaactggccaagctcaatggcccatttgagtagtcggcctgatgcttaaagtttctgcaaaacctgccacaatggttgatcggtgtacacgtttatggggtgtgcctggaagtagggcctgagctttatggaagccaacaacaagttgtaggtcagcttctccatgagtgggtatcaactttctgcatcaaccagccttttgctaatgtagtatacagggtgttgtatactaccttcttctcttttgaggatagcactcacaacattctctgtgacttctaggtagacgcatagctcctcattgtataggggttcagtcaacaccggttgtttggccaattgcttcttcagctcttagaaagcattttcacattcctctatccactcaaatttttggttgcatctgagaatgttgaagaagggtaggtatttctttgtagaattggacataaagctgttggaattaattttaccaggatctagatttactaccatgcatgttgtttaacatcctaaatatgaatttctagaacaatgtaaataaacacatataannnnnnnnaaaccttacagtgggtgcagctgaattaaatgactccttccgcttagatctctaacctttgtatcctttctgtagtagagtatcaccaagatatgagcctgaaactccttccttgtgtttgaattcttcagagtgttacatactatgattgaggaccacttgatgtgtgtgcgcacttactctatcaccatagggtttgaaattatgaagagaggaagagagaagagaggttcgaatagcttagggaagaaggctcaatttttttactgaaggtaagtgtgttcatcatccttcaatttgaggtcatcactatctatttatagagaaccctctacgtttaggtttgaattatttggcattaaaaaaataaaataaatggtaaaaatttagcaatagtggtcgaccataggatgtggctcccccactttgcaattttgccatttttccaactatttatcttattttctaaaaaat

SEQ ID NO: 124252 - DNA, 986 bp, Cannabis sativa
ttttaagatgaacctattaaccttattaacaaattcgaacagtgttgtgccgataaagtttagcccaactaatagtttgaattaagcattcgaatctatgtcatgctttatcatactcaaattgggtattaatatggctccaaatatattttctttttttttgaaagaacttttaaacttcaatatgaaataaataatttaatatttttgaagcataaatatactagtattaatatattttcacaatgtaaaattaacacataatatatatttaaaaataactgattaatatataaaaaataaataaaaaaaatactcatgcctcctgaatttgtgccgattttgtgttgtgtcgaaaaaaacacaatccaaactctaaatttaactataatataatcaccacaaacaataaaataattatataaatatgaaattttatatcgttcgtacaaaatattttattaaggtcttgtctagtatatcatgttgtattgtattgtattgtataatattatactggattttattgtattatattagtattatttaatacaatactatttagtgtcgacttgtattaataagttgtataaaatatttttacaataaactagaccccaacctgaccttcgccccaacccagacccaagacctgggacctggccctggacttcggacctagggtctgggtccttgtctaggtttttggtctcgagtccgaagtccaaagctgggtcccgggtctcggtctgggtccgaatttgagcctcggattccagttttggatcccaggtcagggttgggggtcagggtgcaagtcagagtccgagttagggttcgagatctagagtcgaggcaggagttggtcccaaactctttgtatatattataatacaaactaatatagattatttgttatatattaaataatatgattcacattatatttaaatttattataataacaataattaatacaatataat

SEQ ID NO: 124253 - DNA, 1475 bp, Cannabis sativa
ttcccaatgtatacacattttgtgggatttcttgggtcgagaataacctcctccaattcttcaattggttttagcaggtttctttgatttgaactcggggatcaagatcttcatctttcttctcgttttctcttgccaagatcctcatcagctgatgacaggcctttctatgctgcaactctatgtgatagcaatctcgtaccagcatctgttcgccacgcaccactcccacgccatttggtgtttggaactttaaagacaggtgctttatcaaactgactgcccctagtccaattagtgctgaacgacccaacaatatgttgtaagccgaaggcaggtcgacaaccacgaagtcttgcataacagtggcagttaaaggtgactctcctatagttaatgcgagctcaattatgacaaggttagtgatgctatgctcgatgaatctgcaaagattcaccatacaaggccttatcttagcctttccgagcccaattttctttagagtctccttataaatgatattcgccgagctcccattacctattaacactctcttgatcctcttattggtgagttgatttgttatgaccagcggttcgacgtgagggtatctcacgttcttatcgtcttcctccgtgaacgtaatggggggttcctcgattttcaccttcttggaaggttttggggcaaagacagactgctcgttctttatctccttcacatatctcttatgagcattattgctttcccctacattatgcggccctccggaaatgactaggatgttctctccttccacaggaataggttgtaacctacggttatttgggttatcaagctgacggggctggttgtatcgcagggcctgtctattcacatactgcttaatatggcctcgagcgataagactctctatctcatctttcaattggcgacattcgttgattgtatgcctaatatctttatgaaatttacaatatttgttaggatctctattgctcctcgaattcctcatagggttcggcttaccgaaggctaccttctgctcatgtgcgaggtaaattttttcccgagtttcattcagctcagtataaatagtatacactggcacgtatttatcatgcttcttttgtttctttctatcctacgaaggttccctaatttcgtcctttctttttggaccaaaagcccccaagttatcgattctcgtggaagcagtccctgttgagacattgctgggtttacctcccgagcctattttcaacaagttcatttcgtttcaggctttttccttctggacaaacacctgagctctcttgttgaactcaatgatgtttcttacggggcgtccttgtagatcatcccacaactcgccttcggtggttaatggatcagtggagattcccacctgaagggctataagttgctgttgggttctgtgccctaaataaaacccatttcaatataataagatt

SEQ ID NO: 124254 - DNA, 1433 bp, Cannabis sativa
tgtaggaacttgaccttccttgacatgtctcaaaacagttggactggctcaattccagaatctgtgttttccaatttgatcaaactccaatctttcaatctcacgaataacaaatttgtgggaaatttgtcgtctaatatttttaaactttctaagctcaaacacattcatttacaaactaattttctcaccggtaatattcctagtgaaattggtcttttgcataatcttgaggttcttgaactgtatgaaaatttctttagtgggagtattccttcttctattggccaactgaaaaatctatcacaacttaagacattggatctttcttctaacaatctcacgggtccaattccaagatctatgtggaacctcaaaagcctcatcattttgtctgtaggtaacaaccaactgtcaggagtgttgccagttaatatttctaggctcaagaatttggaggtgttatctcttttcgccaataattacattggttcaattccttgggaaattggaaacttgaaaaaacttataagtttggttctttctaggaaccagctcacaggtcatattccaacttctctatggaacctcaaaagcctcattattctccaacttttcaaaaacaatttggttggaacaatcccaccagagattggaaatctaaaactcctgtcagcttttgatgtatctatcaaccacttatctggagccctaccaattaatatttcaaggctaagtaacttggagaaattgtatgcattaagaaataattttactggttctattcctttagagattggaaacttaaagaaactaaagcacttgtatctttctcaaaaccatctcacgggtcctattccatccacgctatgtaacctcaaaaacctcaccgatttgcaactttacgaaaacaatctagttggaaccatcccacgagagattggaaatctagaattcctcacatattttgatgtgggctccaatcaattatcaggagagttgccactaaatatttctcgtcttagtaacttggtgcttttctctgtttttaataataaattcactgggagaatacctagagactttgggaagagcattcctattttgaactttgttgcatttggaaacaacaacttctttggacatttgccacaaggtttgtgtaaggggttcaatctaaaatattttagtgtaagcaacaatagctttacagggacattgcccgagtgcttgagaaattgcaccaaattagaaagagtgaggcttgatgggaatcaattcgtaggaaacattaccaatgcttttcatgttcacccagatcttgattccatattcttaaacaacaaccaattcatcggccatgtgtcaagctcatggggacaatgtcagaatctcactagattacagatgggtcaaaataaaatctccggtaa

SEQ ID NO: 124255 - DNA, 2539 bp, Cannabis sativa
aaaaaaaaaaaaaaatctgatactcaattaaaataaattaacacccaattaaaaaaaattaacaaccaataaaaatttattttgttatcttttaaaaaaccaatttttaatgttatttatcatttcctatgagtcacattttgtccattcccattttcgaaccacccacagccacaacaaaccattattccattctcacacccacagaaagccccatttgttgattattaagccatcgatttttgaattccaaatccagaaaaattgaggtaaaactccagtaagattattgtaagaaagtctcacatcttgcaaatttgggaatgagccaaaaatatcaagaatagtaccaaatatattacagcttccagcatataaagtaaccaagctagaagatccgatcagctcagccggaaaactccacggagcaagatttatatttgtactaatactcaaagtttgcaaatttgtcaatccttgaaaacacccagatggaattgaagtaaaattgttaccatcaaggtaaattgattaaagaagagaaagattggtcattgatgggaaagagcccttgaaatgattcccttgaagaggcaaagttgtgagttgagacagagtaccgagatcggaaggaaagagttttgcctgagctacatttatgccatcccaacactaaaacactttgagattataaggcctaatattaggatagcataggcagccaaacactttgagattagtgtagacaggttttgtattgaacaatgtttcaattggtgaaagttagttgaggacaggggtaggtaatcaattatgtaggtagacagcacatctaaaagcctcatcccaaaattgcaatggcatagaggcttgagcaagtaagctcagcccatgttcaactattttcctatgttttctttccactaaaccattttgctcatgagtggttggacaaggatgtctatggacaataccagcctgtctaagtggttcaaaaaagctcctatattcccctccccaatctgattgaaacactttaattttctttcccaattgtaactcagtttctgttttgaatgcaagaaatgtttttaaagcctcagacttatttttcagtaaataaatccaagtgaaacgactaaaggcatctacaaaactcatgtaatatttgtatccattataggataagttgtgggaaggatcccatagatccgagacaatgagttgcaaaggttctgagtacattgtattagaaaattttggaaagggcattttatgtatcttgcctaagcaacaagcttgacatacaccatttgaggttttattacatgagatattacaagagtttaaaacagatgtgaccaccttgtgagaaggatggccaagtctgttatgccacaaatcaaaatctgaaacagtaggctgagtacaatggctgctggaagctgaaacaacaaggtcactggtgacaacgagcagattttggactggaaaattgagcaccagaagtgagagatgggtgggaagaagacaacactttgaaatggcatggatcaaaagtatacaggccattgtggagggtcccagttaacaacacttccttggtaacctggtccttaacataacaagcatcagcatgaaactcaaacaaaacattattgtccaaagcaaatttggaaacacttagcaagttcttagttatctcaggtacatgcagtaggtttcgaagcaataaaggcttatcatgattattagatgcaataagatttgtaccatggtgttgaatcgacagacctgttccatttcccacataaatctgatcagaaccagtgtattcagcatttgtcatcaagttctgaaggtctggtgtacaatggtttgtagcacctgagtcgggataccaatttccatcatcaactgatgtggtctgagctaaattggcctgcatcgagggagtttcagcagagggaattacaccagtaaaactcttatcaaattgataaaagcaatcaaccacagtatgcccaagcttatgacaaagctggcattgaggcctgtgttgttgttgagatggctttcctcctctggttccagcattcgatccccttcccagattaaagggtccgaatatttatcattagatggattcgagtgtgtccacaatgtttttcatgacatccttaaagatagttttcctagattacagcaattgagatttgataataatgatgggttccattatatcattaattccactcatcatgaagcctttccatgtttggagtcactaagacttaaagataatttaagaagcttggaaagcattatatgtaatggtggtaataataaactcccaagaggctccttcaatcaattgagagtggtggatgtgaagtattgtggtagattattagtcaatatcattgatgaagttgaatcaatgatgccatatttttccttatcctccaatgtcacagtatctacactttcatctaacaacccttcttcttgttgctcactctccatttggctatccata

SEQ ID NO: 124256 - DNA, 933 bp, Cannabis sativa
aaaaagaaaaaaaaaagaacaatgttttctaattggttttagttagttaaaaaaacaaattagagtgaaggtattgtttaagttctagtaattaaataatttagcaacagggaaagttaagatccaggaagaactaaccaatgcgcggtctagacggacctcaatccagtttgcttcacctcgatttcgttcccacgtgaaagggtacccaatcaaatcgacatccctcaagtcgcagtcggccaacacttgcttaaatccttctaacagtcgtctcgggtatggacgacctccctttttgtctgcctggttgacgacgttgttgagatcgccgactacacaccacggcaacgaagagctgttacgaagacttcgcataaggttccaggtagcttcgcgttggtctctcttgggtctccgtataacccagttaatcgccactttctattactgtccgattctaccacaaaatttgatatttaatataattttataaattaattattgctaaaaaaataaataaaacagcatgcgaaaagtgatttaaattctagttaaaaaatataaaattaaagttattttaacggtcaatatctcatatgtttaataaagatccttatagatttagaaaagaggaccttcttttaaatgaaaagactatggttttaccatacccatactaattaaaaaaggttaattaagatttttacctcccaaattttaacatgtaccaaattaagccctttgaatttttctagccgttaaaaattcccttaaattattttgaatgttagatttaaggacttttgtctaattttatttcattttaccatttcaatgattatttatgtattaaatcatgctccccaaactttgatatttaccaaatcataccactcaaactttgacatgttgttaggctaaaattagtct

SEQ ID NO: 124257 - DNA, 939 bp, Cannabis sativa
atatatattttttaaaaaaatatgtgataaatctatttttataatttttattagctaatttattagatttgaccattttcttaatttttttaaaatgtagacatttactaatttagctaccaaatttagggccattttgcatcttaacccaaatagaaaaaatccccataaaatatcattagggttaaatagaaaattcttctaattttgaacattctcacaagattccactggtagctgtgttgggcttgtggctatggcggtgaaggattgtatgcagttgtaatctgtcaagtgtgtcctcaaattaataatgtcgatgttgtagaagtattggggtccataaaaatagttagtcatgtggtcaacatgttacattaatacgtaataaattaataatctttttcataaagaataattgcttcaaagaaaacaccataagaaaatatatacattgacatataatcaaatacaataaaaaaaaaaaaaaacatacttttcacaattataaattttataaatcatcttctctaaacttcaaatctaaaaaattatatctgatgaaccccctttactaatctgaaaaaaaaaaaattaaaaaataaaccataaataatttaaacatgttaatttcgtttttgacataaccaaagtattttattatttttttttgtatatttttgactagagtatttaaattagcgtccatattttgtgtatctaaatttagaatgaaagttgtctagctttcctatttatgaaaattgaggtaaacatggtaagtttgattacacaatttattcttatctaaccaactggtatattctcatcttgtgcgagttttccattttgttaggtcagatttcttgaggagaaaaccggagttaaactttccttttctataaaaggaaagctgtacttactgtaaagcccgcttag

SEQ ID NO: 124258 - DNA, 933 bp, Cannabis sativa
gagggtcttatattttcccagacaaggttgatatgaccgctacgcattccaaccctcttcctctctctgagaaagagactaagaaagcaaggttgttgttagcgaggcagctgtctcccataagagaaggggatcttcgggcctccattacgcccagttaggaacatctaaatcaaacactaccacaactgcaacaaaagcaacaacaacaacaacaacaacaacatcaataactcaaccaacaacaataacagcaataacaactccaacaacaacaataacaacccaaccaacaacaacaactacaactttagtccaaacaagcatcacccaaacggccaaaagcttctctacaaccctagtcaaaagcaattcatccaatggctggctcattgattcttggccttgtctctctagcataatactgaggactagctctagtggtggcgctcaactgttgctccatgttggccattccttcagtatgaggtgccagtggaaggtcctccttgggcagcagaggttggccattaagaccaaccaggttggcagtttcctcctgaccagccgtggtagccaggtttgtgatgcctcctaaaatggcagggttggcaaaatccattggttttctggagattctatttgtgactggaacacagacatcaagatcaactgccataggatcctaaggaagatccaatgacacaaaagttgtagcaggagttctccttgtgttaaccatggcatttcattagataaattaacaattcaatgtcaatgaaagcaccaaattgttgatctcagatttggccaatcaacagtggagtcaaatttgatactaatacttaccatgtgtaacataatacgaacataaaagtaaataagacacaaaagtttatagaggtttgacccccttagttaccaggtaatgac

SEQ ID NO: 124259 - DNA, 1149 bp, Cannabis sativa
gttagaaagagggactaacggacttacaactttgtcgaccttaggtactttcaccgccaatttttgaggttgaggactaatctgtatcaaccttacgtttttggggacttttgccgcaattatcccatttaaatatttgattatactaataattaatgtctttagtattttttatatatagagagcattattattaggcatttttgagattgccctatgtaattagttagatttattttttaaaatttattatattaaaatatataaaatctaatacaattgtaccaataacgatataacaacaatgagtatctattacgcaccactaatagtggcaaatctaaaatttaagttgaggggaagcgacattttttttataagtgacgtgatatctttttttttttacattgtataacatattaaaaattttaatattaaatgtaacataaataaaaataacataaataaaaaatttgtattttaatattaaatgtaacataaataaaaaaataacaataaaaatattaaattttaataattaagacactaaatacaaatgttattagtaaaaattcaaaaaagtaaaatttaaatactctccactatattcataaaataactttactattatatcaaagtctgtattatattcataagagtattcttatgagcccttgtggtccttagcactttctataagtagtgccctacgattgataaataatatttcgtaaaaattattttcttaagttacatgaaactcgatatataattacatcaatagaagtatgtaaccgaggaagatgctactagtggtgccttttagtaattccctattcataaatatcacttttgtttaaaaatatatgttgtaattaactaaaatatatatacacagccgaccttaggtataggcgggctaatcccgcgcctagagcccactcattttaagggccaaatataaaaatgttttttaataattgttaaaagtactatttatcattatagtaaggacaaaaaaaaattatgtaaaatccattttaattcaggtcggatcctggggataagttgaaaaatacttcttttttgtttccattaatcaaaaatactcttatattgtttttttattaaaatatacacacttttttg

SEQ ID NO: 124260 - DNA, 679 bp, Cannabis sativa
taaaaagagcaaccgtaaaaagggaaaatagcatgtcacattatatcattacttcaatttactttccaccattaatcacttcattttcaattcaactttagaaaacccgaaatactagaagccaaaatgactgtcaatttcgttttgttgacaacaacaaagctgatacaagaaagggaatcacactctatcaaatttggtttgtatactaaacaactaaatttactagacctgtatcaaaaccccagaagaagattttaaaccatgatatggtgcatcaaatactatacaatgctaaccaagtccttagcaaataaagtcctatacagatgtttcaatttcccacgaaccaataaaatgccataaatctccaaccatattctctaaacacactctttagcgggagtaactcttaaaaaaatgagcttcaactgtacaaaagggactctatataatagaaaatggatagggagctctctattactccaactttttgcgaaatgtttttaatagtataatcaaaagcattactattttttcaatatttcattaaactaatctaaattataaaaataaataagtttaacttaaagtagagaacataagcagagtaacattaaggaaaatggctctctacatttaacactgtagttattttagctaaaatttggctaaaaaa

SEQ ID NO: 124261 - DNA, 733 bp, Cannabis sativa
  modified_base (682)..(690): a, c, t, g, unknown or other
ctttattatcgattcaagtctaaaattcatatcttgaaatcaatcaacctaaagataatcaacttggtaatttggatcattaaaatcaacaagttgtactttcagcttattttctatatgtgattatttacctcattcatgcgattatttgaaagggatgaattaagttatatttgtaatatacctagattatatgctaatagtgaagcatgataggaagtgcatgtttaaattattgagtaattataagaggaaatgcttattagcattattgttttgattggaagttccgatcaatgtaagttatggatagtaaggggtatctagtgatgcctttgagatagtttgatagacttagctaagaatccataatttctaaggagaatgagaatcctccattaccatataataggaaagtgacgtaccctatcacttttaagattacttggaaatagggtgagcatctaagagaattgagagggcaataggtttgtctcgttcatgaggtcatttcttcagtatatgggattgcatgcgttgcacaaaggtgggtgatcacttggagccattcattatattagtggttcaaaaggtagaccctttttattttaagggtgatttggatctagtagagccagaagagtggatgagtgcgattattcttgtaaagtccttttttggnnnnnnnnntgacaaaataatttttccatttatggtaagattgttgagcatt

SEQ ID NO: 124262 - DNA, 847 bp, Cannabis sativa
  modified_base (487)..(496): a, c, t, g, unknown or other
taaaaattaaaaatcacccatgaatttctcataaaccaagaatttcagttatatagacacactttatataaaatagatatcaaaagcactctcattagcttatctattttatctttcaaattacaccacaaaatttttattttacatcaaaatttaaaattataccatatatcaatttctttaaaatacataatcaaaattctacatttttgttttaaaaaaataataatataatttattcatttcaaacatataatattaatgtggtttatgctataatgaaatattgtattagaaaaaaaaaatagaaaatcccatattagagaggaacaatttctttgttttccaaaatagaaaaccaccgaaaccgtcgatgttgagaatgcaaccaaagtcccacattggctaggaatgtgaagaattacgggtatataaggatggacactactccattagtatggaacattttgggaaggtgcccaaaaannnnnnnnnnagggcttaggcccaaagcggacaatatcatactaatgggagtcaaggtgaggtagtgcaccaacaaggtggaagaacggggcccaacaagtggtatcagagccaaaggttcaagcgctgggatagtgggatgcatttgtgatgtctggaagataccctcaatgtgatgacctcgcgattgaagatctatatggtgtcttgtatcgaaagtctatctgatattgagatagtcaggtggcgtgtcccgtcaataattacggcagtacaagatggagatcggtgttaggacctgtgtcgaaagtcttcctgacaaaggtgatggtcaggtggcgagttcccttggtgatagcgg

SEQ ID NO: 124263 - DNA, 1203 bp, Cannabis sativa
gcggtttgatgaactcccctaacaattagctctgttgcaagctggaatatgggcaggaactccgttctggaatgaattactagagaaaggtgcagctagccttcaatatttttagaagatagcccaaaagtatatcaacttggaagaagcctaaataatggccttcagggggtactatcctaccgaaggctctaggtatgcttctaaagtgcaattcccaggtatcacacttcttactgctccccaaacgagtggcatgcctagtgtgcaatttcaagcaacacctgtgtacttacccaattcttcatggcaccaacccattctgattatgggcttccattaagtggttccactttcggagcatgtacagagtatcttgctcaatccgtttcactttcagcgagtgaagttgcaactcccaaagcttctaggagtaagtcatccaaaagaagtacctagagtgaaagtaagaagccaaaaaggtgtgggtataaccccaagtatactcagtatactgatctggtggatacacaagaacacatatatttggccacaaggtaaaatgttcactaccggatgccaccacctttataccaagacagctcacggagggatcccaggaaagtatgtgagtaacataatgacatttgagcatatcaccaatgaatgcaagaatctaaaggatgagattgagaacctaatacggataggccacatatatgagtggataaggaatcgttgtcgcacataagggaaggataagccagaactcaagtaccacccggaggcatggtgtaagctccagatgtccaggcccctcagggagcacttcctcaaaatcaacgggccctacctatccagtcacccagaccgaatgggagagtcgctatgatctccgaaggccctcatataagaggttcgactcgtaatgagtaatggtacgccaaggccatagaccatgatgaagagatatgtgaagtatgccagctaacggcttagagacctcatctcatggaccgaccaataacatttaccaaggaggatatttggacagtgcattttctgcaccatgacccgctggtaattgaaactcccattgccaacaagatagtagctcaaattttggtggataatgagagtttagtaaacatctgttgggaatatttattttaccaggatcttagatctactcagaagtatgtt

SEQ ID NO: 124264 - DNA, 3794 bp, Cannabis sativa
aatgaaggggacattgaagtccaagaggtggaggatcagggcgaggtccgtcctgacagttcgtctgaaaccgaggaggagggagttgctcagggattgcctttcggtgggtacaacgaggaaggggaacccgtgtctgaggctggtgaagtcttggtagagggtgaggactatgttactaaggaatacaccaaggctgttcctcaaagaaggcgaggtgccttaggggcttggtgggtttctcctccatctatagtaacccaagctaagatgaagaatttggagagggacagctacctgggaaatgtcgaatgctttttcccttctccaaatcatcggggaactagtccaagatagggatattgtgcctggtcaagtgctcataccaagcagggtgcaatgttgcctttgctttcgtacttcaagaggattgcagactactatcatatctgcccgacccagttcactctaaagggcatcaaatatttgtccaccctattcatcctttatgcatcccaaaaatggggtgagccttctccgcacgacaccaactggctttttgacctgaagtcaactcctaaacagagcagatcgggatatttctacttctctcaattggatgagaaatagctgaagggtatcgtggacaccaatgtcagcaaaatagggcattttgtggacgagtactactttgtgtaagacatggataccgtacacactcggttccagcagattcccttgtactaccgtcctcctttcacattgggactcaggcagagggcagaaaaaattcttcaactgccagaagctgcttggaacatcactttgttgaacattgaggccaactatgtgaagcacaagctcttcccagatgattttgtaccgaagcccttgaagaagaagaagaataaggagaaatagctcattcaactcaagcgtgaggctaagttgaaaggagacaacagagccaagcaatatgctcaagaatattcagagcaggagaagcagagcaagaagaagaagaaggtttccccaaccgaccaagcactagtggagcatgctatcaggattatggaaactgatatgcctgcttggccatccgctcttgtggagggaaaagggaaggccgttctggtggagcatgaggaagactcttcaaatgatgatgtcccttccatgcttgtttgggaaaatgcttctgcccgcgtgcagggtatttttaacttgcacttacttcttttatattatgcttttatatacattatatatgcttctaaatgcttcattttattcgtgtagaaatgtcttagaaggtactccaagctttgaagaagagagtgggagacagctcaggccagtctcctctggccaagaagtttaaaggcggtgagactccgtccaaagagaaggcgccaatcggagaggtcattgacctttttgaggagccacctgttgtggaccttccagtttaaaaggtctcgaagttaaagagttccagaggggggagctcagacgagtctgatcaagctaggcccccttcaacaaccgtggcactgagcacgaaagcgaaaatgggtaaggatatgctccagtatttcttgaacagatcacttcctgaggtgagtgaccaactatccggggtggacaatgagctatctttggagctggtcctgggaggagtcttgaaggaagctactcgggtaactatctccttctttatcttattctctcttatgtagcttgaactttaacattttttctgtataggtcaatgtgaagatggcatatgcttactctcgagccaaatcagttgctgccaagaaccttaccaccaccaacacactgcagagggaggtggatatggccagaaaggaaactcaggacgtgaggaatgagcttagggaggtgaggaatgagcttggggaggtgagaaatgagctcggggaggtaaacaaaaagcttcttgctattaacaccaaggttgaggagctgaccaaagaaatgtaagagataccttcgaccgagcagctggaggccgataatgtctctttgtccaaggaggtcaatgatcttaaagacaagagggagaatcttcgcactcttctcacaaaattaaagggagattcccaaactaagcagaccagagaggaagagctcgtgaaggaggtggagagcctagagacaaccgcccttgaagttttctacgaattttggaaggccatccctgaaggaaattttgattaccttggtgagtccaaggatatgtatcttaatttctgtgcaggtcagatagccaaagagaaccccgaggcaaccacttctacagttcaaaccgactagagcaacgacactcctactgctcagaacgttgagcctccggcccctgcagaccaggtcaatccgtatagagaacccaggacccccgctgtctaaactcttctttttctatatatatgtctgttcagcccatactcctttttttgagacaaaatgaccggccaagcggtttttaaacttgggttatatttttcatattaagacaattggctgaccgggtagcttttaatctcgaatttaccgtgctttgttatctttttaaatgaatatcgtcccttattttgataatgatctgtgcaactatgtttgtttttttagcttgttatttacttttaccaacgctttgtactggtatagttgtcccccaagtgaccgagcagacttttgactcttggtcacttgcatttcataagtatggtgttttgtctgtttggttctttggattcgagcaaacctttgtacgcgtttagtggtaaatttataatttgctaatataattgacacaatcataatttaagtagacatctttattcattcattggtcagaatatttttgttaccataataacttacataaaagctattatattgatctaatatgatatttagctaaatttaaacaaaacaaatttcacttaaaagaaattgtactttcaaaggtagtcgtccaacctaagtatttaatcatttcatcagaacctttgggcggagtctgcccagaaggccatttacttaaaattaaatgttctttaattttgtacttagagtggtcatccgaccttgtacttttattggtaatacttttctaaatgttccccattccaataccttagaactagaatgagtttcatatttttgtcataccacccaagtttgtacagtcctgattctagaacttcaaccacctaaaatagcccttcccagtttggtccgagcacaccagccgtaatttaaacctctgtgttcagaaatactcttctaaggaccatatctcccacaaaaaatttctatgctttcacttgcttgttaaagtactgagctaccttttgttgatgggccaccaacattagctttgctgcagctcatttttctttgatttcgtcaagtgattcagctaggagggtgtggttagcctcttgatcataggtcaatcttctgtgggacggaggttctaaatctacaggcggcatagctttataaccataagctatagcgaatggagtttgtccaattgctattttttcagttgtgtggtatgaccatcactactacaaattatacttttggtgtcagttttaaactgacacttatacttttagtgtcggttcatagaactgacacatattccaaagtcacaaaaagtaaaaattttggtgtcggttctaaactgacactattgagttttggtgtcagttctaaaccaatacttaaagtatacatatatattttttctttta

SEQ ID NO: 124265 - DNA, 1106 bp, Cannabis sativa
tgacgtggcggtaacggcaaatccatcgggcgtagaggacgaggagagtgacgacgaggagaacggagaagattatgatgacgaagaagatcgcttggccacggatttcgaagttccggtcatctaggactgtgtagtgccactctataggtcggttgttgttatcttcggtataggccgtaagagttctcatcctcactcgggaactaaaaacgacacgtcgtttttgtgattcgttgtctgaaattcgtttcaattcaaattgaggcggagattttgcatttggatttttggttaaatgggcgtttcagacagaatttgatagcaagtttatactgttttttgtttggcaagttggcttagatcctggatgattttccttagatattattgtgggaagaggaaaagacgtcactcgcgattacagcgcgtgtaagatacgggagagagctcaaccgttcgatcttaattagctctcagatcgaagtttggtgaatattcgcgtatggatgaaggttttaggattcaaatattatgggcccaggaaacttggctgctcttgatatttaaatgatgtttgattatttgtttatttttgggattttcacttagcttttaagataggtcttttttagttctgtaacccttgtatgatctctttgagtgggagatatttttcttgttctgttaaaggaggataattagttttttaatacagacaaaaggataactatgtacatacaacaccttttggtgcaaccaaactcaaatgaatgtacgccacaattaatacatttgggttaatgtattcttttatttatatgttatgcaatagaagtggggttattttgttttttaagtaagttttccaaattggatattttagtaatgcgtttaattaaatcttgttttattaggatagtaactaatgaggttcactttgttgtttgtttgccatcagtgatttattatcttaatagtcttttgggtcgattggtacacgagaattgatatactgattattcatcatttatatgaagttattattacagtagatctctatttaagaatactctattcaagaataatctctaatttgttataaa

SEQ ID NO: 124266 - DNA, 741 bp, Cannabis sativa
agaaaagaaaaagttgatgtgtatagtatgtactatttggatttaaggattgttatttcttctatatatatttactctgaaatgttaagaacaatcccacttcatctctccactgtaatttcattttctctattctgaaacttaagatcatcaatcacataacaaaaatatgatctcaaccaaatcattagctgaatcatctaaccttacttcaattccaccaactcatattacaattccaaataatgatcaactagcagtactggaacactcacaagaactacaaattccaattattgatttctctctcctaatctctagtgatccagatcaacggtccaaaaccattgctgaactaggcaaagcatgtcaagattggggcttctttatggtaattattataattaaacttaaccatattgatcatcatttttcttttataatttctgattttagtgactattgaatatatgtataggtgatcaatcatggtgtgacagagaaattaatgagtgaagtgatagaagggtgtagaggtttctttgatctgagtgaagaagagaaagttgagtttaagggtgaacatgttttggatccaattaggtatggtacaagctttaatgcattggtagagaaagctttctattggagggattatcttaaggttcttgttcaatttcatcattctcatcatttccctcacaagccatctggattcaggtattattattattattatta

SEQ ID NO: 124267 - DNA, 831 bp, Cannabis sativa
tttatattaggttgttaatccaacatacttgttactaaatctagatcctggtaaaataatttccaacagggatctatgttggatgtgatacagtggatcgaaagttgattatccgaaggggtttcttcaagtttcaggttgagatttcgacgactcaccaactgtcttcagacttctatcttgatattcgaagaggcatacaggaatggatacaattccggtacttcaaactacctaaactgtgttacaactgtggacacctaggtcatgataagaaaagctgcttcagggtgacggcgtatgtctatccgccggagggaaaggcagttcttgcttttggcccgtggatgaaggctgaaacggtggtatacaactgtttcaacaccaaaaattagttggactattttcgcgaagaatccattggtcaaagaccaagaagccaggggaacaccatgaaaccagtggattttaaggataaaggaaagcaaccaatgaccagcatcgggagtcagaatgttttacgtcctaagtttgttgttaagactacaaagaaggctatcagagttgctcgggaacatccagggtccaacttaggtgagaaattaaaattggtgaaaaagaatactttggtggcagcagacaaacaaagtggcgagtctggtacaagggaagcaagtccaaaggctctatttatggacagacgtgctcgatcagcctctcctcgattatggggcaatcattctcaaggcaatgcaacagttgtcaatggcaatgacattataaaaaacttttcccatagacctgctgttggaatttattttacaaggatct

SEQ ID NO: 124268 - DNA, 1091 bp, Cannabis sativa
caattttggagatgactggaacagggccctctaatttgcacacgagtctaatatccttgtccccttagaatcttaattgttttgactgtagtttgatcaacactaagtcacgttctttgaactccaacgatcagtgtttttgatctacccaattattcattcctcacgagactttctaagtatgcttgggaaatctctgtattcttcttccagacttttgtaaaattgaaggctcgcggatttcatccatggtactcatcaatcgattggagcaacagtggttactgcccattcacaacctcaaaagggatcttgttcaatgaagaactcttttaagagttgaaataaaaaaattgagctacatctagtacttgcggccaattcttctagttggcattgacaaagtgtcgtaaatactcctccaacatcccgttaaatctttctgtctgcccatctatctgtggatggtagctcaaggagatgttcattgtgacccaagaagcttgaatagtttggactaaaaggtcccagtgaatattcgatcttggtcactcactatattcttggatactccccaataccttactatatgtttaaagaaaagttgagttgtctcttctgttagttgtctcttatgtcgaatactgcttcgacactgggataaaggttgcatactttgaaaatctgtccacgatcaccaagatcgcattcaagtctcttgtcttcgacagactagtaatgaaatcaagcgagatactctcccatggcctgcttgggaccaacaaaggctctaacaaccttggtgtcttgtgcctctccactttgtcttgctggcaaacaagacaggtccttgtgtagcccacaccacatcctcctgcatttgtgtgtggccaatagtacccatgctttaaaagggcatgtgtcctattccacccttgatgacccgcctacaacgtgtcatgacactcactcagcagcgtcctccttagattgcctaccttcagaacaaacaaacgtccactcttggttcacaggaggtcatcgtctacccaaaactgagttgtctttccttttcttgcaagagccatgat

SEQ ID NO: 124269 - DNA, 1116 bp, Cannabis sativa
tttgatggtcccttttacaacaataatcctatggtagatttgaacgaggatggtgatgcggagttgcaagttgatgaagctatagaggtacctactttgaggttagaattacctccactacctccaccacctccaagggaccaaaggaaagagcaagaaagaagaacccctcgtagtgaaaatcaccaaacaccaggcaccagtagtagccggccaggtcctcctcgtagtaatgtaccatctacttttgaagtttgtacaaaattcaaacctattgtgtggacaaaggaagacatagaggaaaataatacttatacaacttctcttactagtacacattcaggggaaatacatgttggcaagttgtacacaaataagactgaattgaaaaatatagtgggaaggtttgcattgaaaatgaattttgagttcatggtgaagaggtctgggatcgatgtttcttatgcaacttgctagggattcaaattgaaaatagagagtgtgggggaggaagagggcacgttgtgacatgtttgaggtcactatatttcacaacgaacacacatgtagcctggattctagacatgctgatcaccgtaaagcagcatcgtgggttgttagccaccttattaagaacaagttcaaatcagatggaactaagtacaaggcaaaatacatacaaagggatatgtttcaggattatggcatcaagatgagttatgagaagacttggaggtgttgggagaaggcacttatgtatgtgaggggtacaccagcagaagcttatagtctgttacctggttacttttacatgctagaacagaagaattcgggtactattacagacattgtcatagaggacaataggttcaagtaccgtttctggtcactagatgcatgtaggatgggatttaagttttatcgtcctgtgattagtatcgacggtacgttcttgaagacaaggtatggggccacaatgctagttgctatagtgtacgatgcaaacaaccaattttttccgattgcctttgcaatttttgacagtgagaatcatgactcttggaaatatttcttgcagaagttaagggaagcgattggggaggttgaaaacttagt

SEQ ID NO: 124270 - DNA, 1008 bp, Cannabis sativa
ttggttcatggacttttgtgcaaataattctgcagatatcattgggagggtctcggtggtttattgggcaatatggaaagccagagaaatgatcgtgtttggaatgagaaagagcctgtggtagaaagggtggttgttaatgcaattacttattggtagttgaatgttagctcaatctaatgaaggagatctccattcaaatttagtagcctctagtgatgcgaatgagcgttagactaaactagaagttggttctattaaaattaattgtgatcgatgtctcgccatttttagttcagaaaacttgttcggatttggatggattgcccaagaccattctggtcaacttctggaagctgcaacagtgggaagatctggtaactgatcttgtgccaggaagatttcaccagcaatatgctatcaaatttttggtggagtcggactgccttcaactgatgcaagcattagcttgttctattgatttattttctccaaatggtttaataatttcagattgtaaacgattacttgaaaacttctctgatcgatgttgttgtttctttctgggaatgaggtaacttattggttagctcgctcttcatattctagtcctgatcgtattatcattgagtgatttgtccctgttgagttcattgtcattttattggtagtgttaatgaaattgattattttctgcttaagaaaaaaaaacctgtactaaaatataatataatatttttattgacaaccattttatagtgtattattataataatatacaatgtaattttgatatatagatataatatttatattgaaatactttctttttaaaaataaaaataaaatatgtaaccactgcactataaatatttttaaacgtggtacacatcaatatcaaatatgtcgatagataaccactgcatttatatgtaattattttttaaaacattaaataaaatatgtagctattaatttagttaggttaccaccttctgtttttttttt

SEQ ID NO: 124271 - DNA, 1097 bp, Cannabis sativa
gccatcaaatctcttccccaaaggatgctcctccaagcataagaagggttatgaccagggacagcttccaagatagaagaatttggaaagtatctggatcttgccttatataggtaaaaccagtaccctctagggatgactcttgaaagatccatgatcataaccctagcaatagccgaagtagcccccatgatgaaaaaatcgtgatgatcttcatccgcctccatcttacagtttccaatggccaaatagaagatgaaaagatggtttttaatgctaagatgcaaaaaccatcatgagaaatgactaacagagaagatgaaagggaaaaaatggcaccaggagcaataaatgttccaagtaaaacaaacaggattggaaagagaaacaacaaaagactcagagaaattaatacccacatttattgctgtaagacaccgagtagacaggaaatgagaagaaaaaccaccacatgaacaatatgggtggaccaaagtccccatagtagggaccagagttcgaccaaaagagaagagagttcgcattcttaccatttttacaattaattggttaatcaataaatcatgtttatattttagttttaattgtttttatattatttttcatcaatatttattgtattatttcttaaccactatttgattagttagttcttcattaactaactcaatgtaaaatatgacaacgattatattgagcctattggtctatataaaagaggactattcatctctttaaacgtgttttctgacaatcaagtagcttagcaagataattattcctgattaaatgagtattgctaagtgtttttatgctattatgaaattgaaagctgatttttccaaatgtaattttcattttgttaatcatagtaacattgcttgtgtggattttagttgactgtccctgaaaaacgaaaaaaattggaataaaatgtataagtattttaattaattgttttcttaaaaaaatttgagaaaaaatatatatttacaacatatatttataggaacgtgattttgtcccgtgatgtacagtagccgttagatgggggagttatttgatctgagggctgg

SEQ ID NO: 124272 - DNA, 1292 bp, Cannabis sativa
cattaaatacttacttataaggcataaatcctaacaattaattattctagctcatctttgttatcttgttcgtgcctttttatttgttttatttactttcttgtcaatttcttagcttcaatcaaatcttatcatttggtttgttcaaaattgtacaataccaattttttgcacaattaattgctaatcaattcctgtggagacgatactcactaatcattttacttgttttctaatataataagctaaggagaaaaatgaggaatctagccaaggaggggctcgcatattatcagctatttattttggaaatatcataccaaggcgatgatcagtagatagtctgagaggatgattagctacagtgggacttagacatgacacagactcttacgggaggcggcaatggggaattttccacaatgggtgaaatcctaaccgagcaatgtcacgtagaggtagaaggcctaaaagtcatgaacttcttttctcagagaagaagcaatgctggtatttggggaataagcattgtgtgactctgtgctagtattggattgccaatctcaaaaaagaaagagtaaaattttaatcctaatttcatatccgcatatatattaagtataacaatataaatctatataattatctaaaccaaataaaaatactaattagttaaattggatatttgatatttggacaccccatctaacaatcgatctgatctaattggatattatagaataacatctagtctggtctgatctaatcatatcggatatctaatatttgacggtcggctgtaattagattggcatacccctatgtcaaaacttcaagagcatctctttttcatgttagtcataatcaatattgcatctcataattgactaagaatgctcttaggctaggcaacgagcttttttagttttggtacgtaaacttaatctcttattttaattaattaattaatttattaattttaatcattttattagaattttaataatttttttttaatttttttaagaattaatataaaattataacttttatcattaatattttcaataaacaagaaaaatattattattggtcaaagctaagggtgtaaaaatactaattatcactactacaaaagtaactatttgcgtcagtcaacgcgtctcactaaaatggttgaccgaggcaaaaaaataggaggacattttatgattcagagtataattgaagctaaaaaataccaattagcgttagctcattccctgacgctaaaagaagaactgaggaaaaaa

SEQ ID NO: 124273 - DNA, 715 bp, Cannabis sativa
aaatcaataataaaattttgatggaagaaccactcattttcttcgaaaatctcatgttgcattgaaccccttggaactctaaaaatatctctaatgcacaacataacacagggttagatttgtgcctaagaccttatactcttaattttcaaaaatgtcatttttcttctgcataaagaaaaaaaattaggttttctcaaaagtacaatattcatatataaaaattagaaaaaattagaaaaaataacaaatttgtattgcaccaatgcaccacaaggccaaccctggctgcaatgttttttaatgtactattttttatttttattttttttttgtgtgtgtgatagaggaactgttcattgtcttctaaaccaattttgagaacccaaattaacatttctcacctcgaaatcaattcttgagtacccaatttagctcttgaaaaataaaaacaatcaatgaagatactcctaatcataggtaacaatggaaagtctttttttttttttttaattaagtatttatatattataatacataatttgagtttggaatttagaatgcatattgctatatttacttaagctagcctcaaataattaagagaattgccaaagaatactattagggcctgtttggtacgcaggattggactggattggactgaaaaggattggactggactggacaatattggattatgctgaaagtaatc

SEQ ID NO: 124274 - DNA, 794 bp, Cannabis sativa
gctgtacaatattgaagttttttgtatgatattgttgccacagctagtccattttctttctcattctattattaattaaatttttagcctggaaacccaagtgtaaactagttactaggcagaatttcataagccacagattggtccaaatgactgatcgtgtttgacgactggtcagggattcgaacgtttcatgcatgttgtcaacacgtgaaatgtctatatttatgcaatcaaagatgaacgcagacagccaagtaatatgaacccatgggccacttagcgaatacaaaatgcacctaaagcctgggagcttgtgctagaatacgaataggcgactcgcgctctacaactcgcatgttgccacacacaagaatagattaaactgttcttcatttattttataacgtttattctgatttaatgttgtcatttattgtaaatctgttatgaaaatgatcaattatgtaaaccttaaaagacactcgctttctatataaaagagtggtcaaaatcaaataaacaaggctgaaatatttgcaacagtagactaaacagaccaagtttattcttgtttttttctgttttctatcctgtttgttagtagctaattagctcgaacacttgctactctaaatgagtattcaatagtttattcgagtatttttatttatattaaatatataggatgtgattttgtcccgttattgtactttcacggattgtaatccgtgatgtacgtcagccgtcagatgagggtgttatttgatctcacggctgagattgatctaggg

SEQ ID NO: 124275 - DNA, 1277 bp, Cannabis sativa
  modified_base (51)..(53): a, c, t, g, unknown or other
  modified_base (1241)..(1241): a, c, t, g, unknown or other
tatttataactggcccaaattgggacttgatttttttataacaaattagannntattcttgaatagagtattcttaagtagagattctactgtactatgtttgggcaagtaattacacatatagccaaccaaaataaataatattttctacaacatatgaaatttggtgataaaataattattgaaaattaataatttttagccaaatttctaaaaagaaatatattaattgcttaaaatatatcgataatcacaaactaaagtgtccaccgtaacacattatttttgcatcaaacaatcaaattttacaattttacaacaacaaataatataaagatgttaaaaagtaagaatatgagtggagactacatagtcaagattaatcaaaataagagagtggctatgttaagttgaacgagaagaagccacaaattttttctatgatttatagattttgaaaaatcatcaaaaattatttttaataattttttaactgcttaattgtcattaaaataataataattattaaacggtgtcaaaaaattaattaaaaatgataaaaattagaaattaaattataatcatgctaatcgtcaaaaaatgacatcggacggcagcgcacgcgcccccacatgtcgttgtcgagagtggacgttgctgggagaaggttgttttcaaccttgaatcaggtttgaagcgggccacgcaacccaatccgtgcgcaagctagtcagagctgttttctaaccactcgaaatggacagaaagaatggggttttgatcgggattctgatttctaagaaatcgccaatgttaatttcgagtaaaatgtgtaaacagacactagatcaaattaaaacccgtccaagaactaagaacacggttgaactttgattttggtatattattctcatacaattcgaaaaataaattatgtaaaaacattttaaacttgtgggtaatgagatttgcacaattaattttaatcaatagtcaataaaatcaaaaaaaaccccaaaattaatttcataatataattatataaactctaaaattttaatcttaaaattctttcaatttactcaacaattttatgcaaataatatatcaaaagcaagagaatttcataaggaataaaacccctaaacttttaagattaaaaaataaaaaatttaacatataatatgaaaagactcggtttgaccgagtcaaatgtacttttatatatatataaaataatnataaaataatatatatatgtatgtaaaaaaaaatat

SEQ ID NO: 124276 - DNA, 1038 bp, Cannabis sativa
  modified_base (692)..(699): a, c, t, g, unknown or other
aatttttgctcggcaacaaccgaaaatgcgatggatggctagtttggtcacatgggtaagtttagaaccttatttcttagtgggaaatatttttgagaaaataaaatagcgaggttgagcgggcttatagttttttaccattttacccctagtcttaaaaatacttaagttataagtaaaggggcataatggtctttttgttaattgaaagttaggtggctgcctaaccttgtgacacctagcaatatttttcagccaaagtttaagtgaattaacatttatttcatttagaaagaaaaggaaaattaaagagaaaataccaaattcaagagaactttctctctttctctctttcggctgggacaaaccaaagggggatcacctcttttcagctaatttctctggaatttcagtaaggattctaaggttttgtagccaaggtaagccctaacatctctactctttagtgcttgaatttaagtttaggttgagtttgtgattttacaaattaggggttgttacggtttaacttttgtgtaattcgaattatagagttaatttgagttggtcttagttcctagcagcttgttttggtgtttgatttaggttttgtgcaagtttgagcatagaagccttaactgtgatctctaatggcatgttttgatttagtgtgtttttctttggtttattgnnnnnnnnatgttgtgtataccctaattaggtactctagaaagtttggtagtatttggtggaaaattgagcaaagaatgaaatatttcgggtggacaggtgcaaaccggctagccggttttaccagattttggcaggatccccaaacacttcattttctcaattttcgtccatttcagtgccgtgattgggtgtttccctaattcaagagtttgagtaacctctagggagtatagcagaacctagggttatggatccgggtttcccgggattagggttttgatcatgtaacttacccggtttcattatgtgattagggcatccatctagcacaagactttccgttca

SEQ ID NO: 124277 - DNA, 1519 bp, Cannabis sativa
attcgggcggtgggtactagtcccattgtgacagtgctgcagtgctgagtggtgaagacgatacagtgtaacagtaacagcaatagaagaagtggtcgtaattttgggcaatttggattggatttccggaatctgagcgctggaattggactaacaaagttaccaagagtgagcggtgatttcctgccacgtggagctgtatccttcaaccttacctaaatttcaccctcgtggcactgccatcttcttcccgtgatttcggaaagtctgtgaagaccgttttttcaaaaactattcaaaagtgtgtgtcctacggcaacaaaaagagtttgatcttttttatttaataatgataaaagtaatgtgtaattattctagccttcatcatttgaaagtgtctgcggtaaaaaaaaagtcgagtttaggctatatatctgtttttcgaaagggaaatttcgtagttataatttttatttttcgttttcgaaagatgatttgtttctgtgttagatgctacataaatggtacagatgtgtctcccgattcaaatttgaaactccagtcggtggtggagagatgccaagatgtagggctgagttagaggtgttttagggccagtttggcacagtgggaaagtgtactgtgaaaaaaaaacagttagtcctgtaaaaaaaaattagtatttggtaaattataaattttaaaaaattgtgagttgttaatgatattgttataatctctttattatgatcacaaatatgtaaaaacttattttatataatattttattttttatacatttttaatttttttttaaatataaatttatatgtatctgataaaaatgatttttagtatttttttattatattttatcaaatgtaaaaaaaattaaaaactcgggtatataagaaaaattctaggttgatgttgtttgttaataataaaataaaatataaattattttttaaaaaaaaataagaaatttaataaatatttcttttattataattcaactgtagcttttctaaaaattctttaaaaagctattttttaattgtttactaaacacattattatcacattttttttcaaaaagtagcttttagttttctcaaaagttgtgccaaacgggtccttaataggccaacccaataattgcggtttggataaactatatactattcaattttttttaaccatacttaatacaattataaaggaggtgggttcggttgggttcattaggttgagataaatattttaaactttaatatttatgttacaaacaggataaaattattcaacctagtgcacacacaaaaaaatgatacatatatgtgtgtgtgtgtgtgtaatatagtggtgctttaaaaaaacaactactaaggtggtagtggtatcattgtgtgagtagcaaagttaataatataattttatattttatattaggcttgttggtagaagtagaagggtaattatagactacatgtttatgatgtgttttggttaattcacg

SEQ ID NO: 124278 - DNA, 1957 bp, Cannabis sativa
ctggatgcacataccatatgtgtcctactcttgaaaattttattgattataggaaagtgaatgctggtaggtactaatggggaatgacaattcttacagggtcattggcattgaaaaagttgctatcaagcactatgatggcactgttcgaatgctgcatgaagtgagacacataccagagttgagaagaaacttgatatcacttgaaacacttaaagatgaaggctacagttataaatcttgcaatggtcagatgagaattgcaaaggggtctcttaccatcatgaaaggtgaaaagaagaatggcttatacattcttcaaggaaaaacagtaatggcttgtgaagccaatattgtacaacaccaagaaactgagatggaaatgtggcataaaagaatgggccgcatgagtgagcaagggatcaaagaattaaccaagcaagggctcctaggaaatttcaaacctaattcattaccattccatgaagaatgtgtgttgggaaagcatcacagattgaagttcatggcaggcaatcattgcgctaagaggccattggaatatgtccatgctaatctgtgggggtctcgcaaggtttgaactcactcaggtaaacactatttcttgtctattgtagatgatttcagtaggcatgtgtgggtttatctagttaaaactaaaaatgaaatcctagaaaaattcaggacatggaaaattgaagttgaaaaccagtatgaaaagaaattgaaagtgcttcgaacagataatggtttagaattcatcaatactgaatttggcttgctgtgttctgagtttggaattgttaggcataggactattaagcatactcctcaacaaaatggtgttgcagagagaatgaataggactttgttgaataaagtaagatgtttattgattagttctggtctagaaaaaatctattggggagaggctctcattactgcatgctatttgattaatatgagtcctagtagagtcattaatctaaaaactccatatgaaaaattgcatggcactacacctaacttgaatcacttaaagatatttggatgtactgcatatgcacatcagaaacttgaaaaattagaacctagggccattaaatgtttctttcttggatatcctaagggtgttaaaggatatagactatggcatattgaaaatgggaagcctaagattgttatatgtagggatgtagtctttaataagcatgatttcatgcacttgacagccaaggaaggcaaagactttgatgttgcagagatcaaaccccctagcaggtatgctgaggctgatttgatagcctatgccttagctgtggttcaatatgagagtgaacctgaaccaactacctatgaagaagccattgcttgcaaatcaaagaaaaagtggcttgctgctatgggagaagaaatgcagtccttgaagaagaataaaacttggattctggcgcctaggccacaagacaagaaggttgtctcatgcaaatggttgtttaaagaaaaagagggaatggcagagggtgagccacctagatacaaagctagattggtagttaagtggttcacacaggttgaggaggtagcctacacagatatccttctcacctattgtgaagtacaaaaccataagaatgatgctagccattgctgcacacaatgacttggaggttgaacagttagatgtcaaactgctttcttaaatggatatttggatgaagaaattttcatggagcaaccacttggttttcaggtggaaaatggtaaaacatatctggtttgcttgcttaaaagatcactgtatgggttgaaacaatcacccaaacagtggaatcaaaggatcaatcagtttgttcaaagtattggtttttcaagatcaaaatttgactcttgtctctactacaaggaaatagggacacctaaggttgtgtacctatta

SEQ ID NO: 124279 - DNA, 1513 bp, Cannabis sativa
  modified_base (35)..(39): a, c, t, g, unknown or other
  modified_base (1333)..(1361): a, c, t, g, unknown or other
aattgtttttaaaaacaattttctgtttttaaaannnnnaaacagttttttagttatgatgtcaaacatgcacttaattgttataaaaaatatatttatatttatttcaaagaaaaattataatcattttgtgaggtttttctactattttattgtataattatttaattaaaaggaaaacattaattttttaaaatgcaatttttttagtgggggtcacaagtaggagtgttgatcggtcgttttggtcaatttatgctacattttatttaacccaatgtaaagatcgagttataaaaatctaaatacaacccgtctaattaagaaaaataataataacgaaaatagtagtcattttcgtcgtaaggttgagcattgctattaggtagcacctgtgaacaaaccaaattttttttatgtgcgggcttaattgttatatgaaaaaaaaaaataatggttatttaggattttcgcttcccgaattttggcctatgcattattgtgcctcctgaacttttcaggtcatcataaatagttcctaaactattcacagtaatgtaaaattggtcatttggttaagttttatcacacgtggcaaataaaataatgacatggatgcttagtcaatggtcacatcagcaccacgtgtataatttaacattaaaaatgtatttttaaaaatcagtaaactaaaaatcaattgataagctaaagggcaccagtggtgcctaacaccctcctatgtgtcaatatcgctattagtccaactaagtatcgggtcctatataatttaatataatagcttttagggggtatcgctagccaatcgcaacgcgacatgtcgaaaaggtgctaggccccactggtgcttaatagcaatactctttagaaaattaagtaaaactaagtttaaaaaacatatttttttcaaattaattacacacgtagcgttaacatggaacttgtgtggcaattggttaagcagtcatgtcatcattttatttgtcacatgcgacaaagcttgatagaaagaccaatttaggacactgtgaatagttcaaggactatttttaacggactgaaaagttcatatggcacaataatacttaggtcatagttcaagtgctaaaattctaaataaccaaaaaaaattatatttacttcaaattaaaactataataattttataaagaaaaacctaacactagtattatccagtttctaaatctatagctatcggaggttatctttttttctctggccaggtccgccaatcttccttgggcttaggtgtggcttggttagggttgtattttgctactgcaattcaatnnnnnnnnnnnnnnnnnnnnnnnnnnnnntgacttgattttgagtgttttagtcttgtctatgtgatatagtttcgagcattttggtcttgtctctgtgacatagttctgaatgttttggtcttgtctgtgtgacatgattttgttttattttattttgttgttggttcttctttgttctt

SEQ ID NO: 124280 - DNA, 1005 bp, Cannabis sativa
atgaagagttccattgaacatcaaagagaatctaggagttgtgatacagttcataattagatggatgaattttggaggaaaattcaagccaactaacattttttcaagaaacctccatttaattgtgtcatacgccttttgcaaatccagctttatcatgctacttagctacattatgggcaataaaattacaaaacttactaatatgagaaaaaacacaactcgaaaataagaaagagtgactattacaaaattatttcaattatatttgtactttgatataatcgtctccttaaaacactcttgttttattatttttgttttctaaaataaaaagaatgtcatgtcttcacattattgttaaataaatttctattcagctagttatctttccaaaataaaaataaaagaccatgaaataaaattatgagacaggtcgtggagattcttcaattccatgattatcaacatgtgttttaccatagcatgcataagccttgtatatgagctttcatcattatttataatttttgcatcattttactttaaaagcacaccaaattaatgtacagcaaataaattgcactaatatcacatcaaataaaaatatcttactttaaaatctgacattatatattatttatattaacagtcaataacaattattttgtgattttataaagaattagaatgttaaaatgaatttttttttattaatttagtgcatatttaaaatctaactttactaataatgtgtaattgaaaatacatcaatttagtataaaaattccactaaattaagcgctcattaagagtattaaaatatgcactaatttagatagtacataatacatatgactagaacactttcaacaaaaatattcattaactttaacaaagagttccacatccaccagtatctatccaaaattactcatgggagtaagaaatggatcagtgttagaggtggtcttagaggtgtgagatgcagcagatgatgattca

SEQ ID NO: 124281 - DNA, 1538 bp, Cannabis sativa
ataataatattaataacttaacatccatacatatatcaaatatttaactctttatttaataatcaaaaaatgtctttgtagttttttagggtataaaccctaataaaaatgtacccacccattaaagaatatggcaggtaagccttttaccgttgcgtataagtgtgctggtataactaattcctgccataatccaaatgtctggtaaacctttacctgccaattagaaaaatatgcacaaacttttcactgtcgcattttttgcattgataaaaattatttttctcgtcgtgggggcatttgggaacttttttacactagcgtttggttttttctcagcgcataagctcgctagaaaaaacttacttttgcgacacaattggcagtagcggcagaaaaaatcttttaccgactaaaaattacagacactttttacgggcacacttattcattgacaaaactatgttggcgctttgtgcctacttttttgggcgcatatatggtccagtaaaagtggcatttattgtagtgtgtttatgagcaatttaactcacgacaacacacctcgtggttgttagatatatgtccaccctactaatccaactaactagtagctcacttggcatttaagtgccaggggaggtggagactactgatatgaggatattttgcctttaagttttgtggtatagttcctccaaatgaaaaggtctccgtagtttttttatctttctgcaaagttagttatctctaagaaaggctttctcggaaggcctttgtgtccacccgaaaggaatttttaggagatctagtcttcctctagaaaggagttcaggttggctagatgttccctcctagaagggagtctcagatagtcgactccggctatctctattcccatttgggaagatccttcagcgtgtgcttcaattcatagtccttgaagcgttcacttcatccaggagcactataacttaagatgaggtggagtttctgttaggaggagtattttaagtttgataagtcgtaacaatcttaacaacttagcacttgtaaccacaaactttaggatctataaataccactccacttatagttttaagagagaatgagattggacgagttttgagaggtgatcttgagagagaaagatttagaggtggagagagaggggtacagagaaaagagacagattgggtttgacttttgtatgacgaatcttctgtagatgaaaacgattcttaggtaagagtgtgagagataaacactaggtgacaatccaatagagagtctatctcgactgtattgtaccttgttcttgctctatcaataaagaagatttcgtggtgttctagaactagagaagagtcataaataacatcgatttataggactttcacttgtatatatcttggtgttgttgtaacaccctaactaccataggcgtattacgtgagttttaaacatactgtgcagctcgttgctaatcacagaggtttatggaaaaacgtgattaatgaaaatttttgtttttgatt

SEQ ID NO: 124282 - DNA, 1456 bp, Cannabis sativa
  modified_base (1344)..(1364): a, c, t, g, unknown or other
  modified_base (1411)..(1412): a, c, t, g, unknown or other
tttgtaaatcaaatagacaagcaattgataacatgaaccaaaacatacaaatgaatgaaaaatacttctttttctttattgatatttgaataaaatggattaaattgagatggagttttatttagcgcataaaacccaacacagtcttggtcatacctttctttatatataaagctactgactgggaagctgaggagttacacttatccatgtggtgtgttcacttagggaccatcgtggaagagaatggaatcaggccccaagaccaaggtgtcttccaccacttggcccaagaaatggaaacccataaccacaactatggagggtttggggcataaagccaaacacgtctcatgtctaccgcgatgctctcgcttcaaaattacttagtaaattttttagtttttgtaggactagcctcgcgtcagttgataccacaggggtactgcctattgtcagacttatttattttttatgctttacggggttggcctgctcctagccttgctaaaatattattttttttatgaactcttttctatcccaaagaagggaggtagacagaaggatggtttttactccctctaagctcattcgggcaactagacagatgtcccgttcaatcctcaaaagaatgtcaaggattgtctccatcagttcttcttttcctctagtttcaaagcctttgagaatccagattccctaacagagtggactcaaattcccccactactttgaacagctcccaccaaactcttcttgagccacactgctgttttttagactctcacccgggaggagctcaacgtgggagatttagttacgattgctaactgctagagaaacaaactcattgaaggccaacaatacgttaagtacactaaaatgtcatagataacgtgcccaaattcttggaatagggaggtcgagaggaagctttgggaggagtatatccagaaggctaaaaccaagcatcaagcttaccggaggaggaaaaagtaggaggacctttttgcctgcgccaagagtgcagcaaatgaaaagatacaaaagaaggcggacaagaagtttgtggctcctagacctttgtttcctttcccggttcccaactctagtgctcctcaagccagtacttcaagtctccataagtctcctctatctttccattatgttccttatgctagaatttatgcacattccaagccaattagctttgatgggaagttaattacgttacaaatggcccattcccagtggggcgatagggagagtggtacttttccaacaatagagatctttagggtaggtcccgaatgggatctgtgttggattttgtgccctaannnnnnnnnnnnnnnnnnnnntcagatttactaataaagatcagatataacattttatgttgcatggnncacatgatttatatcatgattataaattctgttaagtctagaac

SEQ ID NO: 124283 - DNA, 1158 bp, Cannabis sativa
tagtcacaattgggtatttcgggtcgaactgggttcggagccgaaatataattttgggataaattattggcattttatttatgtgtcaataatctaaaacttttttatgtttatttttgatatgaatgaccatgttttccttgaatgcttttaagtgtggtatatggccctaggggcaatatggtaatttagcctacatgtattacttgtagtaaatggaattatttgtaaaaatgagattgtattttctggttcttcccacctagctgacccctctctttcagtctccctaaatttcttttccaagttttgatttttgttgagaaagggcttgatttttttgctagcttttggagcttggaatttggaggtgttggggattgttcttgctataatttgaggtagtaattactgttttaaatttaattttctattagctttacctgttatttagttatttctgttaactgttattatttgactgttattttagttattatttcccgtttgtttaggctgtttgttagtcagttttgatctgttttctttgtctcaattatgtttaaatacctcttgtatttttcctttttcctcaatcaatgaatttcgatttctctctttctcttttctttccactttgtcactatcgtaacatggtatcagagcggagaagcagacttctgcactgatcttctacgcttccgcctcttcccaccaggtcgcgtcttcttctccggcaatggtggtgtactgattcgttttctccttcactgaattctttctttgaagacttcgttgctcttcctggaaattatttctagcgctcttctctaatcaagaatgtctactgacaatcaagaaattggagctgaaactagagttcaaggctctaccatttctgcaactcaaagcaaccaggttctgaattccagaaatcctcttgaggatccctccgatccctattaccttgagcacggcgataaccccggcaacattctggtttctcagcctctaataggacaagataattacacttgatggagtcgtgcaatgcagttggtaatttctgtcaaaaacaaattaggattcttgaatggttctatccctaaacctcatatctctgaatataatctttacaatgcttggataagaaacaat

SEQ ID NO: 124284 - DNA, 841 bp, Cannabis sativa
atttgtcatataagataattttaataaaatatttcaaattaaaaagataatgctatcttttaattaaaaatatatccaatattagaatatctaaccttataattaaataatatataaattttaacaaattaaaaatttttaaaaatctaaccctaatttaaaaaataaaataattaatttttcaatttaaacctcaaaatatcataaattaataataatctattaaaaattagatgttattaatttgtaaatttgataattaagtttaaatggtaaaaaaaaatatcttattttttgatacttagggttttgaaattgaaaaattcaaaattaggtgaaaaatccccgaaaaattgaattttgggttgaaagcacttagctgccgtgaaaataggctgcaagcagggtgcttacgcgcgcggaagtgggtttgcagggtgggatgtgcgggaaatctgggcgtgtgcagcctccgtgtgcacgagatgaagcgtgtctgaatgggtgaaaccatgtgttcagacacgatttgtcccctatacgcacacgtaaatggtgtcttgtccgagatgctggtgcgcgcaagcacccattcttaacaccattgaacccaattttcaaaacaccataactttctcaatttttatcggagtcgagttccgtaaaagctaaaattgcttaatttttcacagggaatctaaataaattattttagaacgaaaaataaattatcttcatgaaaaaattcataattctcataacatcatcaaatcacacataaaccaacatgaacagatctgaatcaacaaattcatcgttttaatctatatttcatgaaagt

SEQ ID NO: 124285 - DNA, 509 bp, Cannabis sativa
tttggtatagtagagaaaacaatgattagaaacggcacctttcaacaagctttgatttttccctgtaaggcttaacgagaacccgagccccacagacaaaatgaggatttcctttagccaaaatcactctcactgtatctgcactagcaaaagttacaaatccaaacatccttctctgttggcagggaatccgtacatcttcaacaggcccaaaggaactaaagaaggaaataaaaacagttagttagcataataaaagagcagtggcaagttccatgcagtgaaattacaagcctctaccaaatcaattaactcaaagtaagcttacttgaagtagattgagacatcttcttcagtgaaagtgctctcagctggaaatgttagatatatctgccttgacccgctaacaattggacctggatcaatcttttcattccggtgatccatgtacatagcagagtcttcagccaaaattaaggcatgttgtccatgaggcctgctaatcatgg

SEQ ID NO: 124286 - DNA, 648 bp, Cannabis sativa
cagtttaaaatatgttttatctaatgaaagaattgttctttcttagtatgaacaataaataaaatattgatcttttatgctcataaacaactctgatccagctatttgtgtttgtgtttgcattatagcaagtatgtcattgtattagcagttctgagtaatgtggcaagagaagtgcttggttttcactatagtagcaaacctagcattattaagcgaaggggcaatcgattaagttgatcaagcactgcgaggtatgcattttttttggttgactagcatatactgaacttcatttactttagaagcaaattgtgtattcttttggcaatcactattcttttgtttaattttctattactgaatatttgaaagaagtagattatatgtgatgttcatttaaaaaaaaaatagctagatgtatagctgcagaaactatatttgtcttctataaatatgaaccaagtggttgtgttgtggtgttaagaaatataagcctataataattaatttttttttatcatgcaatgagattaggaggctgaacaataataacttgtgtgggtcatcttctttaccacaataataattaaaaaaaaaaaaatccgcttgctttcttgtaagtaaaaaccttctctgtttcacttc

SEQ ID NO: 124287 - DNA, 1611 bp, Cannabis sativa
caatgtgtggttggaaaacaaggatcggttttttagtaaggtacggaatgtatcgtcaaatattcaatatgattccacaagatctagtttcgttcaagtaacggattatagtcaattgaaaggatattctgatcgatccacatatcattttgattccattagtaatgaggattcagaatatcacacattgatcaatcaaagagagattcaacaactaaaagaaagatcattgtctccctatgttccttgttttacatctctagtggctcccactcaacagcaagagtttggtttatgcatacacaagtatgcatttaacctcttactattggtacttagggacatcatgttgtggcattttatctttatttggaatgaattccttttagaccaagttaccaacatagcattctagtattaacattaatgtaaaatacttacttgagattaagtaatcaccaaagataccataaaatatttcataaggactaggaattgtgcctaagtctttcgaatagacattgcaagatttcctctcttatcctcataattttgataagttataactatccatgtgaatgattagattaactttctttagttttattttaaagttcatttcttgaacatattattgtaaatgaatcactagtgccatccaaataataacgggctagaattgttaaaatccttccactaagataaggtactgtgattctatgtctaaaaaattttagtggtatctattactatttgaacatatacatgatcaagaattagttctactagtttgctagtttgtttattatatttatgtctgatcaaaatatgtgttatagagattttgtagtgttttgaatataatttagagttcgatgtaaaagatctttgaagtgtatatattaataacttcttccacccctatcagatcacaagatcttttattaaaccaattcttaataattatttaagaatggacaattattcataaacattgaatttaaatttaagtatttatgtggtattatctctttgcagagattattatatcatagactttgtaccaataataaatttaaaatacataaaagcttgataaatagataaatataatttggcatacaagaatataaagctcaatttcataaaagcaactcatgatgaaattattttaaagagaaaaatttaaattaatactctaaaatatatcacaataaattatctgcaataatataaaataggaaataaaattctcaaactaaaattaaaactaaattgttcgagaaataaaataattaattcaaaaagatataattcgagcttcatcttcaagcttggacaatctttgtccctctgtccaactatccatctcaacttgctaggataataacccaagtctaagcagctggagctaaaataagaagaacataaacatggttagtagatcttgaataaataacccgaagggatagtaattctctaaaatacatgaattcacaacaaggttagaaataaaagcatttttgttgcaataaaagcagttcccttttccttttgccttggattagcagcctttttacccttattagctgtgttaacagctttaagagg

SEQ ID NO: 124288 - DNA, 1757 bp, Cannabis sativa
  modified_base (1613)..(1614): a, c, t, g, unknown or other
ttaatggtactgtatattgtgtttctatggctctcctaattctaatgcatttgtttttacttcaaagatacactgttccttttttgacaagctcactttagtactacactgttagatatgattacgatttgcttggggacttggttaaagggatttttctagccgtcgctatttttcaacattatggttattaatatttctttatcattgctcggtggagaattttgcctattattgtctatcatttccaagtgtcaggtaaaacaaattttgcctattaaacattcaaactatgttgcgtacaagttcacattgatagctagctcacccaatacagtgttgtgttgtgatgtctaatgaataaaagatgatattgatatcaggcttaacaatggttttgatattgttgcttactttaggagcaagcaaccatccaaacctaaaggttacctatttatcactatataaacactactactgaacacattcaagatgatatttgtctcatgtaaatttggctttctttacttcggttgtatgcaaaaatctcaagtattctatacagttgatagtccaatagaaaattggaaggcgagcaaaggttttatctcaaaggagtcctagtgaagactctctcattcttgtaagtgttactttgaaaatgttttgtataaaccaaatttgtattcaacatacttttattcactataacactgttgttttctcccgattagaattattcattatgcggggtactttgcacacttatatgtaataagtttacgattgaacttgtaattgaatttacaagcaccaagtaaaacatatttgaattcctttagtagcaagaattgtatgtagcggttcatatttaaattcatttccctttcttgtgatgcaaccttatatataaatgtataaatttgaagataaatatttacacataaaaaatacacgtatatcatgtatgcagacacctttcttacttgtgtaggtatgtggcaagactggtcacaaaaagaggtataatggccatatttaaattgtggtacgattttaaacttttgaaataactatgatttcaagttaagtttattttgatgtgtggcacgttttatgtcactgcgagtatttcttaaaactttagacaatatttaaatttaatttacttttcattttaaaaatcaaaatacataatttaaaataaaatctaattcaacactatcatattcttttaaatatttaaaatttaattcaaatttaaatttaaacttgtatcatatttatattacattttatcataatttttttaaaaaaaataaaatttttgtaacatttttagtattaattattacgaaaaattaaaaaaaaaaaacattaaaccaataattcttataaaataacatattttatatatttatatatgtggacatttggtaatcaatgaatagttataaaaagaaaaataatgtgtacactaaatatttaggagaaatttcgggaattgtatataacaaaaaattttaaatatctattctatataaaatgtgtctatataacagaattcttggtttgtgagaaattattgggtgatttttttaaataaaaaaaannacaaattattagatgttgtcacgtaaagggtgagcatcatgtagttaatccacctaaagtgttgcaattaataataaatttgttcatattgtttatttatttttttattaaaaattattttcaaattttgatatttagaatta

SEQ ID NO: 124289 - DNA, 2281 bp, Cannabis sativa
aaaacctaaccctccttttcgcttagaaaaacaaagcttttgccaagctcgccaatgaattttcctctttgattggaatgaaccccaccaatatctagtcattagttatattatttgctatattaatttatagaaagcattctaataatgagtgtgtgtgattaaattttatcaaaaaaaaaaatctgtcggtaaattatttagctgtttgttgtagtactttttctgtttttcatataaatatgttgatgtattatagaattaattaaggttaatttatggtagggaaattatatcattaacaggaaagaaaaagacgcaaaattataaaagagagagaaataaattattgttgtaataataggcaataataagtgagtttctgtaggtgattaattatagtgtagtgctttccagttcacaactgaacttctttttgttcgcttgctctttataatctatatatatctttgaaattaattttctaatatatattgtccaatccaagtactgtgtaatgtataaattataaaacagtcggccaaccctccctctgggtttattattaattctatatctaatctaatatataatatgtctcttcttcaactccaacttcttttacaattttaccctattaatatcttttacattaattttttcacaacaattttattgtaattcaaaaacaactttcttatttaataaaaaaatttaattctttttatttatcttaattttcacatcttttacaactttacccttttaatgtcttttattttaattttttcacaaaaattttattatggtattgttaatttattgtcatcctcaatactcaacgcctcatgcttaaaaattaattccttttatttatcttaatttttacatcttttacaactttacccttttaatgtcttttattttaattttttcacaagaattttattatggtattgttaatttattatcattttcaatactcaacgactcatacttaaaattaattccttttatttatcttaattttcacatcttttacaactttacccttttaatgtcttttattttaattttttcacaaggattttattatggtattgttaatttattgtcatcctcaatactcaacacctcatgcttattcatcttatttaggttataatatttgtattcagggtcgatcctaagatatatgggacttaaggaaaaattaaattttggggcccttatatatatagtttaactattataaaaatgataattttaatgcttagtataatggtaagatttttaaaaactcttaagagtctaaggttcaatccctcataactacacattaaatattttttaaaaaaattaaaagtagaggttggaaattgatcccgtgatttcttactttatagtaagacctcttaccactacaccaaacaatttttcttatattttttttcttatttaataatttatctatatattaatattttttttttcacaatttcggggacccgaggcgcacgccttacccgcctactctcagggccggccctgtttgtattagcttttattttggtatattttctataagcatatacattcacatttttttaaaacttgcttaggcttaatattgtaaaaattataagaagaaattatggacttactatactaaacgctaatgttgggtcatggactatttgttttttagctagaataattaacgatttgcaccctgaattttcgacaatattgattctgccctttaaaatatatgacttgttaaaaatctctcctgaacttttatatttacagaaatttagttattctgttagatttcgtcctattattttgtttaaatgtttacatgtctttaaaaattagcaactttacaccctaaattttgaaaagcatcaaatcgtaccctttaaaataaaaatgagaaagattcaacattttttttttataaatcttaaaagaaaattattttgaataattaaaaaaattaaaaaggagattaaaattttaaaactaattaagtgatttaaaaaatctatttagacataaaaaaaaatatattaacaattcaatttttgtaaaaactaaatttaggggaacaagtttgagtctatttttttctccaaaaatttagatttacttaagtaaacataccatttttttagtttattttctaatttttttaaataattttatatttttattgaatttttaattattttttctttattttttaaaatatgagttcataaatataaataagttt

SEQ ID NO: 124290 - DNA, 1322 bp, Cannabis sativa
tgaattaatatatgtatatatctacatataaaaaatttgatgtttatatttgagtgagggctttagcccacatatgggctaaagtccctccgtccctgtcactaacaatgatttgatggggagtcatcgaataacaaagaaaaacaaacaacaaaacaaaacaaaaccatgttacatagacatgactaaaatactcaaaactatgctatagattcaagactcaaatgcatgtcacagagacaagactaagcagtagcaaaacacaaccccaaccaagtcgtacctaaccccaaggaaagtcggcaggcctggctagagaaaaagaataactccgataactatagatttaacaacgagaaactctaatttttcttaacgcttaatcggtttattaattttaagtaactttaattaattaaatagatctataatattaaaataattaaaaaagtatgaaaatgactttagtgaaaacttgttataatatattaattttattaattatcatgtttgtctcaattaaaaaaataaaaaaattaattgcgtgattagcatttctgtctcatatattatatatttaataagtgcatgaatcatatcattataaaccacaacgtgtcttacatgtccatgaaatcgcccactaattaatacaaattactcttaattaatctttcattaattcatgtaactttcatgcttatttttcttttatatatttttaaatataacattaaaaaaataaaaaataagtaaagattattcttctcactttaccttttatacgttctctatctcttttaatatttattttttaaataacatgattccaatttttaaattttaattgttgcccattgatattattattacaaaagaaaagattataaattcatgctatagatagtatatatttttatttatttatttattttaataaacaatatttattattaagataaagggtttttggcaaaaaaaaaaaaaaaaacctatatatatttttgttaaagaattatatatttttttttaatgaataatatatatgtacatattagagacattgtctacacactcataatatcttttcatatacagtactcaattatacctgcaaagcaaaacactaattatgagaaaaaaaaaattatatacaataatatataatttaattagggtgcttattaagacatatcctataagtataaaataataaagataaaaggcaatataagtatttaaagttataaatttgtaagtggtataaatttaatgtttatttttaacagtataaagtattcaatgtttgtaaaactgtaatt

SEQ ID NO: 124291 - DNA, 5136 bp, Cannabis sativa
  modified_base (5093)..(5107): a, c, t, g, unknown or other
tacttgtgagtagatctaagatcgattagtggccaagggatttttacaacagtatggtatggactaactaccattcgcactcttatagcagtggcatccattcgctaatagactatatctcaaatggatgttaagaatgcctttctgaatggtgacttagatgaggaggtctacatggttcctccccaagtggactgtaagtttctcctccccaatcaatatatgtagccaagtcttttagtccaccactaaatatgcttgatggccaatagccgatttgatcataattctttccaaggtcaacccaccaatttccagtaattggatcctattatatcatgtcaaacaattacaaaataaatacaacccaccaatataaaatatgagacatattttttattttcatttaaaacaaaaatatttaggataaacttggttgaaaaaaaataaaaaattaaaatgaaatatttaattttattcacccgataaacactgatttccatttcccatgtaggtaaactaccaggatgagtttctctcagagtcatttcgatcaaaggtttaggattaaccaaaacaaatcctggacatactgtattgaaacaagataattcaccagcctacaaaaatattacatgattcataagttacacataactacacaaataatatgaagaaatcttaaataataacataaaattaaggtaacctgaaaatatatgaagatccgagttcgattatccccatatacactaggattcacctaataaatgacattataacaaattaataagtgaacaaatattctaaaaaattgcaatttatctaaaaagcttgagttgagttatttttaacaaataattagtagaaagagaacttactccccaaccaactttaatgatatcaagtccattttgtagtttcattcgtccaaaagtatattgtgagctaccaacattatatagggtgtaaaaacttgcacttgttccacctccattgtattttttggttggatcagatgtgtaaacaagcgcttgctattatatttaaattcaaattgtaattaaatttttatgatagaatatgtcatttaattcgtcaaaacaaaaagaaaatgtaaaatatacttacatgaaaagtaggaggggaattaattcttgagttataagattttgtaaataatttagctctgataagatcttctttagtagttcttcttattggaacatacccaattggacatatttcactatttaacccactatttatcaatacctgttccacattctttggaggattgccttctctaaccattgacttgggacgagaagaaggtctcatctacaccataaatacatataagtatattataatacaaattcactatggtttcgaaaaaataaaaaatgacaagctattaataattatctgagaaaaatgtacctgaaaatcatatttgtgattctttagtgaaggatgatcaaatgctggttgttcgtaaaaattaacacaatcataaatatctccaaattctgtctgtacataacaaaaaacaagttaaatatttgagaaatgaagctgaaagtaataattataaaacaaaaaaaaatacttttatagccttgattgatgacttatttaattgctcaagttgattctctatttccagaatttcatctcttgataatattgctggttgttctccagattcacaataacataaaagtgtacacaatacaatagcaaccatgaaaaattctctcatacccatatctatatcgaaatattttatctgcaatacaaatttacattcagattagccaaacaatcaaaataaataggtgaataaaaaattattaattaaaaaaaataaatatttagataactacaaatttatttacattaaaaagggagaaatatgaaaaaggtaaaaactataaaatggtatgttgtgagagagtttcaatatttgtaatgttgactgttattttgatattttcaatgaatattgaaatattatataaaaaataaatattattaactatataattaaatacaattttacgttacaaaaattaaagaatgagatttatatacattataactcaatttttcttaatatatttgtttttttttttggatgttacaagtcaattaaatattaattatatactattttttaagaatattattagttgtacaattaaaatattttaggattctgaaaataaaaataataatattttaagttacaaagttatttttaattgggataagtgttttcaaactagtctttttttttcttaaaatattagaaattaaggaacagtttcaaaaggttcacattaaaatattttttgaaaatgagaaatctattaaggctgaatatcatgcgggttatgggttctagtacacgggttttggattcatgagtttcaaactaaaaaaaataccagcacccgcccatgtaatgacccaagttggtgggttagcgggttgcgggtgagcggttccagtgggttcttcggccaaatagctccatgcattaggacacattcgtctcccactcactgcaggaaagttcgatgaactaacatggtgatgtcccaacttttattagtgattgatgtcccttctgctttcaatgtcatgataggcctgttaagattatgtgccctaaacaatatctaatttaatgtgacgtaattactttcaataaagatcaagaagatcataccacgactttcatatgctttgttcacatatgtttatatgtctttaatatataagttctattaagttccaaacatatagttactcacaattacagtaatgtcatcatagtggaagtaattatgattatatgcttcaaattatttagtcccacaatatacttatcagtgcactggatttacactgacgtgataatcagcgataatgtttatttacacttgggtaagtggaatatcttttccaagacattagtaaagtaaaccaagatcagatgtatcaactatacatcagattgaaccgatattaacagtgaaaaagatatcataaacttacaattatatcttttctaagttaatatcacttagttatatagatcatttgatctcagtcctgagatggttaagctctagcttaaatgtattgcacgagttctttgacttgttcgttatcaccttacctgcgagactagcccatccttacatcttgggaactcagtagtgcaattgcgtgaaattaatcatagatatagaatctatagcttctataactatttagaagtgaaacgatggtttctttggagcttggcttaatgtgataaatgatagagcgctcatttcggtaattatattagttttctaaaatatcatttacaagtagctaagtgttttatggatgaaatacattgaaggataaaacggtaattttttccttactcaatgtaaaccatctatagaggatcaatgattattgtgattgaaacaatggataattcatagcatatctatatttgataaatagagcattctatgtaatcaagagtgcaattctgaatttatagtggagtcaggaggaattaatatataagataagaaatttatatcataagctcatgatccccatattgtttgggataatatcatcttttagactcaactagctagttggtttaataagtcaattagaattcgaaaatagactacgtcttattagagaattttcacaaagtttgggcaagttttagaaaaaaaaaaaagagaaatatggatttatttgttaattagtacactttgtgggtctaattaatagatatatttaaattgtattttatttgatagttatttataattattaaaataaaataggtctttaaataattagatgagataagttacaaaagagggttctccatattatgtttcctttattgatgaccacactcatttttgttgggtttttcttttaaaagatcgttatgacttttatagtatttatgatcgtttttgagcttatgtcaaaactcaatatggtgctagtcatcttcttgtactgatacacctgaacaaaatatggtgtggctggaagaaagcatatacacattattgaaactgctcgttctcttttgttgtcatcttctgctcctagtcagttttgggtggaggcagttctaactgtagttcacctaattaatatgatttcgtcttttgtcatttttgggtttgtctcctttcaagaaactatatagttgtattcctggctattcttctttaagattctttggttctacatgttttgtgcttcttcctagtgtagagtgtacaaagttgtcgtcacgctctgctctttgtatgtttctcggttatggggaagggaaaaagggtaaccgttgttttgatccagtttctcaaaaattgtatgtatctcgtcatgtagtttttcttgagcattacctttcttttttattcctggtaatcctctgataaaatcagatcttattcacatattttacctattctttgagtctgagtctcaattatccactaattctatagttctttttcctcttcattactcttgcctgcatcctattagcaagtctcaagaattagatattggtacttcacaaccttaaattactcctccgttagatactaacattttgcaacttgaaatcgatcctccattagatactggtacttcacaacttgaaaatgctcctccccatcctcctgtagttattccagatcctcctgagattgtggaccctcctcatcactatcgtcaatgcattcttaaggctactcgttgaccaaattttatatactcttcttattctgcttcttttacttctttttttggcatttattcattgtctttctaagcctttgtcctatagagagacaattattaactccctttcacagtgtgctatgaatgaggaactttatgatttgcaaaagacttggattttatagtacttttgcctcttggtaaacatgctattggttcttgttgggtgtataaaatcaagaccaagtctgatgggtccatcgaacggtactattgggttttatgccctaaannnnnnnnnnnnnnntataatcaaatttacttattaatatagat

SEQ ID NO: 124292 - DNA, 947 bp, Cannabis sativa
tatgtgtaaatatatcattattttactcaactatgtatatgtatagactaataatgtagaatttctaagttatataacagttaaactcttgtaattatcgtttcttttatatttaactctctaagtttaaaaggttaaattgcaagtaaaataataattgagaggatttaattataaaaaaactcaataatatattacacataaattataattaaataaaaatgatttgttaaaattaatagaaatgtgtgtgaatgtgttggtagcatttcttcccgttgctcctaatgattatcgtgcttgaatacaatgaatatcaaccaataaataagctatagagtagactcactagagtatatagttgaccatagattccaaagcttaagtaatattgtattgttagatattagtgattaatagaggggtgttagattggtttagtctatataattttttttttttttaactaaactaggaatattggtgttttaaaatttaaaatcaaaccagattaattaagtgttcaaatcaatcaacttaagaatagattttagttagttcaatacaatggtttgtattttctaaatattctaattcttttttattattttagcttataatacttaaataataataaaaataaatattattaaaataattatcatattatgtctaaaagatggtttctaaatattaatatttaatataaaaaatcctattaagtaaatatagataattaggcggttggtttgatttgaattgcgaacaaaaattttaaaatcttaactgaactagagactcataaatagtttgaattgactaaactattaacaccaaatttatttggtcatgtctaaaatagtttgtagtgtctaatattattataaagtggcgccttaaaaatagttagtgaaattttatattaaattatggaataattacataag

SEQ ID NO: 124293 - DNA, 834 bp, Cannabis sativa
atgataagtgaaggtggtatttatgaatatggataccaatcggtggttgcaaatgtaagttgttaagttagttaggatttaacaaacttaacaaagttcttgtaacctacctattttcaagggatagatatgcagtatcaaagaagaaaaggcaaccttcctagtttcctattttgctcattgtaattatagaaagtaaataattttctctttttattttttattagttttgggaaaccaattgatgtaattaatccctataaatagtgaaattatctcactatccaaggacacaaaatccattcagagaaaacacacgagaaaaatttagattcaagagtaaaagactcagagatcatagtgtaagagctttcgagagagattgaggcctttttgcctctctactcacaagtcaatacaaactaaaggccgaataggctattaccattatcaaggggtcgaacctctataattttattattttctttacttattcttaattaatatttattacttaattattcttaatcgctttagtttgactcactgtcgttggcaaaaagcgaggtcaatagttacaatctgagtaactttcagcctgatggtgaagccaagtactcacacaaggtaaacgcgataataagaaacactactacaaaacaagcctttagaggcgcttttttcagcataataattaataatcgatgctacagggttgaaattttctggaagggaattcgacgccacttttggcgtcggttatttccaaataaccgacgacatagggaggcaaccctagcccatcccttcatcttcctcattcgatcagccaac

SEQ ID NO: 124294 - DNA, 984 bp, Cannabis sativa
  modified_base (923)..(926): a, c, t, g, unknown or other
tacaaacattgggtacttataccgctaaaaataaacattagatttatgccgcttacaaacataaaactttgggtacttatgacgctatttaccctaaataaaattataaaaactgtttttttaatataaataaaatttttattaatgagtaaggtagacgtagtccattatcaaattcagttcagtataatagacctgtggctagggccttgaaaaaatattttatttataaacttaatataatagttaaacatatatttataccattataaacataaaacttgatctcaactaaaactactgaacatcttaccagtaaaccaaaccaattgtttattttatatatgtattagttaatatatatatacccatttacctaattacaaaacattattaattaaaaatatttaaaaattagattatcacttttttttcagatcactttttccttaaacattctctcccgtttgtttttagactgttttcttctcattttattttgcggtaatcattcactcacaatctttgtggtaattattcactcacaatcaaagattttataatgtacaacaaaatataaaacgagttatatttatgtaattaatttatgtaaaaaaaaattaaagatcaattttctcttgcttttttttaaaaaaaaaaaataataaggggtgcaataattttaagtcgcctataatttctcaagcaccaccctgtccatatgttaagatattagcctcgaagtgtataatcaacaaaaatgtagtccattaaattctaaaaaatatgttgcttatccttattaattaattactaagttttttttttaaagttttcattttaaaaagaataaatataattttagaccttgtgtttcagttttataaaaattattgattaaactctctgttttgttaaatgannnnatggaccctgtattttctaaaattataaaaataagaccttaagcttaatttttgacaa

SEQ ID NO: 124295 - DNA, 900 bp, Cannabis sativa
  modified_base (297)..(299): a, c, t, g, unknown or other
gaagctccaaaacttgtaaatcgacattgttgatagtggatatcaagcttcgatctctgagatgagcttgacagagatgtagcctcgattttgggtgaactctgaaataagttctggtgttttctctcctttatttttgtttttcactcgtttaatctaacttgtgtgtgtgtgtgtgtgggtgaaagatcctagggtttctactgggattgagcatgttcttgtgaagaacttgctctgctagggtttccattttcgaactaggaggctgagtgtttgtgtggctagggtttctannntcttcgatcagagtctttaaaccaaaagttcaatacgacactaagtttggtatcgtggagtttgaacggtgccgttttggtctaagggttaagttagactaggaaaggtcatttttgaccttgatactgatattaagtgctcttgttggtgtagggtaaaagtttcaaaaatcatacaatatatgaggagaatcactctatttaattctgtattaattaccattcactcatattgggcacaaatcataattattccaaagaaattgctaaaggatgtggtggttgtttgtaaagcatttctttggaaagaagttgttaacttctctggacccggtttggtggcttggcaacaggtatgttcacagaaaaatttagggggcttggtgttaggaaaattattgagtggaacatggcttaatagacaaatatatttgggccattgttaacaaaaaggataacttgtttgtgaaatggattaattgtgtatacttgtagaatagagattggtgggagtacctgttgggttttatgccctaaataaaactcattacatataatcagatttacttattaataaatatcagaaataacattttatgtt

SEQ ID NO: 124296 - DNA, 1588 bp, Cannabis sativa
ataatttggtgaccaaatattttagttagcatttggcaatactaaataaataattatataaattaattattcaactattcagttttaaaaactaatttataaaatttatttttaatttttattttggagtttacattcatttaaattataagcaaaaacaaataatttaaaatatatttaaataatattaaaggcgtttattcattacataaaaattacagtgtcaatcatcataaaaattacaataattattacaataattacaatgtaattcttgcctatcttaaaatatacaaagtctaaacaagaaactacaatagcaaactccattaatcaaatgtgtaaaccaaattacaccaaaaataaagaatcaaaagaaaactagcaactaaaaaaaaacaagaatgatgagaaactcctaatctggctccaactcagaagctggaagcacacgcccctcaaactcttcgaagattatctaaaagccatgatctcagctgtgtgatgctagtagagcttgaactaacaaaactaaatcatatatatatgcctcagataaataagcacatccttccaactaacaaaactaacatccaatcacacaccttatctcaatctttcttttcttttcagctccaagtcacaacagacttatggtctgaccagttataaaattagattggcatgtttctacacaaaaatacatgagttatatgtcaattcaagcaagaaattagaatgaaggttaatactgctaagattggtattcaatttttgtctgatgacaaataattgtatgaagattaatgcagataaggttatacctttcaggataactttccagaccatcctctgcaacatggatcaactatagaatcatattgttctctgattgtcgtgacaacctccttgaaagaatcctacatgcccccaagaatttataaggctttgatgctaaaaacatgaggttgaaaatgtaaaatacaattctatattcttcatgagataaaaggaatctaatacatagtaaagttcatttgaaggtttgaatattacttgcccacgataatttttcaagttaatatctactcatgtatcagcaacagaaagactatctaagaacatagagcaatacaatcactaccatcccaatgcaaacattcttacatatataatatatttttatatatatttgaagaacaatcatagcagaactacctcatggtgtccctgagctacagagtaatgaagaggggaattatattctaacaaagccttagcttcttgaaggtcttcatctctagcagctgaaactaaacgcttcccagatgctgaaaaatccaaagaaattccccacgctacttggagatttcattgacacaacacaacacaagtacctcaaaactgatggttatggttttaaagatttctttttcaaaagagtttaaccaacaaagatagagacattaatgttttgccattacctatctctttctcttcttcacgcatatcctcatttgtcctctacattctttaattttgactctatattttgttcaaccctcaaccagtggcggacccagaattt

SEQ ID NO: 124297 - DNA, 1015 bp, Cannabis sativa
tagaactaaattaaatatacactaaaaattaacctaaaaataatactaaaaacaacttaacaattatcgtcgatgaattttggggttgggtgttgggattgtggatattttgtgttctagggtaaaaagaaagaaaaagaaaaaaagaaaaaaagagaagaggaaaaaaaaatatttatttatttttataatttttaaattatttaaataattataatgagttgtggacctcttaaattctgctacatgtaaatttgtttacacatcaacagtacacgttgacatttaaaagagctttttgaacgaatagggtaaatagctaacaaaagtgagatttggaaaattttagcactaaaaaactgtttatgggattaagtgtaactaaatatgtagttcagatagtgtagccgctaatatccctatacatataaggtttttttatatgaggtaaatttcaataaatttataaataagaaaactagtagaaccattcttgttcatttagatttttttttaaaatgcctatttattcaaaataaaattcaaaaccaataaataactagtatttaaaataaaaaataactagtctttaaccatagtttgaatattcttatagcattaactgtagttgtttcactattgcccataaagataatctttcatcatcactttggcttttaatttcacaaataacatttcatagttatacttacagcaatatcacaaaattttacttactaagtatatttattaggtacaataaattaaatcatctataaaatcaatcatagtgagaaactcatcattttctttagatatgcccaatgacatacttggaccactttatccttattttcaatccctcttgcaaaagtcatagataatttcatatctaatatattttgaactttctttagcagtgttccatatgcaacatcctaagagcactcccaaccagttctgtaacatccccgcttcaagtctccattgagcccttacacccacagaatgaatg

SEQ ID NO: 124298 - DNA, 1946 bp, Cannabis sativa
taaatagttttgacatttaaattagaaaatatggtatttgtgaaataaaagataaatggttaaaaaatagcaaaattataactagtgggcccatctatgtggtcggccacttagtcttatttttaactattattctatcatttttaatttcatataattcaatcctaaccctaagtgaaatagtataaaatgaataggatggtctcattatccaatagcctcatataacctagtttacattctgtcagacaactaaatttttgagagcctccattccttcttcttcttctattttcgaatctcctttattgttcttcataaattttcgagcctatagtgagtgagtgcatatgtccaccatagcaagtctagtgttcaatcatagtgtgtaagactatgaagaatctaaacacctgaaggagtatcgggctcagatcttgataatattctatgacagaaaggaacaaaggttagagatctgagtgggaggagtcataatattctgctacaatcaatgtaaggttactcaaattttatatgtgtttttttctattgttttataaattcatatttaggatgttaataaatatacttgttagtaaatctagatcttggtcaaatataatccaacaacttggaccctacctccaacttcttgggtgagtagtaactctgatatcgtgatctcttcgattggttgtatgaattcggttgtaatacgtgatgaatttggtagaatactatcaattagaaccatcacgacggacccaaaattagtagaagcccaagcagtttgtctggcagcggaaattgcagttgagttaggcatgaacaaggttttttttttttcttcagatcgataattcttatgtcattaaggtgtttgaacctccagtaatacataacgtagactttacgttgcaagcagctaaattgcatttttgaaaagttgctcaagtttgagtgattggggcattttgcatatctctcggaagtgtaactacatggctcataatatcgcacaatgggcagttgcctcgaagtctgaaggctttttcaatccctttgatttagatgtgacagtgttagatgattttgagtgagaatcaagttatggttaacatctttttgagtgttctgtttggtgatgattgttttttattttttctactaatgtactatgttttactttgtctactttcctgctatttgtaagttgattgttgtgggcttctgccctttaatggtatggtgtcattggcacccccttctcataaaaaaaaataatgtgagattattacaaaaagtaagcttagttgaataatatattttcttagtatcaagaccaatcttgagttgaaatggaccataggcaaaaaaaaaaaaatgggcctttattataaagataaattgtatttttaaaaattattaaagaaatatgtatattttttaaaaggtattctttttatttgggcctctaaaatgagtgggccttaggcgcaggcctagtccaccttaacctagggtcggtcctgcttagtacattaacatactactttaaaaaaattagaaaaatataaagaaaaatttatagaaagccacctacacctcttatatgttcttttatatttaaagccacctacacctttatgtgttttcttaagtttgagttagagtaagaaaaataaaagtagtgttaaatataaatatatttttgttttagtgtgaaaatagattttttttaatcaaatagtaaaattaggtaaaaaaattaatttttctttattattaatcttatttttaaatttaatatttaattataatatgcttaagtgttacacttacatatctatatatctattagcaaaaagctacgtgcgagacacgtatactaaattttatgttaattttttttctacgttatttaaaagtgatacaattaaaaa

SEQ ID NO: 124299 - DNA, 681 bp, Cannabis sativa
  modified_base (625)..(655): a, c, t, g, unknown or other
aattgataaaaaaatgtgtaattttaaaaggggacaaattttttttgggctcctgagctaggtgggccctaagcacaggcttagcccgcctatgctcacggccggccttgcccaacagtcagctctttttttgcatgtattttaccccattagtgggctttttgtagaaaccctaggcgagtcatggccatgtccatacccgctctttagtctataacgcccttctatttccatacgaaggggggatgacaacctagatggtactgatattattctaaactttcctcttcttcaagagaaacacagactatagagttagggtctcttgctaaagcactgtaaaaacatcaaacacatcctctgaggctaatagactcactcatggactaaggttaattaacacctgaaccacgtaaacatctccatctcatttatttctacattttattacttcttaagatcttaaatatttagtttttgaaaatcttggtaaattttggtgcttttattgagagttgaagaaagacataaacccatagtgtttctgtaaccatagtgtttacacaaaaaaatagttcccaaaaaactcctctaggcagccttgactgtaaagaccgcttagttnnnnnnnnnnnnnnnnnnnnnnnnnnnnnnnattatggaaaattatttatagctatt

SEQ ID NO: 124300 - DNA, 1668 bp, Cannabis sativa
ttcttgttgattttatgctgtttttatgttattttttaaaaaactgtaaaaatgtaaaaaaaacattttttgaacgtaaatatataaatattttacaaaaaatagtaccttatgtaattattcctaaataaaatttagtggcaccaaatattcaacattcaaaacattttaagtaaacaaaattgtttacggaaaacaagaaaataatatcactccatatatattattcaaaaactattacatgaattaataaactagtaactcagcatttgctaagtataaaactatcataacaaaatcttggcgtacatatgttggtggataggagactcactgttagaaaataaataaaagtttttttcttttttggcgattaaactctccgtgctattattttatttatatttaattctctaaatttaaattttaatagtaaaaccttctaaattactgaatcgttaacaaatttaaggtaacatctatttactacatttaagtgctaacatgagctacttatgtgtacactcttgtacgtaacatattcctattagtacacataatattataattattatttcaaaattataaaaataattttaaaatacatttcaaaattaaaaaataatataaagttataaagttgataaaattatatataaattaaataaaataaaatgaaaactaaaacaaattaaaaattagaaattaaaacaaaacaaaaactaaaaaaaaaaaaaaacaaattgtgctttcccgaggacccatctccttcgccctctctcttccacctccctcacccatctctgctcgatagccaccgccggccactgtcgcctctaaaccagttgctcctcctctctctctctctctctctcgttatttctttctctcttgctttctctctctcccattatttctttttctctttctcacgagatctgtgtcccagatgtgaaagggtcattaatgttgtttgttctcgatcccattatttgcttattcagttttcaggttggtgacttactgatgacgatgaagacgacgatgactgtcgtgacctcgtcgaaagctccgtcaatagactcaattaagatgttttcagtgtgttatgaattcctacccgaaatttccatacgagaggacgttgcgagcatcaaggagtccacacaagttcgatctgtctcggtaaccaaacagattttgttattgtgtaaacttacatattgtggtttagatgataagtagtgagtttaaaattggattttctatgggtttagggttaggaagaaggtaagatccagttcgattgggttggaggtaaaagagaaagagggttaatgagacaggttgtgacttgttgaggatgacgatgactatcgtaaccccgttgaaagctccgtcaatggactcaatcaagatgagtttcagtgtgttatgaattcctatccaaaatttccatacgagatgacggttcgagcatcaaagagtccacacaagttcaatttatctcggtaaccaaacagattttgttattgtgtaaacttaccttgtggtttagatgataagcagggccggccctgacggtaggcgggctaggcgtgcgcctcgagcccccgaacgctcaaggccccgaaattgtaagaaaaaaaaaattaatacatagataaa

SEQ ID NO: 124301 - DNA, 544 bp, Cannabis sativa
taatttttattatctaatttattagatttggccattttcttattttttttaaaaaagtggacatttacttagttaccaaattgagggccattttgcatctcaaccctctagattattagatttatggccttgtgtcaaagttcttgctctttttcctataatccatgtttttttttttcttttttttttatatatatattttttcttatagtacttgctcttttaatatttctcaaactcaataagattatatcttaataatttgcattttttcactaccgtcattgttctttttatatttttcttaatttgaataagataatatcttagtgatttgtattttttttgtttgtcatgttgcatgtatgtagtttgttttatttgtatcaataataattacatgataaattgactatctttttgttgtcctttttttttatactaggtgaggttagcacgtgcaaatgcacgtgcctacctctccttactctattttatttatacttttatttatttaatttttattaaaatttatataatttaa

SEQ ID NO: 124302 - DNA, 701 bp, Cannabis sativa
  modified_base (652)..(675): a, c, t, g, unknown or other
attaaataattaatttttcttattttatgtcaaaataataaaatattgagaaatttaagatattaaccatgccatcaacattttttttcatattctttttcactccaatagtgtaagtatgagggttagatattcaatccaatctaatatttttctactaattaattcgatccaatttggctaaatatagtaattggctataaaaaattattatccgatccaatcaaattaaacctcaaaatctaatctaatctcatctaactactaaagcaacaagacatatatttatcaaaaataaaattcaaaatataatcaattgcacttacatttaattagaatctatagtacattaatacatatattttttttttctattttcttaagaaaatttatttaatactttaacgtttattttaatttatatttatgttatgtttaaatttttagtattaatttagactaggataatgcttttaatcttaaaatatatatagtatacttttattttttttaatctaattatttcaacaccaaacattaacaacaataataataaagattaatatggattggttgtacctgaccaaactgaaaaaattattagacaagttagcttttattatattggtaaaaattaggggtgttcatccgnnnnnnnnnnnnnnnnnnnnnnnnaacaacatccaatccgcactaagtgc

SEQ ID NO: 124303 - DNA, 1493 bp, Cannabis sativa
  modified_base (68)..(79): a, c, t, g, unknown or other
tcttaatagttcaggggacattttcaatgaccttaaaagttagaggacatgatttggtacatgtcaannnnnnnnnnnnaaaaatcctaattagccattattttattaatatgataagaatattgactttaatataagatattaattataataattaaaattaaaactaacattctaaaagtataattttgttatattttttaaaaaaagaataaattaatttagtacatgattttaaattaatatttaataaagaataatttacagcataaatacttaagtttgatttttaattgcaaataaatattttaatttaatttttagtagtaataatatctaatttataattatggaatttctgtaggtacttcactattacgtgttaggtaaattgctatctgacaatttttgattggtctaagttattaattttttattttattaaaaaaatagtttaaatataccaataagaaaataacatgtggataataacttgacatttaacggctaggtaattatagagttttagaaatataacttagacattattaccgctgaaaattaaatttaaatatttatttacaaccgtaagttaaacttataaattttgatcgtaaattactctttaataaattaaactatcaatttttgtaggccttaaatatataaatgcaaataaacaaatatgtattcaaaattatttgtttttttcgttagtgggacactgtagattctcacattccgaagtattattgtgtgaaaactctactatttttgagactttaccgtcttattaaagaagccctaagaagttgagacaacaaaaaaaaaaatcattaaataaatcaaacatagtgtttaatcaattactttctcttctattggttactcagattagtggaagaaattatggagtcttaatattcctctataagtgaagatgtttagttagcaaattacgatggctgacaaccgctaggttttgccttttgagggaacgatgaacgtcaacattgatctgacacttgattctgataatggacagtgtgatatgggtatggtggtttagattttcgaggtaatgtgattggctcggctgtttggcatgtaatgggtgggtattcactaaaaatgactgataatggatgggtatttattgtcggttgctaggtttggataatgtttgctttgaatcagactgtttgagtgtggtgttgaagttcaataaccctatctcgttggcttcttctttgcgtttaatactaaatgattttagacagttttttttagttatcgatatacttgtttttcttgttgttctagaatatttacggttgttgctcatatctttagctttttttttttttttttaatatacttgtctttctcattattctaaaacattaatggcatgtttactaatatgtaatgggaatcaatagtaaagtaatcattcccttacatttgtttacttacattattaaaattaggaa

SEQ ID NO: 124304 - DNA, 1228 bp, Cannabis sativa
aatcagattagattgaaatgggttttatttaaagcataaaatcccaacaactacaccattaaaaattccttcaaccacaaagaataaagaagactaaccactaatagtgaggtgagccatcaaagaacaaagaagacgaaccaacaacaaaacaaaacaaaattatctcacagagataagactaatcatagtagcctaaataaaagatactcaaaactatgtcacaaagacaagactaatcataggagtaaaaacctaatcacagtagcaaaattcaatcgtagtagcaaaactacagaaattgaccaagccatgcctaagtccaaggagggttggtgggcctggcttttgaaaaaagtcaatctttggtagctaatgatttaagaacaagaaatcctatagtagacgatatgaaatatttagagaaaccatatattagcacaatattttgatagagaagaatgtaaaagaagtttgatgaaataaaatagagatgagataaataaaaaagaaaaaaaaaagaaatgaagtcgttttgaaagtaaatgttattttcttaaagtaattataatatatgaatgttcttttgatgataaaatgttagtgaagcccatttgataggcccaatacaactcaactcagaggcaaccatgacaaaggaaaggcttggagaagaagttagcccagcaggaagagaacatagcagctactgaagggttacttgtagaaacgtgcaagccaaaaattggagaagaagctttgctcaacaaaatagagggaagagcaactcgaatcaagcgtggacgagtgaaacctggctggctaaaggagtatgtgctgaagcttggtcactaagagagagtgagatgcttgtaactaaattctgttagagttgagcaaaaattactagaatatataaagagataattgtaattaattgagatcatcatgaatgaaattggcatttgatttactttgggagattggccttgtctcgaaggaggtacttcactaacattagtgctttcattgttttcttctgtcttcaagatgaagaacgaagagattacgcaactgttacagaacatgagtaatgaattagattagaagtgggagtagagagctcaatcgtgttgggttttgtaccctaaataaaacccatttgagtataatcagatttactaattaataaagataagaaatcgcattttatgttgcatagttcaca

SEQ ID NO: 124305 - DNA, 2871 bp, Cannabis sativa
  modified_base (2844)..(2845): a, c, t, g, unknown or other
tggtgagactcctttctcgctctcttatggatgcgagaccatgataccagtcgaggttggggcaggttccctacgaagagatgttatcaacattgcacaaaatgaagaaaaacaatcgctttacctcgaccttctagaagaaaagcgcgatcaagctcacctgaaaaatgcggcttatcagcagcgaactgcacggtatttcaactctaaggtgaagtagagagttctgcgagtaggagatttggttcttcgaaaagtaatgccaaacacgaaaaacctaggagatggggttttcagagacaattgggaaggaccatatctcatcgcagaaaaaattggtaacgcaacgtaccgacttgcagaactcgatggaactataattcaaagagcctggaatgggaaaagcctaaaattttattatcaatagtactcgcattgtatcgtttgtactcgctgtgtgtatatacttagtcaatttatttgtataaatgctgtaagtatagggtgtatatgacctattgtgtactattgattggcctattgtgtactatcaatttctcttaataagagttatgaatttctcgagctctcaagaacttttgccttagcattttttacaccaagctgtaattggaaaagcaaatgcaattaaaatgttgaaatacacgaagtacccatgtactacgaaaaacatatagaataacataaataaatatccccgaagggatatgtgttgttcatacaatagaaagtaaagaaaaatttgtccaagtacaaattgcgagtacccatgtaccgcttttttttttaaaaaaaaaaaagtttgacaaaagggatcttaaagtaaaacgctaagcattgggagcagtaggggtagttggagtagtggattcatctgcgactttgctggcagcttcgtccacgacttcttcagtgtacgtagcatcaccatcctcgggaaaaagatttcctcctccgccttgagtatgcatgggtgacatggctcaaaaagtctcagccatttcagccgcctccgccgcaaggatcgagaagtcgaagtcttgaatcttcgaaagagttgtgtagatgtagtcagaaactgcctggtcatactgcttctttccattttccttctcgacctccaagacgcgggacatctcctctatctttgccttatcagccgcttcctattttagcttcttgactctctcctgaagctgggcattctgcctctttaacatttcaacttctttggagccagcagcaaaggccttcaagagcatggtcatggactacgaagccaactcaacagagcgaggcataagttccttaaaaggagttctctctaccttggacatgaaatcctcgcccacaaacttttcctgcagaactaggaaatcgcgagctcgaacagctggatcgatcacgacattcttccccttgtcctgcgtaggcttagctaacttcttggaggaattcgcggcaggagtaacgacgacaatgctttttctctttcgaggaatgataggagatgtggtcgttgttctggtttttggctggcggttgagaactggtgcggacttcaggaaagtcaattttgcaaggacaagaaaagaaaaaagagttaaaataaacaataaatttaaatgcattagtctatacatgcgatatgttacctgatgtcggccgagaagtctacttggaaaggcgtttgtctatcggctctttttgcttctcaaacggcaacttgtacactagctccctttgaaggctcgcgttctctggaattagcttatgttcccgtagctttaaggtcgtgcatagtagtctccagtcacgatcttgaacagggaggcttcagagaatttgaacggtctctatgcgggttgcgtctggtgcaggtcgagccggtctatctgcgaaaataaggaaaagtgaattagctctaaatcacaaggtaacatgaaaattaactaagtaaagaaatatgcgacgtactaagtcgacgattaaagtcagtcctaatccctaggactttaaacacgtaaaaccatttagatttcaaatcccccatattggaaaccacgcctcccaccccgttgatttcagaagtagcccacttgctgaaacagtagaagccattgtggagacccacgttctttatgtcataaaaataactaaactcctccatcaaaggctccctatgcacatactcaatatacatcgcataaaaacctaaagctatgcgatagctatttggggttagttgaaaaggggacatgtcatacatctggagaatagcgaagatgaatggatggaaagggattgatactccgcaacgaagtatgagtattgagactaccacatcctctgtgggtatgatcgtagggttagtaaaagaaaggtgcgctctctgggaaggacgaggatgcaaggaggcaagtcgcagcaaattcaatcttgtaaaggtagtgagatcagattttttgactcgcaaaaccaagtgctcgcacaagaaaggctcgtccaattgtgtattatccactgaatcgttcccacttccctcagcgtcctcttcctcatccaactcgcgatctggagcctcccattcctcgcccatctcctcaacttcagtgtcaggagcatgccgggaatgaacaaggtgttcgcaggctgacagtgtagactcgctatctcgaatctcgatagttcctagttcagtaagctcctgaacaatcctttcgatgtctgcggcagaaaacagacctagctacgcgtcgccgacaattggggtctcctcttctaaaatcgaggttgggataaagtgttgggttttatgccctnnataaaactctttacaatctgattagt

SEQ ID NO: 124306 - DNA, 1298 bp, Cannabis sativa
agtctgatgtataacaatacatccaatacaaggttaccttaccaatgccttgaaaaagacacaccactatctaagtgtaagtaaactacattgttaattatcgtatgagtggaaatcttgtgtactgataaatcgcggtactaatgtttaatagcataatcttgattattttccactgtatagaaaacacagtaatcatgaataataatgtgataaggatttaaatgaatttataaaacaaacaaatgatcgtgaagcaaacatgcgaaccaagtaatatatattaaacaagtaataaaataattatgtttctttattgataaatgaatatttaagattacattgaaatagagttttagttagggcacaaaaccaaacaaacttccacctgcactaacataaaacaataagtacatttttagctctgtgaagaacttttgtagcgagaccagttccttagtagcctcaacggtagctatgtattcggcctccatggtagagttagtcattgcagattgcttaacacttctccaaacaactgctccacccctaagagtgaacaccatcccaatatagacttcctgtcatcaagacaagcctgaaaaatctgagttggtatagcctaagagatttaaagcaccactcttatagactaaaacataatctcttgtcctctttaagtatttcaaaatattcttaattgttgtccaatgttcattacctgagtttgaatgatacctgctcataattcccactgcatagtaaatatttggtttagtgcataatatagcatatattagacttctaactgttgaagcataaggaaattttcttacattttctatctcttgggtattagtggcacactatttcttagatagtcgcaaatcatatctaaagggcatgattgcctttttggcattggtcattgagaaatgctctagcaccttatcgatgtaagttgcttgtgagagagcaagtgatacgttcttctagtttttaataattttttagaacataattagattcacccaagtctttcatttcgaattgggtgtttagccattcctttatgttagtcattttcttgatattgttgccaatgattaaaatatcatcaatataaaggaccaggaatactaccacttgattatccttgacttggtaaacacaagattcatcttaattttggtgaaagtcataagttttgattatttcatcaaacattttgtttcaagagcgagaagcctgcttaaatccataaatggacttgtttagcttgcaaactttctcttctt

SEQ ID NO: 124307 - DNA, 562 bp, Cannabis sativa
ttacgtatatttatacatggccgtataagttgagttttcttagttttgaagattattatactatacattctattagtgaccatatatatttagctttggtcttaatcatgtttttgacaaagctgcagaagagtgttatgtgtaagtacgtatattatattttaggttcattttattaaaaaatattatatatatgtatataataatgttcatcatgaaaacttactgaagacaactctacatcacacgcaatgttctaatttaattgacaataaaagaatcacaaatgatttcatgaagattcaaatttgtgcatgcgtgagtgtcatgattatatattatatatacacactacattagtgtgttatttttagtgacaactttttagtcataacatacattttttgtgactaaatatgacttttacaataaatgtcacttttaccagcccagtttgttactgcgctgcgcatttcgcaaactgcgctggcaaataggtcaaagttttaccagcgtacatttgcagtggctaaaatctaacttttatcagcgcatttacgcg

SEQ ID NO: 124308 - DNA, 852 bp, Cannabis sativa
atgagttttaagtattttaattgcacgtttagcaaagaaaaagaaaaatgaaaaatagttttttaaaattttgcccttctaacaagttttgatctatctatagcctatataggaaaatgaataagaaaaggcaggttgacttatgtatatatggaaaatgccaaaggcaccaaaagcagcgaaccatcattagtacatttaatatctcacacatttaactaactaatataacgtaacatcgcattgtactcttacgtatatatatttagaagtcgatcgaaagactcaaaacacatggaatatataatattatacattagaatatctttagcaagctagttatatgtctttattataagaccacgcaccacactcacacttactaattaagctctcaacatcaaacatatctcacttattaattaattattacgcacacgacgtagtaattaaacacagcatagaaaataagataaaaaagagtgttaattattatgttgtggtagcagtttcgttcagcctagcagccgccgtcacagacgccgccactccacccgcttgtgtcgtcagattcgggttgttccgcagctccgcattcaccaccccttccgcgtcctgtcgtgttgccgctttgtccgccggtagctttgcagtcgcatcctacgcaagttggtaataatacataaataatttaacatatatatatatatatatattattattattcagacacgaaaagtacttacagtgagaatatctccgagcttaatcttgttctcgtccagatcaattccgcaattgaaggacgccgccgattgagccatagcggcgaggccacctggtattatcacg

SEQ ID NO: 124309 - DNA, 2317 bp, Cannabis sativa
agtctttttattaaaaagaaataatcaatctaaattaatgattattacaatgatgctcactacaaggtattaagaacataaaagttgttcctaaaaacttttataattgtccttaaagtgtattaggggaaacaaatcgcctctagtgtgtcgctaatacttcgtccctaatactcctttttaagagcaacaaaataaattgcccctaaaagtaattattatggacaactttttgtcgcccgtgaaagtataaaaatcacccccatttcatgttaattaggagcaaaaaaaaaaaaaatcgaccctagaagtataaggtttccccctattcatatgcaaacatggcagcatttagtggcgttaaccgccctatatattatttaatattatttgccgagtttttcggtaaccaagtatttttagagcttaagaaaggaacaacagaataaaacaagaaaacaagtaagagattttacgtggttcaggcgttaactatatctttagtccatgagtccattttattaggcacattgaccgataattgtttatacaagtagagatacaatggactgaaaccccttcttctattttgttccccttgaagaagaggaaactcagtaagaatattttagggttttttagatgtaatgttatttagcttaatacaaatgtgcttgcgacgaatgattcttacccaaaaaaaagtgtgtgtctctctcgagccaacctcatctttctcttgtgctttataggggtatttatagaccaacttctcttcatgtgctggcttagattgatcatccttgggcaaaatctgaccgttggattggtaggtggtatttttcccatatggcatttaaaggtatcagatcgtacaagctgggccccatacgcgtgtcatcccagggcctttcctttttgaatttcccttctacctagtttttggatcatttggttaggtacataaagatacgcatgctctatacgatatcgtgtcgtgagagacaacctctgacgtcatatctgaaaaagcctggtcactaggtgcatagtctgacacatacaagcagagcctccgcgggctaagggtgtagcccggtttggcgcatcttagcatgccttggtccttctaggagaaactcgtactcttcgcgggagcagatggcttcgattcctgggactggggaagactttagctcatggatgccctctgcattgctagcagttagggaactcccatatacgaaagccctttctgtgagatgggagctttatcgtcccagaccataagtttaagaagtttttcggctaatgactccttaatgcctcttgatcaaaatccacatgttatgattacaaaaatacagataacatttacctccaagctttcgtgacatgacatgatctgggagcttgtagtatttcttcctgagtgagcacgtgggatttaagacaagccctttattgtagcatgtcatcagccaccaattgaagtgtcacgttcagaatgtattatttcctttttctcgtgttgggtgcgtgctttgtgggatgcccaaaaatgacattgattggctttgagtagaatttccatttgcggagaacttttcacgaagcatgcaaatgatggaagccagacgttgagaggcaatacaccttcttagcttcccactcatccaaccgttagacgtcccttgggcaaaggagtcgaactgtttgattctcgtggaaggcaccccttcctggtaactaatttcaacagtcatttcatatttcacattttttatgcctgtcgtaccagagtttcagcatttggttccatctcttcatctgccttgcaagtctagcaactccattctcaggcacgcatttcgccgggcaagatgcaacaccaagatcacccacttcatttcctctttacaatctgtaagctttcttcatcgtttacttgatgtagagttcatagggagttgtgagggtgcatgttgcgtgcgaatgtttgctctgagaatatttgcaccgtgcctgaggtctctatcacgagcagtgagagtcttagggtccagtgtcgtactgacccgttttgctttgtaacaatttttggcgagtacattagatttgcgatggaaagaacgagttcttctaaaaccgcatgcgacagtagctctagcaagaaaaggcaaaggcctaaaatagttgttgttgaaactagggcccaccctccatatcatgacccaccagttaggttgggccagcctcgttcatacccttctgttgggttttgtgccctaattaaattcatttcaatataatcaga

SEQ ID NO: 124310 - DNA, 2096 bp, Cannabis sativa
  modified_base (472)..(473): a, c, t, g, unknown or other
aaaaaaattgtggaagtttatttaagttttttttatatatttatttgactatagaattgttgtggtatattcatattactctaaggtataatatttgtatcttatattatagatcatgaaggaaagaaattaaaataaaattaaaagaatacctatatcagtataaaaaataaaaaatgacataatactcatattattctaaggtatagtatttgtatattatattcatattactctaatgcatttttataataccttttatataatgaaggatattttaggtattaaaaagtaaaaaaaaacatttattttattatttaaaaaaaaaatgacattaactatcactaaagttaaaaatagggctatttacttgcattttttttcatgcatgtatacattgcatacatatttgaatctcagccctatgcttacaattttgggattatatcacaaatacacaaaaataacaaannaaattacaaaaatataatttcacagaattttatatatttttacgatttttttattttatttacaaaaaataagatatttttatattattttcttgttaatttgatgttattttttgtatttgtatgttattttttgttattgttttgatgttatttaaatgatattttcatattactttcatgtagttttcttgttgtttttgtgttgtttctgtggaaaaccgtaaaatgtaaaaacgaaaattctttaaacgtaaaaatgtaatttttttcataaaaaatggtgccttatgtaattatccctataattttgtgtatataaataaatacaatatcatataaaattctaaaattctattggatcttattttgttataataagatgaaataattgaactaaaaacttacctgactaatactttaaaatgctaacataattaagtagaagaaatgtttgctaagggacattatattattaatattattattattttgaagaaaaacgttcatatattagataaaaagagatagttagatctcgcggtcattataaagtaggtgtacaagaatctaggtaattagaatatctctaaacctctggtgggaaaacgcccacttaaccacattatgagcagaaacagtttctactaatattagaaaaattacaactagtaaaagagagagaggacttaatacaaaaggagacatagttctcaagctcccacctggactcagccctattaagagtattgataactaccctcgaatcactctctacaataaacttcaaaccgagcttcttcgctacatccagtgcacaccagcaagcttcctctttcccacaaagagcatcagcaaacaacagtctggaagtataagcccaaatcaccttgccaagatgatcccttgcaacaacagcagtacacatagtgttcaaccccactttaacatcacaattcagctttatccagtcttacggaggagggcgccagtcatccgtcatgcacggaatagagcaagggagcacaaaagcatggtgaacaacaaaagaagagtgaatactatcaatacatttagttacatcaaagagacagttgttatgtaccttatcaatcttgatccgccagatggtgtccacagttaacgaggcataaaggaagacctcatcagaattgatgcctttgtttttaaggtcccaaatgaatttaaccttgtcccatatccggatgtcactatcacacacaaggaaaattccccagggaaaggatttccacaaacggaaagccacattacaagataagaacagatgttcaatagtttcattctttatcccacacagaggacacgacacctcctcaatgggaaattttcttccgatcacaaaacggataggaagagccttagccagaatacaccaccataatctgttccaaagagacggggcgacctcacaaagaggtgctctgtcgagggcttgagcaagataagccaatttattcgagaacttcccattcccttccaatgtccaaatcaatttatcattggccagtctaggtacagtaaccttatcgaaagcactgtttaacaaggggatattccatcccccattatctaacaatagat

SEQ ID NO: 124311 - DNA, 729 bp, Cannabis sativa
gattggatgaagatacttcatggttgggtgaaattccatccccaattcattctgttgttattgaagactctcaattaataataacagtttttactcaaaaaagaaaaaagttaaatcgtaaaaataaaattaagtctaaaaatgaagaaaaaaatttgacaagtggaatgaaattatttcagattttttgtcactcctttatctcactaccgataatattatgacctttttttaaaaaaataaaaactcacataactccgttaatcaatagtggttagaaaatagacttttttttgttctttttgaaagtggagtagacttgcactagtttttaataatctaattagtttaacatatttttgaattaaaaaaatatatttacattactaaattatgagtggtatataatatcatccatatgatgatatctttgtatatattaaaaatattaaaaataacaataatttctttttaagtgtactactttattatatttttatttttttgaaaggtggtataataccttattaaaatagtaatgtatagcttttttccctacaaaaatatattaagaaaattttaaaaaaaattagaatattaaaatttcaataatgtatcatataaaaaataaggggttttttttttcagttttaactaaaaaaaaataagaatattacaaaaatacttccagctagccaaataaataaatatgcagcccaaataaaaaaa

SEQ ID NO: 124312 - DNA, 1616 bp, Cannabis sativa
aaacccttttatcccgattttttgtaaaaactggtaaaagggtttcccctttaccctgtttggctccagcaaaacaataaagggtgaaaatttgattttttcggtgatcatccaaacaagacctttgctccaaagtgtgatagaagacccattaggagtgtgtttggctagtcaataaaaaacaatctttaactttttttgtgtgtaatttttcctttttttagtgctaaatcaaacatggcccttatgccttatacaaaagtggagtaaaaactatcaacatactttttatcctacctttttttttttcaagtataaaaagtgggacaaaatatcccttttctagtattgaaagcaacaaaatatacattccaaattatattaattcaaaataaacaacaaagttacaagacatccacattttatgtattctctttataagctcaagtttaattacaacagttaaaattacaagtttgcccaaaggcctataacagttcagatactcaatacaagactcaaactactttcagttacaacaaactaccagaaatagattgcagcaataaaaaggcctaacatgttacaactcaacaaattccaactgccctatctactcctacaaactatatattcccatatccagaagaagatcgatacatgtggccttcattccctttgtgggttgttttttagagtgagagtgtagagagagaagctcctcgatctcatttgtaaccacgtccaaagaaagaaaaagaaagagagttagaaagagatcaagaaaaaaaaatagagaggaaaaaaacttatcaactaaggaatttgtggtttgaaatctgaagaaaacacttgtaatacatgttgttcatagtgaagaattaagttactctgaggcaagcttgacgaagacgtagcccatcattctagggtgaacttcgagatcaaatctctatttctgtttgttttctttagccctaactctcatctctcaatgttactaagtgtgcgtttgtgtcttggtgttgtgtgttgtgatttatgtttcgtgtgtgtgtgtgtgttcgatctatgagatcgtgtttgtgctggaaaccctagggtgtctctcggagaaaataaagaaggtttgagattaagtctcgaacatttctgagttgttttactaaagtgctagagtttttattgtcttactttagggttggaccgagttcttgttggatgcttatttttcaattttaccaactttttgtggacgcataaaatgtttgcaaaattaccactatttgcctattgtgtatttttgcaatgaataaattcattaaaaatataataacgtcatacaggctagttatgaatactaaacatcttatgttcatcaaataaatattattcttgccaggataatcaaaataatactatacacccaacaaaaaataaggatattcatatctagcccaacaaattatgtattcatccgaagagcatgcacaactaatccatgagcaatacagactagggacactcttggaaatctgaataacaaacttgtaaaaacttctaataatgatcttaaaatcatttgagcgggaactctaatagtaaaagcaatcata

SEQ ID NO: 124313 - DNA, 1953 bp, Cannabis sativa
tcaatattttggctctgtgggaacgacaagctctagctatgttagttcctaaactattaactatcattttttaaatgtcaagacattcccatcatctctaagaaaatggagttcattcaaatgaaatccagccgaccaccgtagtaagaggacatcaacctcttatcgtcggagagagccaaaagaagaataaccaaagtgcagaccaccaagcaaacactcaaagagggcccctagcactatgtgacttaataaagacaccaaaggctatcccattgatagaagtattcaactatcgaaaaggtcatctctggtgtagtgccttccacagtttgtgccatcaaaccttaacacttcaacgcgtgggcttagaaaggaaaagcaattgtactcggtgagttaagatcccgggctcactaatatgaagaggaaataggtgacctctgctagaagaataagaggttaaaaaccactgtggctggtatgcaagaagtgttgaatggcatactcaaaggtaaaacccaagccttgcattttcgtcacaaaagccaccaactggggaatgagatctcaactgcatatgctagcaaaggtgattccatgtcatccactaatagcaccccaagagatgaacatagaaggagcatgtcgcaagacaagagcccaatgggccaactgagacagcttgagcctacccaatacccaccataaaagagatttaactgagggaaacaccccataacctatggaagagacttcacccaagaggtctcatactaggggaacctcgcctatagctccccctaagatcaaggtaagtaaaaagggcttatccattagctttagtgataagtcacacacaaatcgaacaagaggagaacctctcacgagccaatgcaaaccacacagaagacccgatttccactcgttaacccttaaaagaggatgatcaaaaggatgaaggagttggaggcagaaatacaaggcctacgttgaaagatagctatcgccatgcaaagagacttgaatgatgatgaggagtttgatacagaatcccctctctcgagggagattcgaatgaaaccacttctatcaaaattcaaggagccacagatgacaccatatgatggtaccgttatcccaaagtaccatcttagtgcatttaatgagctaatgaagatgaaaaaggtgtcatgtaaggcaaggtgtcaatgtttcgtaatcacattaaatggagccgcgtataaatggttcaaacgactaggactggagagaagatcacatattggaagcaactttcagaagaattcctccaacaacatgaggctacatgtgataacattatgtctgtcacaagtatcaccaatgtgaagcaaggggacaagaaagtttgtgaagctacatccagtgcttcaacactgaagttaccaaagtagggaaggtttccaaagatgaactcaagtttgccaaagtcctcgaggtataccttggaggtggcctgtgggggagtatgctgaatagacagttggatggcttagacaacttctacaaaaaagtggagaagtatatttgtatggaggaaggaaacagagtcttaagagaagatacaagtgagtgctctttgggaagctcgtcaaaaccctacaaggtctattaaataatactcccaacactcataagctgacacattcaagtgaagccttcaatctacgacccgtaaaaatcaaacatctaagatgttcctaaaagtgaagttccaccatacaggagagtgttcctagcaatggaaagtttacctttagtacattatactaaattaaagagggcgcttaggttaacctccaaacatagattatgtactcatgcgatcacatatttgccttatcaatgaaattaagtttccaatctacatatggagttcatcatgttggaatatttattttaccaagatct

SEQ ID NO: 124314 - DNA, 2581 bp, Cannabis sativa
  modified_base (2536)..(2555): a, c, t, g, unknown or other
tagtattgttataatttatttgtagtatataattttattactatggtatattaattttttcagttttatgatatatcaaatactgctgtgtatatttaataatctaatatatttattcctttttgttacaatataataatatacaatactaaaaaaattatattacttaataaacatatttttataatttttattagttaatttattatatttgacttttttttttaatttttttaaaaaagagatatttactaactttatttaatttttaaatttaaaatcattttacatccgagtcctatcaattattgtagataaaatagacagctaactaatgaaggcccaccatctcaacacttccatctctcacatcatattggaattcttccacttaataataaccaagcaactgatttgtcaaaaatatgttgatggtggcagtaaacaaatatttcttgcctacattatatcatctcatctacttatagaaaattctatgtgatttccctagaaaaaaggacaactatacggatgactagtatttgaagttactcaggccttggttgaatgcaatttgtctttctaaataagtgactatttgtaccataataatataaatatatatatattttgattttatacataaaataaaactcatttcaatataattttatttacaatcaataaaaaattagaagtcatttaagtttacatatagttttcatgattatgattttaatatacaatttttgttaaattcagaacatatagttactcacaattatagtaatttcatcacagtagaaagtaattctgattatatacttcaaatacttagggatttatcagtgtactgaatttacattgacgtaataatcagtaataaagtttattgttattccctaaaattcggctatgtaccagaagctaacacgtgtcctacagaaagaatgtgaatcaactctaataatttaacaatgatgtatcattaaatgcaatttaaataactcgtcccaattaaatataagtttgatagataatgttcaaactcattggctgcttaattagtcttatgcgagacaagaatagtaactattagactcatattgacgagacatatatctgtctcggaataaactcatttacgtacacaagaagaggatactctcctgcacgagcagattaaatgtagcaacacacaaccgcctcgcattacacatagtgagaagatcacctcgcattattaataccaataaagggatacgatgagatgaattattttccaacacttagcgcattttcctattaagatggacatgaaggagaactcacatctgatgagatacaaccttccaaatcaacaataaccgtcaagaggataaaaataataagcggttgggtagttattagatattatcccatgtgtgattaaatgaaacgtggggattatccatgttccataaacaattatatatgaaccaatccaaaaaagaataactgttaacctctcctatgttcctataaatagggcagaatccatgggaaaaaagacaacaaatttgggagagaaaatattattattcaaatactgatattgtattctgtactcaaagaaaatatccctaataataaggattcgtggagtatgtagattttaactacaaaaccacgtaaaatatctagtgttattttatcatttattacttatttctttctgtagtgagtttattgaaaaaatgctattaatttagttaacaaaaatctgcgttaacagattggtgctttcattgagagctttggtgataaaaactcaaaaaaatctctcctcataaacacaaatctatccatattcaatggctgataaaatcggtagtcgtcctgaagaaacaacccatcgtcctggcaaagagcccatgggatctcaaagacccaacacatctgaaataccacgttcgaggaggaacgatggtaatgatgatccaaactcagaaaggaggaatgaggatgtcaaaaaccctgccagatacgtgcctaggagtgaggatgcctattattagaattacaacagaatcagcctactgacatcagctactgacagattgttagttatagttttttttactgttagttcagttagttaattctgttacattagctatcttttagctgatattgtttcgtctaaagtcggttacttccctgtatatatattggtgttcttcattaattgtaaacaagcagattgtaactttttcattcagtaaataaagcttttcattttctttctgtttcgtgttatggtatcagagcgagagagtatgctttcccacatctgaccttaatcccttccgctttccctgcctcgtcgtgtcttcttctccggcaatggtggcactcatccaagactggtgatccagttctcttcttcctgacaactctcccttcatcttctcttcctcttccagaatctttctttcttcttccctctctctgctatgtctaacaatgatcaagatgttggaaatttattttaccnnnnnnnnnnnnnnnnnnnnaagtatgtttattaacaacctaaata

SEQ ID NO: 124315 - DNA, 1186 bp, Cannabis sativa
ctctggattattggaaactgggctttccttgtttagtgaattggagccaaaatatgggattaggccagtagttgagcacttctcttgtatggttgatcttttgggtcgtgcaggacgattcccagaagccatggatttcatcaaaagtagtccttttacagactcaattctgctttggagaactttagtgaatgtatgcaagttacatggtgaaatggaatttggtatgttagcatcaaaatgtttgcttgatttgaaaccagaagaggcagggtcatacatacttgtttcgaatatgtttgctggaggaggaatgttggatgaggctgcagatgttagaactgttatgaatgatttgaaacttagcaaagaaccaggctgtagttggattgaagttaatgataaagttcattatttcgcagcaagcgatatgaaccacccgaagagtaaggaaatttatgcagaacttgatttattaagggatgaaatgcaaagacatcaaagtagtagtgactttcaaccaattttgtaagacttgtagattcaccagttatgacaaaaggagtacatttaaggttgatacaatagcagaattgttgagttgatgtaaatacaatacaacttttaagcaagcaatattgtcatatgaatgaatatcagtacaaattgtcaattttattggtaatgaggcttttatttacatgctttcttgggattcaaactctacttgagaatgaactcagctgaagtggttgaaaattgcctttattactgaccataatcttcttgaagaatgattttttcatttataacctttgtttcttctttgtttgtactagaagaaaaaacagaacacaacaggacaaaaccaaacaaaacagaagccataggcctaggaatcttggatagtagttggagaagtccataaaacccaaaccattcattcttatggtagtccattcccaattaagcccatctgcattttgaaccacatatttgggtggtactgcatataaaccaccactcctctcttttctttagagcattactattagatactataattgctggtatggtagacttattgtattaaataacaagttacattttgtttggataaaatattgtattgtattaattattatgattataaatttaggggctttttcatttttatatttcaaaa

SEQ ID NO: 124316 - DNA, 1056 bp, Cannabis sativa
  modified_base (989)..(1007): a, c, t, g, unknown or other
atgaacatgtaggcaatcacttcacttcattgtatgatttggctttgagaatattgtatcacttttctgaatgtaacaccatttaacattgctataagatcacaagagaagcattaaaaaatttatagaatcatactaagaacatgttacattaaatgctgtaatttttttattattattttaaagttttttttttgaaaatatattgtttatgttctatatttatagaatatttttttgttattttaaatatattttattaattgttttggattttaataattatttttgtattggatatattttatatattattattatatatttgaaatcaatgaaatataataaaatgttaaaaaaagtaaagttttggtgattattttaaaacataaagtagagaagttgttaagagtgtttaagactaagaaaatctttaatggaagcaatatctataattgtcaaaatataaaatacatattatcttaaaatatttttttttatcttttctcattcatataaaatttgtcatatctttttagaaaaatccttcaatgattaacaactttaaaagttactcactataatttcacattatatcaaattaatgaattttatttttatgtaatttttttttttaataaaaaaaatattatgtgattatttatattaagtaacactttatataaaattaattttgaaaattggatcatattatatatatttggtgagactatttcaatgaacaatctccataaaaattactcttaaaagtgatgttttaattagtagcaattaattaaccatattttataaaaattattatattaaattataaaacatcctctactaaatcaactaatagcgataggcaccactccactcctgatacattttagcgttatatcttataaataatttcattacacaactgatgcttaaatattaaatgagttcaaagcttaggttagtgatgattacttactcaaagnnnnnnnnnnnnnnnnnnncacttggttaaagctgaaatcactccaattaatgacatgtgtaaacatt

SEQ ID NO: 124317 - DNA, 1035 bp, Cannabis sativa
ccctttagcgtcgccctgatcagcgtcggtagcaaatttcgtaaaaatccacgctgaaagggcttaaaaactgcctctaaagagagtttttgtagtagtgaattacttggactactctctaaatgctttgtataaaaataaaaaaaaatgatcaacaaggcctacttagaaatgtgtgagcatttgactcatttgcagccatcatatcagcagctatcccgctaatttgttgtgtaggatatacctttactatttaattctttttcttgaattgctaattgtgatggaattaaattaaaaagagaaagaatcgttattaaccaaaattgatccaataaaagacaactcatcagcataaagtcttggcggccaaaaaaatcagccccttatcatacgctgaatggaaaatttaacaaaagaaaaattcaaatacaataggtatcatcagtaaacattgaaatacttgcaaacttgaatggatcttgagaaaggttgaaaattttgtttactttttttatttggattggttggaaaagatgaattgttggtgtttaaggtcagtagctccaaaatactgtcaaaaaagctgctggagccaaaggcggagactatattgcattcaacttcaaccagccgaatcccttcttttatcatcgtaattctgcaaaaagaaacgttagaaacggtaacttattcaggtaccgtatttttgcacaaatcaatacttatagccgtatacataaaaaaaactccctttttttaagccataactatattagaggttgacgaaaaaatacaaaacaagctaatctctcaaagccatcttcacttttcatttgaaagctgcgacgatccctcatcatggccatcttaatcagaggtactccctgtttctcatcttttactcttatataaatgttcaaattatcaaaccatacactactacaatattagcctttagaggcagttttttcaaccccatttataaaaagagaagctaaagggtgtgaaaatacccgctatgttcgaaattga

SEQ ID NO: 124318 - DNA, 780 bp, Cannabis sativa
tttttagatttttttcttacgaaaaaaaatcaatattttagcaccataccatgacattaacccatccgggtctaggttcgggtctagatgtcgattatgtgagcaaaatataaaatataatatgttacacaaaaaaaattgtttttgaaaattgaaaacatcattctgatgttttctgttttctagttttttaaaactcaatttttaaaaaacagtttttaaaaatttttgccaaacgactcctaatagtttttaaaaactgttttcagttttaaaaaatagaaaacagtttttaaactataaagccaaacaacctctaactttctcagctctctagctatactattggtgtcgacctcataattttcattgttaagctttagatccaatatataatatcgccttagaagatattagagaataagtaggcactcaaatcgtcagcgatgaagccagatacctaaagattcattgacccaaggacccaacccttttgtttatgcaacatcaattttccaatataattttttaaaatttcataggtttttatactttttgtgcaatattatggctttttttttttcaaaaaggttatgttatgggaaaattgaagaaaaagattaaaaaaatatgagaaaatctagtaagggtacctagttactagtaatcgatggagaaccagttaccataagaggtaaccaagtaccttatgctattttttctatgatttttaattattttctaaatttttcccataaaataacttcttttttttttttt

SEQ ID NO: 124319 - DNA, 937 bp, Cannabis sativa
  modified_base (149)..(156): a, c, t, g, unknown or other
aagaaaactatataaaagtaatataaaaataatatttaataacatcaaaataataataaaaaataatatacaaataataaaaaattgacaacaaattaataacagtacaacatacaaataccgcattttttgtaaataaaatcaaaaannnnnnnnaaatatttaaaattccgtaaaaccgtatttttataaatttttttgttattttttttatttatgaaataatccctaaaaaataatgtcaattatttttgtaaataagccttaagacttggcaggcttgatccgtaatgatgggccgagggcattctgatacccaaatgaataatgggtttacaatgggcctaagaagatccacaaatcactatactgatcaagcaaacactttttctcttcttcttctttctgtttttacgtaacaataaaaataaaatgaaatgaaattatatacgctcttcccatattcatagaaacataagcttttgtaattgttagtgatgaaaaggtataacttaaataactacatgtaaataaaatattgagctaaggggaaatgtatacatctattatatatagaaacatggatatgctttaagtaggttgatgactttccataataataataaaaaagggaaagggtcatcgaggtacatttttttttctttcacaaagttagtagcaaggttttttttgtttttgttttacttttttattttttgtttttttttatgaagggtgattagaattactttgagaattcataacgtagacattaactatcaatggtagctaattgtttagccaaataaaggcccaaaaaaaaaaatgccagccatatttgaaaaaaaaattaacttaaaaaataaggaaattacactctatactcattttttgtttcatattttaatttttaccttctttttactactctttaatt

SEQ ID NO: 124320 - DNA, 1391 bp, Cannabis sativa
  modified_base (1365)..(1365): a, c, t, g, unknown or other
cgtgtgatggggagcggggagctcctttgggcacatggtgatctgtagtggggaagttgggcagtggggagcatgggtgcgaggagctcgacccatgcctttgctcctcctcgtgccagcacatccccttatgtgtattggcctcatcgtgccaacacatctccttaagcgtattttagaaattatacttggtgaattttcgggtatgacaccaatgattcaaaaaattacacttagcaatttttgggggttaacactacttgtcccctagtctataagaattctttcaagtgttcttgtaaattaattttggtgagctttgtctccatctcttagtccctaggctagtgttgtgggcatttacgacttatttttttttgggttaccctttataggggagtgtaggctttattagcaattcgacctcccttttttgagggtacttatcataatgaaggattgtcagcttgttaagatttctcaacctcttctatgagttgtcattattttttagaggtagaattttgccacttaggactcctcaaactttttacttatgttacttgtccattgaaagagtatagactttttagagaagtctcgacctcttctcagttattctttttatttgagggagattttcaccacttgggctttctcaacctcttttatggtgtagccttattatggaaagagtatagactcttcgagcagtctcgacatcttattggctacttatcggatataagggagcttgtggtcccttaggcagcactcaatcttttttaagattttacaattttattgggggagcttctagcctcttaggcaacactcaaccccttacattgcatccatggcacttagagcatgttttgaaggctagaaaattggaactccttttagagaggcatccctctcagagtcgtattcagttcctcttttcttttaatattttaagggagatgataattttgtgaatcgatttgacctttttcttttgatatgttaaggaagatgatggttctgtgaactgactcgaccttttgcttattttattttaagggagatgatggttctctaaaccaactggaccttttgcacttaacttttatttgttttcctacgcgcacttcaagacttatttgattttgaggagcttctccctcatttattgtgagtgctctttcttgtggagatatcgttaggctttaactcttttcttggaccgttaggggtagccaatccttgtagttctaagagttcttttttttacttcgttcactttgatattttcaattgacaagtatagcgagcaagtcacacagtcgtatggagagtgatgtgttaggttttatgccctanataaaactctttacaatctgattagt

SEQ ID NO: 124321 - DNA, 683 bp, Cannabis sativa
tatatatatatatttgtatttaatttagtttgttgatcatatatttagtgattaaaataaataaagttaccacaatgtatcttaaatatataagtgactcctaataaaataaacaacataaataactaaaaaagaattattaatatgtaatttgctttatagtaacctttctaatttttaatattttaatggttaatttttttttggaaaaaatgattcttaaataatttatttcatatttttttttttcactaaattaaatatacattttgatatattagattatatgtatataaaagtaatcaatgtatagattgaaaaatatatatttttttatataaaaagtaattagttagtatattattattaaacaaaaggtttattgtgaaatattcagaaaaaaaaattaatttttatattctgatatacttaagtttaaatcaggtatatgtatatgctaatgtggtacggtattttttaatatttaattttcttgaaatgtttttgtaattattttgattttgatatatatttatgtaaatttcccaagaattaaatacatattgtctcatttagaaatttaagagaagacttaattaagggtgtgtttggaagtaactgtactgtaattactagggtggtaattacacagtttagtaattacactattttttaaaatgcaa

SEQ ID NO: 124322 - DNA, 1113 bp, Cannabis sativa
tgctaattgcctttactaatctaaattactaaagcggtcattacaatatctgtccagatatacacaccctcgtcccttgacaacaaaatgccttcaataaatacacacaaccccatcttgtatcgtctgcaacatcgaacgcctcaaaagctagccaaagggttttaaaaggtcactcttttcgcattgttaagatagtcccacaatatttgatcagaattgcatcgtgtattcaattcttttgttgaggggtcaccactcatctttaggcctgtgattaaactaaactcagacagtgaaaatttggcttcgaaaatacccacataaaaccacacttcatcatttttgaccttactaactttctttttcctcaataatagctgatgtacaatcaccccaaaaaaattcaaatcacttgcattccaaaaaactccaaagggagtttccttgaccttctcaatcaacttaaaggcttcgaacttagcctttattgaagcaaagtgcctgttccctctataagtgatatgccctggaaaatgctcagacaatgaaagaatgatttctagagccatctgcatttacaaacacaaagtgattattaattggaatataaatcgcacatagtcacaaaacaacatgtaaaaatcacataaaatcgcaaaacaacaagcatgaatcgcacaaagattgcaaacacgtcgcttaaaattgttcaagcactgtctagagtaaacatttaaataaaattgcacaaaattgcaaaccaacaggaacacaaaaatactttagattggcatgacttatcgcacgaaattgcacaaatgtcgcccaaaaattacaaaccaacatgaacacaaaaacactttaaattgttattatttatcgcataaaattgcacaaaatcacacaaaaattgcacaataatactgttattgcaaaatttgcactctgacgtggcatcacgagaatggtgacacgtggaatccacttggagtatctgctcgggaagaatgaaccgagcaggatgtctcgctggcacatccagaataagatatttagcgatccgtgcagagcactcaacacttagcgaattcagctttcgcttcatgagtc

SEQ ID NO: 124323 - DNA, 618 bp, Cannabis sativa
tttttttaaagaaaagtaagtattgaggggacaaaaattatcaatttaggaccaataaagaccttggtttttaatttagtctacaaattccttgataaattagaagcgtaaatgccaagtcccttggcctgctctatcaatttttctcggaagagaatccagtgttttttgggattacttttaaagcaagcaatgtgtataaagcattttcaaatgtgatatatgttatacctctttttcattatatattattcaattacttcaattattctcatgggaaaaaagagtttagaaaatatttagttactgtttatctgttgagctaaatagacacatacattatttgtagaatattaacaaaaactatcatattaataatgatcattttgtaagagtactggtcaaatatgaaaattaacatttgtattaaatattgcaaaaaaaaaattctaaaatcactaacgagagaaggttattacctctaaaatgagtaagaatcatagttttgtaacaattattcacttcctgcacagaacttctcaaatgatcatgtcaaacaactcatttattatttgtttgggtttttttttttttttttttttttgaaaaaaatggaac

SEQ ID NO: 124324 - DNA, 2382 bp, Cannabis sativa
acttacaagatgtaaatacaaattttggcttaagtgtgtgaaaagtattttgttagattttaaacttgtgagctccttaaaccacttgaaagtgtttggtataggtaataaatgttctactaactcttaattttgagagaaaataagatttatatagtgtaggagagaaaactggcattttttagccattggacacaaaaatcgagatatgcccctgggaatacggttcaccattctccaaatagtaaactggtttctaggagatatggttcagcatttggaaaatggttaattgaaaattaatagagataaaaatttattttttcagcactaaaatgcttataactagcacgtttatccaatttgaaaaattccaattgcattctcttagtttaatgacatgtgatcttaaaagtcaatttagaaattttcagacattatttttgtgaaataacttgtcgcacaagtaaatgaactgaatttcatacttataaaatttaagtgtggacttgtaaatcattgtacaagactaggaaatataaataaactttcatgaaatcttatcttgagtttctcgagtcttgaagtccatttttggtcactttcaagaaataaattgagacaatatattagattagccccctcccttaatgtgtgcaagggttaaaaatataccttttgatttaccttgcatgattttgtaaattatcccttaatgtattacttaaattaaatatcaagttaatagtccaaaaattgaggttttagccaataaaaaaaataaccaatcaatcttagaaattctcccctttttgattcataaaaaaggttggctaaataaatagaaaaataaaagaaatacataacataccatctattaaaaaaatagccatataacatagacattcaagtgcaaataaccataaatcataaacatttaaatccaaacaaacataaaagaatcaagttcaaacatccaaaagaaaaaacaaactaacacatgaataggcaaagacgctaaatcttgcaaacatacactaaaaacaagaaaaaaaaataaacatgaaaatgatgtgaacacattatgcaagggggctaagttggtggaggtccaaagcggtccatataagctctctattacgccatctcctcttgagtatcggtaaacccatgctccatgtcactcctcatagtgaccatgtaacctctcaaggtggttatctcattttagagggtagtgaagtgagtgttcatttcacctctcaagtttgtgaaattggtagtaatggagatgtggagacgagccaaagcatcctcaatgttggattggggaaattaagacattggaagaacttgaacttgttcttcctcttcaccttgagcttgggcttctcgttctccctcttcactttcacttgaggccaattgtacttcctcttgggcgtgttgatcttgtttggtaaaaaatctacttcttctccacttcatataaacttgtagcgcatagacttaaatgtgatctcgccgagattgttagaatccttggttctataaccttggtttcatattcggtttgaatttcacgggaaaagccaccgaaatttgtcattgccacgggaaaagtcaccagaataatcattattgctggaaaagtcattggagttctcttcaccactggaaaattcgtcagagttattttcattaccggagttagacgtcggagttggacattggaatataacacaaagaaaccagttacgtttatcaactagttaaaaatctgagacaaagaaactagttccgtaactggttccgtaaagtaactaaattaaaaattaatacaaaaaaataagttatctaaaataacaaaaccaaaatttgatacttaaaaccaacttacgttaaaaaaaaattaataattaaacacgaaaatcaattacttaacacaataaactaaaaaatttaaataaaaaataagacacctaaataataaaaaataaattaaaataaaaaaacgaaactaactaatataacacaaaaaatttaattatgtaaagcaaccaaattacaaattaacatataaaattggtttaatgaaaccaattcctaaagtaactaaattaagaaataactcataaatattaaaaactgatttagaaaaaatatataaaaatataaaatataaaaaaatatatcatataaaatttaattaaaaaagctgtcatattttggtaagacacaacaaaaaaaaaaaaacaaagaattccatattttgtggaatttgaacttatacttacactcaaaattgaaggcccaaatgatttatgggtgaattgattttggggttaatttgaaaaatacaacttttattaatcaattaat

SEQ ID NO: 124325 - DNA, 609 bp, Cannabis sativa
attaaattaaggattgacaaaacatatgtcagccttgggataaacttagtaaaatatatgagaatagatactctcatgcatgagcagaataaaagtggcaacaaccgccttgcattattcataatgtggagatcatctcgcatcattaatataaatagaggggttcagcgagatagagtgcatctaacacatagcattttttcctattaagatagataagaaggagagctcgtgtttgacgagatgcaaccttcctagtcagcataaccgtctaaaggataaagataaggagcggttaggtagttattagatattatcccatgtgtgaataaataaaacgtgaggaatgtccatgtttcattagcatttatagatgaatcagtcccaaataaaataaaggagttcaacctctagctcctccaaacttctaaggcaaaacctaacctaaaatttattgatttttctacggtttttgttagttttcagtggttgtttgtagttgaacatgttgacaaatgttcattggtaaggtttggctcaggattggatgagttatgtgatttccaaactcggacagggagatttaagaccatccgatttaggcagttt

SEQ ID NO: 124326 - DNA, 1746 bp, Cannabis sativa
  modified_base (1100)..(1103): a, c, t, g, unknown or other
gaagaagaaaggctggcctcaatactggggggcattgagccacttggagagctgtggaaggacatcaaaaggctgattgtggggtcgatgtctgaggttcattaagctcaaagaagctgttcgaagtgtggatattgttggacaaaagaaaagccagcaatgtgctacctcgacgggaacattcattcagaatccacaataccctaaaaactcaaattcaaatgggaagtggtctaacaacggcaacaggcagggtaatggaaagaagggcgaattcactggcaatgccgaacaacaccccaaggaaaatgcctcaaaatttacagccttctcattgctaacagacgacctaaagacaatctacgcgacaactcagtatatggtaccatacaagaaaccatctcccatgaaaaaggatgtaagtaagagagatacatccaagttctgtcgttttcacgtggactacaaccataacacaaacgaatgtaataatttgaagtaggaaattaagtttttcattagaaagaataacccacacttacagaagtatgtcaatgccgaccagaaccaaaggaccgcccaagcagataataatcagaaccaattgatgcctccaccagtggatgagcatttacaggtcattattgtgggtccacatcttgctggagactcaagcaaagctctagaaaagtatgcccaagccttacagtacgaacaaactgaaatagtcttggtcgtggaagagagaaaaccaaaaataccacgggtaggggagctaacaataacattcactgaagcaaatgctagccacgttcatttcccgcacaatgatcccctggtcttagaagtgcaaattgtaaataagacagtggcacggactatgataaataatggagcttcctcaaacattctgtttaagacaacttatgagaagatgggactccagcttaaagacttgatcccctgcacctaactcgtatatggtttctccagccagagcgttgcgtctctgggacaaatctgcctaccccgcactgttggaaaagctccgaggagcattactgtgatggcataattcttgataattgatgttccatcannnnttaatgtcatgttaggccgaccgggcctatatgacataaaagttattacatcagttttctacctgtgtgtcaagttctgaacaaagaatggggtgggatgtctcagaggaaaccagagaattgcacggtaatgctacaaccttgctctaactaaggtcaagaaataaaatacctccggccagagttcaaaaaaagggaagagcattgcccaataagaagtcgcccaaggcggggacgaagacatggaaccccgacttggggaaacaaacacaaaagttgggctaattgaagaactggaagaagtggaaattgacccaaatatcccgaccaggaaacttaaaatcggtaagggtttgttgctcgaaataaaattaactctcataaaatttttgagagcaaacctatacattcttgcctggtcacatgaggatatggttggtattaatcccactgtgatgtctcacaccctaaatattgacccaaacttttgtcacgtctagcgaaagagaagactactggacaaataacgggcgcaagcactgaaagaagaggtagagagattgcgcgaaaataagtttatcattgaagctttctacccgccttgggtggctaacctcgtactagtacccaagccgaacaaaaa

SEQ ID NO: 124327 - DNA, 791 bp, Cannabis sativa
tttttttttttttggattagatagtctttagaggttttgtttgattttttatttctcttaaatttaggataagattcccacaatattgtcgtaaattgctcaataacaaattgggttagaataatttccatagtaatattttaaactaaaatacaattattgtattttacactactagaaaaaatagctttctttttgatttttaagctggtttatctttagttaaaaaaaattcactaccgaagacatttgaggcgaagatgtaagtttcaaaaataccaaagacatatgggggatctatgtcttcgtttacttcaaaaaaccgaacacataggccacttgtgtcttcgattattatgaaataaccgaaaacataggctatcgttaacaccgtcaccaccgagccccaaacccaggaaaccctaaaataaaaatccttaaagaatgttatttttcaactactaccgtcaaaactactatactttcgagcaccgccattgattttctagcaaccgccatagattatcctaccaccacggtgatacccaaatcttatatcatacacactaaaaaaatatcatatatgctaaaaagcatatattatagtgatgtatacctcaattgaagttagaagacaacatcaaaagtctcaaaatctccaccattagctgaccgtcattctccaaaaatcctaaaaagttgtcagcataaactcttagacctaacttcatattctaaatacattattttttttttatagtgtatattaggtgtaacaccctaactacctt

SEQ ID NO: 124328 - DNA, 1166 bp, Cannabis sativa
  modified_base (29)..(39): a, c, t, g, unknown or other
aactcatgacctctccctttttcccatcnnnnnnnnnnnactaagctagccttagtggcttagcatgcttaaatgttaaacattgtgttttgatataccactcaatcaaaaatatagtatcaaaaatacccatacctttcaaaaaaaaacctctctctaactctttcactctctaattctctcactgtaactaagtctcgctgtctccaccttgagctcaaccaccctaaaaccccaaaatttcccatcgatgactggagttctcaacccatcgctcgttttttgtattttttttctagttttcacgatgtcgctaaacatcgctaaatcgctagttgttgttaaatcacaacattgctaaaacacattgataaatgtcgttaaattcatttaaattttcacgataattagcgatgtttagcaacgtgctttgcattttttagtctcaaatcgtaaatacattgctaaaattatctacgcaaaacattattaaacatcgctaatcatcactaaacttcatccataatctcagatataatctatcattgcaaatacatcgctaaatattacaaaaatatcgtaaaaaaattgaaaaacaaaaaaaaaacatagaaaattcaaaattcaattttcggataaaaaatcaacgaaatacaaaaaccaatgtatagatatgttagagaaagaaaatgagaggtgtgtggtgataagcggtgtgctgtggtgagtttaggtgatcttttatgggagagaaaatagaaaatgagaggaatggaaagaacgggaattgaaataaataagaaaagtatttttcaacttaggtagaataataatgtatttttattatgcatttaataagtaaattaatttagattcatacattacatttaagcataataacttaaatttctcttcatattagataaatatcataatgtatactagtactatagaatatcatataagtcggacacatattccaatccatatatataatcatgttttttttaataatatataatcatgttgttaaagttggtgatggtgctctaatatttttcttttaccctatttattcttttcattttccttttttttttattaactttattctttaatttaaccagaaaaactattagttacattgaaaaacaaaaaaaaaaaaa

SEQ ID NO: 124329 - DNA, 1062 bp, Cannabis sativa
tgatgatgatgatgatgattaataaatggttgagtaatagttgagttggccaaaacataaagagagattgtgacacacatgattattttttttgtggattagatttttagttaaggaagattctgttcttttgtgttattatttattatgattggtatatgcattctgaccaaaacaaagctatataagaaaaaaccacgagttgtgtggtgtagtagtaaggaaatttttattggcatcctttctttatttgagttaagggttcaaatcccgtcacagctcctcattttagcggtaccatctttaattggatgggaatcctcggaggtgcaattattgataacccaattaagatagcatgaagtatagttagcacgtagtctccagaattatcaaaacactaaaaatataggaaaatgatctgcaccacgtgattttttgttctttccgagctatataaaaagtaaaaaaatataaaaaagaaagggcatataattatgctaaattccttttttctaattccacgtgttaaaagagaaagcaaaaccaatgagaggatatgaatgaacgtagtagtagagtgttgtagtagtaatattaatactttagagatagattaagtctttatcaaagacttttttaaatttgataaacaggacaattgagttgatgttcccataatgaagtgagagagtttttatttatttatttatttatttttacataataatggtcaaagttattataagaagtaacatcattactcatgacatcccatgctttgatatatttgattggtcaagtatgaatgctaggctggcacatactactatttaccattaaattttatcccatattttccacctaaaaactaaaaagccaagaaaaattttatggtgtatgtttgatttcagatagttttaatcttaattttgttgtatatacaatgtaattgtttaaaacatattgtaaaatttttgaaaaattttaaaaaatttgagcaaaaactaaggttcaaacaatctaatgcacacatgtctcttttattttatacgtatgtga

SEQ ID NO: 124330 - DNA, 1335 bp, Cannabis sativa
  modified_base (27)..(33): a, c, t, g, unknown or other
aaaatagattacattgaaatggagttnnnnnnngggcataaaacccaacatctactgtgtaggaaagggtaaatctattagtaattagccatgattgcgggagcttggtgatggattgtacatgttccggccatactagaccaagcgtgttgggtctacctgtggatgcattttgtattctcaaattttgtcgcttaggtcggcatgtaaaataacttgtaatattttgcaaaaaagttttatgggatctcaaacatgttgtctttttggattgatagtaatgtttatattattacaagttatgtttattttattctattgtaatcaaagtttaaaattttccgctcttattttctagtaatcccaatttagtgggattaggttataatactggttgtcgtagcgtggctaattgttagggtgttacattaactttctcttttgaacgtcaattagtgctttccctgttgccaagaagggtcttcccaatatgataggaacattgtttccttcttccatgtcaaagactataaaatcagcaagaaatataaatttttccaccttaacaaggacatcttcgattactcctcttggatgagctaatgaacgatcaactagttgtagtattacagttgttggctttgcctctctaagttgcagcctcttaagtactgacaagggtttaaggttgagactagcccccagatcacacaatgcatgaatatttttgagcctcccaatagtgcaaggtatggtaaaactcccagtatctttcaatttaggacggtgtttcttctgaaggattgcactacactcctctgttaaagctactatctcaaattcttccatctttctcttctttgaaggaatctccttcatgaatttgacgtagcttggcatttattccaaggcctccgcaatgggaatgttaatatgcagctttttaaatacttcaagaaatttacgtaactgcttatccatattattcttgtgcagcctctaaagatagagaattttgatgtgatgatcaatactaataggaggggaagtttctttttgttgaagaccgtcagtagtcttcttcttttcttgtgtaggtgtcagttcttattgatttttatcttcatcctctgacttgtcttggcttgactcggcataattcttaccacttctcaaggtaattgccttacagttctcttttggatagacttcagtagtgctagacaagttaccttgagtcatgttagcattttgagaagccaactgtcccatttgagtttccaagactttgatggaagatttaatctctatcatgaattgtagtagcatatctat

SEQ ID NO: 124331 - DNA, 1238 bp, Cannabis sativa
ggggtattttggggtttaggtaaaaatagtcctagtttttcaagagttataagtattagtttaaataattaatttgggtataaaaaatgcatagaaattcaaatttccctctttaaatttgattcagcctcaaacctgaaccaaagtaattaacgaaagggtgttgaggcgtaccatcaacctagctacgtagctgtgtttcaactttaaaggcataaattattgaattaagttgataataacattttaaataataaacagcttctcctatatttatcactgggggacagacagtataagcaagtgttaattagctatcaaatgctgaatattgtaaccaagcattaattatatataaaaaaaaaatgcacattaattaattaattaattaattaattaaatattttgtttttcagtttatcttaattagtaggaatttaaccatcaaatgtctattaatctcaattctatagtaacaattcattttcttctaatgtgtatatatagcgtatatcatacttctgtgactagacagaagaacttacacatttgtggtacgttgtacactacttattcgagagaggggaatttataaatatggaaaaaaaatgttagttgataattttatgggcataaaatttcatattgatacattatgtgcttagtacacatattatattacaataaattgaatttatagaaaatttacaacaaatgtgcataatcaagtcaaacttaaagataaatcaaattttaattagtaatgataatattaacaaaatgatgaactaagaatcggaaataaaacagggtagaacagaataattaaaaccatataaacaaataaagaacgaaaacaacaaaaacaataccaagatatatattggtttaagtcctataaatcgatgtgatctatgactctactccactcctggaacactaccaaaatatctttattgattgagcaagaacaaaggtacattacagttattgatgctaaaaagtggtcaacatcagctcgttagattgacgagaatgaataggttgtttatgtaattaataagagagacacagaaaatttataatagttcacccttatgtcgtgatagtaatgggactacgtctacttcaagtttttatttctcacgagatggtgagtatagcaatagactaagtataagaaactccaaactctaaagagagaagctctgacattatgggtagttttctgaatgtga

SEQ ID NO: 124332 - DNA, 1088 bp, Cannabis sativa
  modified_base (1026)..(1051): a, c, t, g, unknown or other
aaaataaatttccaacagatgcaatatatcaacaatagagaacaactagtgttttaaaagaaaactataaaagtgtgtgagtttccataccttttggacagaagagcaaccaaacaaagcatgtactagggtctcctcatcacagtggcagcgacaacaaactgggttggaaatgattcgccggtgttgaagttttgatcttgttgggagaacatcattgtaagcccgccaagcaaagtgtttgatctttggtggaatagggatgagccaaaaggatttccaccatttttgttgctctaaggagtttaaagtagaaggttcattttgtatagctagggtataagcatggtgatatccataaattattgtttagtgtccaggagatgtaaaaggccagaaaaaggaatcaggtgagtgtatattagtgagagggatggagatatggcctgaaaaatatcattcaggaatagtgtatgaagcttgatgacatcccaagcacaattggaagcaattaaagtagatacagtgttgttgcaatgggatgaattactaaggtatgcaagcttaccacacctcggaacctaggtataaattgaaatggatgtaccacctccaacatttttcctagttctagagatgagaagctccttaccccaacagatgctagtccaaaccagcgagggtcgattccccttagcaacatctagaaaagtagaatggggaaatagcgagctttgagtagataggccaccaaagagtgaggagattgaataaggcactaggcttgtttggcaagcatgacttggttgaaggattttagaaagccaaggccaccatggaacttggattcgcaaagagaagaccaagctactcaatgaattttctatttttggttggttcaaccccaccaaaaattagccatcatggactcaagtttagagtgaaagcgaaagggaagcttgaagcaagacatggcataagatgggattgcctgaactaacgatttgagtgttggaaattattttnnnnnnnnnnnnnnnnnnnnnnnnnntatgttgattaacaccctaaacatgaactttctaaaa

SEQ ID NO: 124333 - DNA, 1191 bp, Cannabis sativa
  modified_base (1135)..(1136): a, c, t, g, unknown or other
caattattcataattatctaattagagtttttctaattcatttcttaattctagggtttacacgcatactgtggtacatgtcagacaagttaacacatagtagcatatagtaatagagccacatagctccaaagtaaaaaaaaaaagaaggcatacatctgtgacattcatggtgcacaacaaaggaaaaacaagtgtgcaagaaaccattacaatcgtcccccacgatttcatctcaaggtaatacaacctcctctcaaagacaatgaaagactcatcctaacaatcaatcaatagtcattgcctaaacgctccctacactgaccctcaactcaaaaaaaactcgaagggggtcacggtcgtattttagtctcgaaggggaataacggttgtattatgatctcgaaggggggtcatggtcgaatttttgtctcaaaggggggtcacagtcgtattatggtcttgaaaggggtcatagttgtagtatggtctcgaagggggtcacgattgtggtccggcctcaggggtgacatcccgcctaccacatggtggtcttggggtggggcaccaacaaatcccaatctcggggtgcctcgagattgctctattttggagcatacctcgtcgagccaaaacgaccttggttctacctcatcaggcaaaaacgacctttgttctaagtgacaaagtggcctgaagcaacaacgacaattacacacttcagtctaagaaaagggggcatgcttcaagcttggggtgtaccccgaccctaaaccaccatgggttgactttggagcaatgtaccccgacccccatatggtggtcttgaggtaacacccctaacctccaatctcggccacggttcaagacttcaaaaaaaaaagcttacttggggtgtaccctgaaccaccaatgtcggggtaacaccctaatgatggggtaatcatggctttatgggagttgcttggtcacagaatgtgtgtgcgtagcatggggtgtttgtgagctttgggcagtctcggggcatggtaagtcaaaagggtcataccctgaccccaaactcaaggcctcatattaaggccaaagcttagtctcggtgtgtggggatgcgacactattgggttttatgccctanntaaaactctttacaatctgattatttatcaatataagaaatttgaagtgatttat

SEQ ID NO: 124334 - DNA, 2856 bp, Cannabis sativa
taaaaggaataagatgctctcattctcctccaacctatctaaacctagttttcattctttgtcggacaactagtaaatgagagctccttctatagtgattttgtattccttctattgttcttcataaattttgagcctttagtgatagagtaccatgcccactcatagcaagttaagtactcaatcatagtgtataagattgtggttaaccaaactgaaggagagaagatctaggttcagatcttgataattctctactacagaaaggaattaagggctagagatctaaatggaatgagttattattattctgtgccatcaatgtaaggttttctaaactgtatatgtgtttatttcattgtatttgacaattcatatttagggtgctagattatagataataatcaaacatacatgttaataaatctagatcctgataaaataacttccaacattaggcccaaagcagaaaatatcatacttggagtggagatggatggttttcgaaaatccttaacaagttgtattagagccagattccaatattagccatgtgaatgaatcctttgaatcctcttaaggtgatgagcctctgtgtaaccttgcgattcaagatctgtatggtgccttgtattgaaagtttaattgataagtcaggtggcgtgtcttgttggtgattacagcagtataagatggagatcttgtttggtgccttatgttgaaagtcttcttgacaatgaaggttaggcagcgtgttccatttggtgatagcggcggtgcaagatggaaggttgtttgaggggagacaaggtggtcctttatttgaggggagaattattgggtgtgcaataaaagtcccacattggctagaatgggaaggatcatgggtatataaggatggacattgcctttattagtatgaggaaggctcccaggaacaaaactgtgagggcttatgcccaaaactgacaatatcatacctaaagtggagatagatggtgtctaaagatccttgacaagaaacgatcttccattcgtccactctctaccaactagtttactttcctctaatgcattggaacacatgcctttcatggatcaaaaatgtggaacatcagtatttataacaatgatttgtcaggtggcttcattagttatccaatgcactcaaagggctatcacttttactgtcttactcgcactcaaagggctatgacttttttgaatttgatgttgctgaaaatattcgttcaacatctcttgaaacaggagagtcatctaagagaaattttattcctattctcttttcaacaaatgataataataacaatcttattcctactctagagataatgtctccattgctaatgaacatatttctcttgatatcaaagattacagggtcctattattgatgaaagacctattattaatgggggcctattattgaaaaaggtcttgttgttgatgagggtcatgttattggaaaaattccagttgtggaagatttcattcaaaataatgattaacaaataaaatctattcttgaagtgcctcctctaagaagatctcaaagacaagaagttaacaaggtatgttgatgattttgtttaccttgaaaaaagagaatatgataatggtcattttgtggatcctgtcatttatagtgaagcagttaatagtccacaatcttcaaaatgaatagaagttatgaatgatgagattgagtcaatgaagaaaaatgatgtacgagagctagatctattacctgatgattttaaaccaacaggttgtaagtagatgttaaaaaccaaaaaggataataagggacaaattgaaaggtataagacacgtttagtggtaaaaaaggctttactcaaagagaatgtattaattacaatgatactttcttgcttgtttcaactaaagattcattcagcattattatgactttagcttcatattttgatttagagctgcatcaaatggacgtcaaaactacatttttaaatggagaattgagagagcaagtctatatgtctcaacttgaaggtttcaagaaaaataaaatgacaatttggtgtgcaaattgaaacaatccatttatagtctcaaacagacatcttgctaatggtacttgaagtttgataaggttgtgataacgtttggttttataaagaacaagtttgaagtcattatatttttcttattctttatgtggatgatattttacttgccaatattgatttttcattactaaatgttatctcaaaaatttccctggtgatgtggcatgaaataatgtgagacatggagaggataaagggtgttaagaagatatgtgatgctcaaatgctctactcaggaggtattaagtaaggaatgcacagaataaatctgtccaatatcatgcgtgtgttggacggagcatgccataccccttgccgagcaactaaagtataattaagtaggaggtatatccgactagtgaaccttgcaagaggaaatgtctagattcatctcttcaactgaatcccccatgaatagataaatcagcttggctacaatggtgtaattgcgagaatcaaggaattcagaggaattcaagggattgacgtaatcaactttaattatttattttgtaattaaatgtaatatgtttttatgtaattttccctataaatagtggatcaaaatcattattagggggaaggaatttgaatctttcaagagagctattatgctatcaaatttactataatatttagactgaatgttaaagttgcaggaaagatacttattcggtctaaggaatgttctatatatttttggcattgttccaacatttattaacta

SEQ ID NO: 124335 - DNA, 2134 bp, Cannabis sativa
  modified_base (2101)..(2109): a, c, t, g, unknown or other
ttgtaaatattataattaaatgatttaactgttaaaataattatagtagaggatttatataaaagaattatttataattattaattgctaaaagaggtattgttaaatattcaattaattattttaagaaaataattaattaattctaaaaaaaaaagttttacctattagtaatctgctattataggtaaaagaaaaatgtaatcattgagtagtcactcataaaatacattgtatataaagtataatatgtaaatgaaaggaagatatgaataattcatagatcaaaaaaagataatttttatggtagaaagacttaaaagtctcgtctaaaagagttagaagggtgcaaatagccaacattcatcttatatcagttaaaataaaaatatttaaaataaataatatttaattttttatttctattttttattttgttttaaaaaatattttgtatttattacatatttttagtttcataactttatgtcaacaaaccaaatgaacttagtatttattatgatttttttacatgtaatagaataaagtatttttaaattatttttttattaaatacatttaaattcatatcttgggaaaaaaatatagatataaaaaaaatactattttgaattttatattttacaaaaaatataaattggaccatctattttgttaaataataattcacacactgtattttttaaaataatacaaaattgacctgaactgaatattcatgatttttttttattataaccaacctaaatagtatttaccaaaacataatttaacatgttcataacagtctggtcataacatgttctaggtcaagttattattaagttttcatttgataaaaattgagctcaggttcgatttggtaccattttaaaaaaaaatacatggtatgaattatcatttaacaaaacataaagtccagtcggtagcttttgcaaaatagatggtccaaaaataatatttatcgtataaaaatgaaaataaaattgtataacataattttgatatatttgtgatcctaaaaaataatattataaaattattaatattataattagaatcttaactattcacagtattttaaaattaataatttaccaaatattcaacataactttttttcacaactcatatacaactggtcttccagttacagctgtttttcctcacaatggtgtccaacaccaacatgaggcaaggtatgctattgagtagtgtcttacgagtattttataataattattagattataatatgtgatatttgatatcaaattacacaaatagcatataacacttgaagtgatgtcaaataccaaagatagattgcccatagcaattcttttttattttttcagagcattacaattagactataatgataccagcactactaagatgtgatattttatgagagtgattagcaaatttttatagtagttattgaatgaatgtatataagagctgatattaaattataccaacagttgttaacgcaaatttttgttaactaaatatataagtcttttacgtaataaagatataccagaattaataataataaatgaacactagatatttttacgtagttttgtagttaaaatctgcatcctctacgagtctttattagggatgatgactttaatacagagtacaattctctaataaatgtaaattatagtttttttctctcaattttgtcgtccctttttttctggattattttcctatttatatgtgtatagaatgacagtgtttttcattggggtctaatcatttcaatttctcatgaaacgtggacattcttcacgttttatttttatgcacatgggattatattaaataactactcaaccgcttttttgtctttatccttaaaaagttatactgactatgaaggttttttctcgcttaatgtgagttgtccttcttcactgtctttataggaaaaaatgttaagtataaatatgattcctctcgcaatgttctttgtattgtaataatattagtgaggtggttactctgttgcgtaaatggtgagatggatgaatgcagttatttctattgggttttatgccctnnnnnnnnntccatttcaatgtaatccattttat

SEQ ID NO: 124336 - DNA, 2020 bp, Cannabis sativa
ctgtcccagttcccatcatgcacattttataattataatcatttttttataattcatttcagaaaaatatatatttttcataattataatattgatatagatttcagcaaaaaaaaaaatgaaaagtataaattgacactttatttataaaaatactttcataaagtatggacaacttttatactttttatgtaattttaattactaaaatacttcttgcactatcacttacacaatcagacaaatgttgttgggtggttgaccgaaggttgcattagacgaaggtttcaatcaaataaaagttgttgcgtggttgaccaaaggttgcatcagacgaaggttcttgggtgattgactgaaggtagcatcagacgaaggtttcaatcctaggaagcatagatcgtgggttgttgttgaaattgtaatgcaacacgtatatttattgcgagccaactaacgtgtaacttaattgcaactaaaaatgtaaaatgtgaatgtgtatatgtaagaaactatttgtcagtatatttttttttatcactgattgataattattgtaccttaatagtaatatgtagagaaataactgttagcaaaatatttatgcaactgttatgaaacattaaaaatcataacattgtttctacgcacgtaactctatctacatgtttcttcgtgatttaatatgaacaaattcaccattaaaaatttggaaaataattaaaatacatcaggataaatattttattatagtattgatgtaatttttttttgaattatacttgagtttgattgtataacttcaattcaactttttgaaatttgcattttttggatttgaaaattgaaatcaagatattagttttatgcgaattaaattggatttctagttgaattttagttttgtagtaatttttttgtattttttttcatgaattcgaaacaactcctgttttgattgattcttgtcgtcttcttagatgaagtcgccgaaattaatggtggttctctttctgattggatttcgtttcaattgtgttggattgctgcgtggtttcccaaaagttgcatcagacgaagatttcaatttcaggaaacatggatcctggattgaaaggtgtgtaagagatatttgtataattttttttttatttggattatatatttttttatttggccaattagaaatatttttgtaatattattattttttttgattaaaattgaaaaaaaaaaaaaaaaccccaacaattgatatatacgatggtatattttgtatttatttatgaatcactatattgcataaattttcaaatcaggaaaaaaattatattgtctaaattaaattaaattcctttttaaaaaattaataaaacatacaaataaaagaaagagacatgaaatcgatttgaaaaaaaagtgtttttgtagagattcaatatcaaaaattatctggtttcaaaaaaatatatcaaaaattatctcactatacacaaagaacaaaaatatggtatttgcataatatcctagtgttattacacttcttcttttttttaataaaaagaaaaaacttctaagctcaaattactttaactagaatcaaaataataataataataaatgaattttgttgaaacaaccaatgttatcctattttgcattcagtcatataaaaaaaatactcttcttatggagcattaaaatatttagtactactataaaatgatgttgtattttttttatttttttttgaaagagtgatatgaatcacatgatgaaaattttcgaagagaaaatttcactcaatatgttaattgtttagctaatgatatataaagtcagaatatgagtcactacaaacaaagtgacttatataagacaaagttatcttagaaatttagacaaaaaaactagagatcacttttaggcggcatccaaaataaccggtttgagttatttcgtgttatttatttttattcattataacactgttatataatcggttctattttaattataa

SEQ ID NO: 124337 - DNA, 1658 bp, Cannabis sativa
  modified_base (41)..(49): a, c, t, g, unknown or other
  modified_base (1587)..(1588): a, c, t, g, unknown or other
  modified_base (1619)..(1620): a, c, t, g, unknown or other
caagtcaatacaaaacataatattatattaaataatactannnnnnnnnaatacaatacaatacgacataccaaataagcccttaatcatattattaacactagtcatttagattgaatattaaaataaagaatgagactccataaacttaaaagaagacatttttttttgaaacaactgaagctgaaccaaaaaagaaatactaaaattatctgtaattgttctttttcttttttctctttataaactaaaaatcataaggacaacgtgttgaattgaaagttagataaagaagaatatgattcttttgtgggtttacaaatttcaaaaatctcaattttcaaatttaatcgatctggattttttatttttatttttattttttattttttcaattttgttttttttaatctaaatctcaatcaacctcactttaaacaaatttttgttagtcaactatttgtaatgtcttaattaattattattattactatttatacctaaaagtaaggaagaaacaaccttaacaatggacatgccaattttatcatttatatatatgacttaaaactacatattaattgttattattatatatatggataatatatagatatattatttatacatctttttattctattttttcccctttattttttttgaataaggatgaattcattaaaaaataacaggcctcagccttaacaatgtcacacaagaaagaaggagcatttagctcattatacgtacaacctaacgataaataagactccctagcaacacagtgggaagtcttatttgcagatcgattaacaaaagaaacaaagacattattcaaactagataaaataatacgacagtcctccaccaataatccaaattgggatggcatttgaattgagctattaattgcttgaaccacaactaaagcatcaaactagacaaccaccttaccccaacctttacgctttatccaactcaaagcctccttgatgccaatgacctctgctatttcaggaggaacacagccccacctactctcagaaatagcttcaaggagcttaccatgattgttacgagcaacacaatcgaacccaaatttttggtgagcctcaaaagtagcaccattgacattcaccttgaccgtaaaagtatcaggtttacgccaacaattactatttgaaatgtctcctgtagtatatagagcattaggagactcaaacttagtaattttccattggccaaggacatgttttaccgactttactacctccaaagcagaccgagatttgttctgctattgcacttcatttcagattttccaaatgctccaacaaaccatggcaacttcagctaccacatcctcacggcagccatcaaaaagatcaaagaaccaactgccaaactcgatctccacaccagcaaccggctgtttgacagcagaaaaagcccagcaagaccgagagaaagagcaatccaaaagcacatggaatattgtctcaacatgcatattacacaaagggcacaagagatcaacattgacatgtttagattgtagttgtacctgttgggttttgtgccctnnataaaacctatttcaatataattagatttanntattaataaagataagaaataatattttatgttgcatg

SEQ ID NO: 124338 - DNA, 1287 bp, Cannabis sativa
  modified_base (1081)..(1109): a, c, t, g, unknown or other
cctctcaaaaaaattctttctcacatatattgtgtatttatgtggttaatttttattttagttgaaactaaaaaaaaaaaaaaccctcttatttcggttggggcaggttaactcgaccaaaccgcccaaaccgtcggtcgggttaagattttttttttttttaattgggtaggctgtatgcataattttacaaaccgaactttacgttgagttagaaaatatgtagtataaaccgactaaaccgaccgatgtacagccctagaaaataaagattgaattttcaaaatgaagagagtgttaaagttttattcgctaattaaaactttaatactttgtaataattttatcatcaataaaaaaaatataaatttattttgacttggtaaatcacattgtgtctaattttatgttatatatataatattaaatttgaacatataaataataataattgctgtaacgtaaatcacaataaaaaatatttgtgattatataattaaacatttatttaaagtcctaagtttagtcactgcacttgatttacactaagtagctaatccacgacaagtttatacaagcaagtattatgttctttcgagaacataaatgtagtaaatatgatcggatgtatttattacatgagactaataaaccttgacttattattagatgaaagaatatatcgttattatctaatttagttatatcacaataattgatcacaacccaactcaaccttacactatgtttggtagtagggggagatgggtggatggagaggggtggagagagagtaatagaaggagagactaaatcacttattttacaagagggagacattttctcttcaaaccttcaaaatttattccctctaaatttagaaggattgtaaaaaagacaaaatacattttgtaacatacaatatgggtttagacacaaaaaacacaatgctataaattggcacgacatgacaccgaaaatatgtgcttaaacacgacacaacacaacacaacacgacaaagctcgaaagacacgacacgttaaaaaaccttaaaatttgatgataataataataataatnnnnnnnnnnnnnnnnnnnnnnnnnnnnntaataataataataataatgttgtcacaatttttcgttagctaatctatatcataagaaatagaggatttctttttgaggaaaagcgtctatatcatagattcaaataaaattagacctctcggtcgttacacaaaatattgttaggtacaactgaaaccgagatagacccaaatacc

SEQ ID NO: 124339 - DNA, 2087 bp, Cannabis sativa
  modified_base (1312)..(1325): a, c, t, g, unknown or other
agagagagagagagagagatggcgagggtggcggagatggtcctgtgctccatgatggtcgatgatgagctccaatgccacctgcaaaaaaattagaaagagagagttagagtttgagaggttcatgttttgggttgagataagaagaaaggaagaagatgaaggtgatgatgggtgaagagagggaataaggttagagagagagatagatgagaggggcagctgagagaaaattagggctagcagttagatttatattttagggttaggtttttataaatgggctaaagcccataactgaattttttaaatgtctttttgcttcgattgtgcaccgacgctaatagtgtatataatgactttttacatcggttgtagaccgacgctaatagtgtatataattttttttttatatttcatcttttgcttcagttttttttagcgtcgaatagataatcgatgctaattaataattatttacgttggtggataactaaagcaaaaaagtgtgggttgctttttgcgtcggtcaacaagtttgactagacgcgttgaccgacgtaaaaacccctttttgtaatagtgtaagtgatataaaaatattacttaggaatcttaaagtacatcccttggacgtttctacacttagccaatgtccaggttgatatcatatgtcaacatgggcattgggatgttaacttgggcactgggttatgaactgccttcagtaaaataaacataactcactcaattttcatctgattgacacaattcaacttgcatttcaaagctaattcaatgctttatcaagtcatgtctcacactctagacgtaattccaaatctatcatcatcaaaattcactcccaatagagttataaaaataagttccgagttacacgcagcaggacccgccaagctccaaaaaatgaccatcaccaccaagagctaatttcaccattagatgatcgtcaacggtcaaaaacatcttatttatattcttcccctatttttctgggtatccttcacctataaaaggagagctccttagctcattttttacattcagaaaactaccaacacggttagagcttgtcactctagactttctctctaaaatttgaagcttctaacacttagtctattgctgtaattaccatctcgtgagatataaaaacacgaagtagacgtagcctcattactataaaaaaaaaaaactatctttagtggcaaccttttagtcacaatataatttcacaacaaaatgttacttgtgactaaagcatattatttagatacaaattgtcactaannnnnnnnnnnnnncaataagtattgtgactaaaaacacatttagtcacaacaaatcatgatttttgtgagtaatacatttagccacgaactttttagtcacaacattgaaattgtgtttcataattagtcacaattttttcagtattagtcacaaattttgttgtgactaaaagtaaaaaattttgtagtgatatatcattatataggggagaacttatataaatttgttttgtctcccttaaaaatacataactacttattcattctcgccaatctagcgagcgaatgtggcttataatagcctagtttagatttctgaatcaacatatcttttttcaacaataattacatatagtcatgcaaaaagtaattataattataaaaattgtataaaaatattactattaatttaattgataaatacatatttatcattgttaatattatcaaattgtcaaacttttaatgtgtcatgcttccaagctaattgtttacccaaattttaacgatgatgacgtgtcaagagtagcaacacatgcacaaaaatcgagactaaattaatgaagaatatgtaaagtcatgaccattaatcatgaagggtggtctgaccgttagaacgaaagtcagacagtacccttacccctaccttgagtaaggtgggcatctttgagaaggaaaaacgatagactaacaccttcgtaagtagaatgaacaatcaccacgcacccacatgccaagttagtctagggggtatatactactaccccttacctc

SEQ ID NO: 124340 - DNA, 2059 bp, Cannabis sativa
ttctcgtttcaactactccataaatcctgatttgtcgtagtcgaaattagactacacaagcttggatggaaaaaattcatctagattttaacacacatgctaacgtgcccgcaaaatgagacatgcaccatataatacaacattcatgttttagagtgtcaaaagcgttcaactatgccagccggatattctccgattcgatttaacatagaacacaaccggtcgaacaatctatttcaataatggaccttataatttgggtatttttcaaatcaaaattctaaagattatgccaaactttatactctttaactcgagcaaaactcaacttaaagagtagggacaaactgtagaggctaaaattgagctcaggctcactgtcacatgcgatgtttccagtgaatgctagaacaagattgggttggactatttgactagttatgacgatacaatcaacataccaagccttacaagcccaaaacgacacagtcaagttagacattaacattatccatgatccaacattgagctcacgatgatctgacccgtatacgagactgagtcttatcactcatctaacgatctctaaagtgatcagtcaaattgaccacgcaaataacgatctccctgatcaaatgggagaggagcgcttcacaaggggatgagtaacgcctttctatggacgcctataagagccactcttagttactgagaaaggcccatcaatttcagtcatctcaatagttcttagttatcctctctcactctaaaactacatacttatttccatagtcaagataggtggtaacttagttcgatcatttattctcatcttttttattacattgttaacaatcttgctgacttgatcatcgcagtcccttcgaccggcaccatctcgatgtcctaaggtttcccagttactcttttctttgttctacaggttgtcggtgcccacatacgatcatcttcgattgattgtggattttagcatctgcaatatgtatacatatataatgtatataatttatttatatgtatatagtttatttttattctgtgtatatatgtatacatatatatagtttatttatatatattcagttatatattatttttttttattttattgaaaatgttttatttttgttatttttagattgggcaaaaggacttttagcagcttggagaatatgtacacaattttttttttttgatatatgtatgtttttattaatgtgtattttatttattttattttagattgtatttgatttaagtatttctttttttgagtatgtcgaagatgcaatattatagtagtaaaattttattatcaataaaattttaaaaaaataagaataatgaaaaaataaaaaaaaaaatgtacaatttaatataatttttttatgaagataaatttttaattttatgagttaaataataaattaatttaaatttaaaatttaaaataatatttttttaaaaaaaaatagttaatttatatttattttagtttaaaaaataatgttagtaagttgttactttttaaataaattaaaaatgaataacttgaatattaaaaattaaataaataaataagaggaatttatctatttttttttaaatttaataatattttaattaaatgaataaaatttttactttagtttttagaaaaatattttttgatattcataatactttacaaatatagttaataaaaaatggttgaaaagaatatattatagctttggtatacttacaaatataccataactttgttatatttaaaaatataccataacttttgtgtatttgcaaataaagtatagaacacaagagcggtggatatacctttagctattgtcatacataaaacatgaaataatgtgatcatctttcataagatattcataatattttacaaatatagttaataaaaaatggttgaaaaaaaatctaccatagctttggtatacttataatagcttcgttatatttacaaatatattatagcttttgtatacttgcaaataaagtttagaacaaaattgtt

SEQ ID NO: 124341 - DNA, 863 bp, Cannabis sativa
attgaatgaaaatagacaaaagtccttaaattgaataatctcaatagttcggggggaatttttaacggccaaaaaagttcagagggcacgatttactacatgtttaagttcagggataaaaattactaatcatttagagtagggcagggcttatgattttgttcctatagcatagggtaagaaattagaccaataataagttaaaagagatagactatactaaagttataatggaggagtcctctgagagtttatttataacttttattatttaattaatatttcacaatagaattacttctccattgccgccacagtagttcttctactcaccctctgttctctcattctgggcttgctcagaccaataataagttaaagaataaaatatttttgtttgttgttagtatttttggtacgtgttaaacttatgaattcgagttgtatagataaatgcattaaagagagctttaaacgtagatttaatcttgtacaggaaagaaagttgtctagcatagataaaattgttcttaaaaatataaaagagttgtaaatttttcttttgaaggagatagaaattatatttcttgataaaagaaattaataaaacatttcaaataaaaatattaatacataattttataaaattattaaagcaaattaatttaaaatataattatggtagaattatgtatgcaaataaattagtggcaaaagtacttaaataataattttgctataattaaatattagtataaaaaaaatggataacagagttcgtaagtaaaattattttttgaaaataaataccgatataaaaataattcaaattaactttataaaaaaataataattcaaaataa

SEQ ID NO: 124342 - DNA, 950 bp, Cannabis sativa
tatcttgatcctcagccatatataaataatttctactaaatagtaagagtactatatatgtatgaacccaaactcaaatataataaattgatagatattccaagtattttgttgaaattttgaacatgtattgtatcagagagtgtttatatatatatgcatggcacttaattcaaaattaaaccatgcctagatatcaacgaaaagaaataataatagtaaatgtaaaaatatgtattacattagtaggagaagagtaacgtccaattatattattaatgtgatattaaatgcatggatgagaaaatcatttaatagtgtgattttgttctttcaaaaaaaaaaatgggatttgatctaaaattcaactcttttctcttttgtgctttaggttttggatttgggttcggcacacttctttaggcaatctttttatttcaaaaaaattataaaattattttatttacgaaattaaactaatttattaatttaataaaattataatttttttgtttttagaaaaatattaattttctaagattaaaattttaaaaattttaatttatgatcatatcattgaaattcaacttattaattaaaaaaatatttttattttacttttcataaaagaaaataaatttaactgtttctaaattaatcaaatagtgaagataaaagcaggtgtttaggtgccaaagtcaaagattcaattttgggcattcttaatcataaatttttgtaaggaaaattataataaatggtcccaaattataaggctatgttagtaaatgtttttatttcaaaatttgtagtaaaatagtctttttagattatttattatttatattttcttttgctacattaaaaaattaataatttttttttaaaattaaaagcaaattacttaaagattatggtatatttatattagttttgttaaaatctttttt

SEQ ID NO: 124343 - DNA, 2625 bp, Cannabis sativa
taaaaaataccgtctgacagtatttttgtaaaaaaatgacaaaatttagtataccatgtaaatttctcttctttagtaacctctatttattgggtttaagcctttaagggttaggaaaaattttgtagtatggtttccccagatgtaaccggttggagtccgtttatctctaactcgtgaacttagccgttataaaatgatgtgataataagttattttttcaattagacaatttgatgtatactagatttatcatttgtggacattgataagatacaatctttctatttaataacaccttagaagatgacatagccttaaagttagtatttaggggagtcttttagtacaagggattctacattttgggagcattactattaagtatcttggacctaacactacactgatgtggtgcgtcatgagtggttagtaattttatgtattatttattaaattaaaatgtgtgagtaacgatattaaattactctaatatcagtatgtcactttttgtagtgcttgacaccttaagatgtctcttagcatttttcaaattttaattcagaacccttatgctaaattatacgagcctcaattatgtatactcactaaacagtaaatcgtagattaaaactcgttaatgtccaaactacataaaattctcatctctaaatactttaattttttttaatctatataattacataaatttattagctgctaaaaatttgatcaacatacacaataaatccataaataatttcaaattatcataaaaataatttaactaaaaaactttttaaaatatcaaaacagataaagaatatgctcaaaaaaaatcttcgatgatgggttgtattgggttcatgtgtgaagtgtggtcaatttttattttattatttcttcttttgatgttttgtttaaaggagttaaacattaaaatgaacatgattctgatcctttttctttttttaaaaaaatgatttttattaaattgaaataaataatttagaatgttaaaattttgctgtaaataataaaacagaaaaatatatggagatgcggggtatcgatccccgtacctctcgcatgctaagcgagcgctctaccatctgagctacatccccaatttgttcattgtaaataataatatgtaattaacagactgatgcatactcttcttgcttacatgcagaacaacttgtatagtgtgtggaaatggaaacgagctctaccaagagcccaagccactggctgaggcgagtcctgcaacgccccatattcccaaatcatcatattactttccttctcatctttcaccttctttgccacgcaaaccaaaccacttctcaacctactgccacgctctccattgattgctctcgtctatacactccacctgctaaaatcactcattttttctattgggattttcgattcgttgctctttcttttgtttttacttgtaatgaataagaaactttttggaatggcagagcattctcatgaacctagctctgattctgagctcctcgtcaagcatctcaaaggcatcatcaagttttcatttccaacttttctttaattctatgcatattttgtgtattcaattatcatctcaagttagtatgctcttagaattataagatgcatggttccatctcaaaattacaataactctttcggctctctattttggatcgatttttggatttttagtggttggctctgatactatgttagaatagtaggatatattggttccatctcaaaatcaattagttatgagaggagtaaccatggatcatatgactctctatcatttgcaaaatgctaatctatgttagtgaatattggtatgatttcaccataatcagctgagatggttcattagagccattgcataatgtaatttacattagagtcaatttttatgtttattgtttgttagttccgaggtggtccaatctggttgctgagtatatggaggaagttttgacaaatcctaaagctggattttatattagccgagatgtgtttgaagcacaaggtgattttatcacctcttctgaagtgagtcagatgtttggagagataatttgcttgtttgagattcattcttatttgttagttcacttgagtattgaaagttgattataatgaactactttgtatattgaactattgttttagatggttggcatttggtaatgtgcttgtgggagcaaatggggcaaccaaagaaagttaatttagttagctaggctcgggaagagaaactcttatggttgatcttcttcgtgtatgaatcactgattctcatttcaaatttcatgttttgagttagataacagagaaatgaaagagtatctttaatagaatacttttaaaggtaaatggcggcaaaacccccaatactttcgttttagtttcattaaacctccaaaatccaaatttctgaaccaggaaactgttagcaatttaccctttccgtccaaatttaactgttaagtgtcatgttggctcgtaacaccattttattggtccacgtaaaaaattatttaaaaaaattaaaaaattaatttaaaattaatttaaaattaaaaaaatatatatctttatata

SEQ ID NO: 124344 - DNA, 1505 bp, Cannabis sativa
  modified_base (1449)..(1458): a, c, t, g, unknown or other
tagaggttcggtccccttgtttagcgagtattgacctactctccttttagttttatttattctggagataatactactcagatcactagtgttgtgagttctagagtgactctatctgaatagtacaatagtgagaacaatgctaggtagaccaagatctgatgagttcttgtgaaggactaaagaagagaagacttagtgtctaggatgcatatatgagatatgagacttgagagagggagagataggagcacgtgtatgtcgcttaagaaagccgttgtagcatatggagtgccttagaatgaattagactgacttaggttgacctaggttttgagtgagacctaatgccctttctatagtgcaggacttacaacagatctagttagttcaaattaggttaatctccctccctaaaaatgaggagatatcacctcttattacatattaactatatagaaaataatccattaattgttcctaaagaataggtaaaataattgaagttgaaattctatttttgtgggttgttgaagccaattcgtagatgagagtgtctgtataggttgaaagctgtagagacaccaaaagtgtctgccagaagaggagctggccaaggtacacttattttctaggacctggctagcctatgcacttctatggacgaccagctattgctcctatagccctacgatgtgcctaccaactttttcatgtgcctgtcagcttttccatgtgcttggaaactttccatgtgcctaccagctttccatgtgtccgccagctttggtacgtgctagccagccttggtacgtgctagccagccttggtacgtgctgccaaccttaatatgtgctgactagccttagcatgtgttggccagctttggcatgtgttggccatccttggcatgtgttggtcagccttagcatgtgttggccagccttagtatgtattggccaaccttagtgtgtgttggctagcctttgtataactttccttggaaaggtcaagcttcctttgtagaatatgcccttcttggtctaacaatcaccttttagattgcgagcttgtgcttaaaccctggccagccatacaagcttcctttggttggcctatgtgttccccttggccggccagttatggttgtgcagcttcttaatgacttgcttaactctttttgcttgttgcttgacgattttgccatgccttgtaaggagactttgtcctgctattgacaaggttgtactccacgtatccccaattgacttacatggacatgccacgtttggtggagaaaattttagataacattttctccccacgtccctgttcgagcatctgttcggatatggacttttcaactctcgtcatgcatgtagtagcttattgggctttgaaggacattcgggctcagatcttggtgatactatgcgacagaaaggatannnnnnnnnnagatttgagtggaaggagacatcatattccgctgcaaccactgtaag

SEQ ID NO: 124345 - DNA, 1724 bp, Cannabis sativa
  modified_base (1415)..(1415): a, c, t, g, unknown or other
  modified_base (1662)..(1669): a, c, t, g, unknown or other
tttttttttttttgaggaaaagaggctgcaaaagaaaacaacagctgaagcaagcagccaaagaggaagaagaaagacttcctctagctcatatctctgaacctgagagcttcacgggcacagttatgggcttccatattaaactgccgagggatgaactgcaaagaagcaccagggaatttcgagaagagcaaccgaatgcacgcaaccaaaccagaaagagccgagttgtcctgccaatctccatttacttttgagactaagttgaggcagtctgtaaaaacaacttgaggtgtaaactgggactcgaggcaccaatttagactttgtaatagagcttggccttctgaaaaaataggtgagacaacaccaggcaacctgctgaaatttgaagccaacacagtttgatgaccccgttttaatacaaaaccagcaccagttaaacttttcaccactatttttttaagtacgcgtgtgccaagttaaatcaaaccatattttttttttttttggttttttaaaatatggatcatgtcgtgttgtatcataaaaatatgggatcatgtcatgtcggtagactaggtattttttgtgatatgctcgaatttatggtgtgctttcactgctactgttaacgtagattttcgttaatcaaatttgagcctcagggtaataattccacacacaaaaaaaaaaacaaatagaaaaataaaaaatgaacacagggttttttacatggttttgcagttaaaatttcgcatagtccacgagtcaatcttatttagatttttgagtatttttttttaaaacatctttcatatgagttttttcgtccctttttgagattgtttgccactatttataattacatagtgggcaattaattacaaagttggccgaaataattttacagcaatcattcctaaaatcgtgggatttgattacatgttttgtatcataaacgcggtttatgattttaaaaatcatatagctgtgattttcccgcttttactgggttagaaatattgtgtattaaacacgacttcaattggtgaatcttgagatgtctcgacagaaacttgattataatgatcccaatagcgagctgggaccattcttcttttggaggtcgacaatgcatgtcttatgtcgattgcgggtataaagaaatcttctgacttgctagggttatgagcctcgctcctgttagttgaatgaagatataggaagtcttctcacagcgagatggttatctcgcatacttgttcttcgagcaaatctgacttttacatttagtttgcttattgcaagctaaggtatgcgtcaattttctctggtgcctcgcgattcacctttagcgacatatgcaggtttctcgctaatatactaagtgccagtttgtacattgattcctngcctaagaccttacagtcagtgggttacaaatatactctgatacttatgtaattaatgagttattccataaaaagatatcgcatcgattcacatttcttttatcatgacacgtgtcctccaaccaaattttgggtataacgattgccccttaaaaaattcttttttagtaaaaagagcttcttaataattacagatggcattttcgttaggatcttagaagaaaaatgctccagcatcttactaaannnnnnnncttgcactagagtaagtaaattactaggcataccacaagccataggtttagataa

SEQ ID NO: 124346 - DNA, 2722 bp, Cannabis sativa
  modified_base (46)..(49): a, c, t, g, unknown or other
aagttaatactacatataattttatataaaaatattgtataaaatnnnnttcaatataatactatacaatataatatggtgtaatacgtcgtaccaaatgaactcttaaaatatttattaaagctgtgtgagacccccttcgaaaaattaaaaaaaaaagctgtgtgagacagataatccaaaatttacctcattattaatatatatgtatttattttataattttcatttgaaatcaaagatgttattaaatatatattgtttaaaattcatgaatcacaagtacttaggacagcgaaaaaataggtatatataattatttataaccacgcaatcctacagatcataatcatatattatataatataactaaaataatttagattaaaatattgacaaatgaagatggatatcactctagtctattctttatttctttccttgtataaatgcatataatatttgaatataatacacacaataaaaatatattgacctttttttttgcaagaagaataaaaatatattgattgatcaaacaaatctatatataatgcctaatggcaatgtgacttagataacaattaaattattacatgtgacatatattaaagataatattttacatctatcttcaaaattatgtaaaaagactatattcatatattttttgaaatattgtaaatgaaattgttgaattatttcttatatttttataggtgaattaacaagtttttaagaaatgcataataagattttactaattgttcaatgtcattttttaaagtgaatacaataattttaaataatcaatgacattatttactacttaaatatttctagaagaaattaaagataacaagaagatgaaataccacacacaatcaaagtgcataaaatatatatatcatttgtggaattgaataataatgaccacgtacttgtagaatgaacacacttataatcaatgtaaaattatatttaattattgaatagaatgtgaattgtacacatattttaatatagcgtaaatttattgtacatttcaaatatttaaatatcattccttaaagagaatgaataaacatgaaattatattttaaaattatagattttacatttattagtaatgtcagaagtaaattaatatatttatgtttttttattttttgaaatcaatagtttcaaactattattggtacaagatatgtatgacatttactacttaattcagtttgtatatttctagaagtaaatatataatttactaatcttacagtaaaatttgttagtgatccaatataatttaatatagttatattcctcaaagtgataaagaattacaaaatgattatttaaaaaacttcctgaagaagccttaaatacaattactacttgaagtagttaaatatatttgtatgtaactagatgtatagtttttatcaagtcatgaaagttacaagtagtaacttattatatgtactgattgtacatttaaatacataatatatcaagtcatgataattagactgctgaatagtctattaataaattagacaacttgttggaaagataagagaaaaaataaatgctatactatagttatatctatttgatcattacaacaacatggagttgttttgtacctttaaaatgtacacatcattgaattgatgatgaaaaaaaaatataaagtttgataaacataatagtgactcttgaagagagtatatattttagaaaataatataattattttattcgtgtatataaaagtgaaacttgtaatggtcatttatgttgtagtgattttagaaattatcctacaaaagttttattgaaatacaaattatagcgaacctgaagttcatgaatagagttgttttgacatgatcaatcatacgcaataaattgtaaaatgatttgactaaattttattaaagaacgagaagattcttctcattgttaatttataatgttcaaaagaataatgtacatatattttgcatatagaaaaagtgaaagtatattttaatattttcttttaagtttaaaaagtgatatatctataatttcatctagtttttcttttatacttgtttataagataaaattatatttttattgataattattttgctaatataattcattagaatatatatgattttatttatttatctagaaaataaatatatattaaattatttttgaaaaaaatattttaatcatatacatttagaaatcttgagttattattagatttttattgcataacttcttatcgatgtgataatatgatcattcgatttacaagatttataaatttatgaagtagcaattgctaggttgattcaagatattttttaggaaagtttcttgtgagttatggtcttgttcagatcatgtatgagctgcctataatgtgtatattgactataaatacacgttataacatctagatttaggatctctttcaaatctttgtattgcactcatattttgaagaaagagagtctttattgtgtagaggagagagtgtttgtctcttcctttgtgtttatgtattttgtattgtcttgagtctataagaagaacaacagtgctacctttaagagaatgttctaccagctttcgggagatagcttttcaagtcttcttcagccaacctgggtcattttgacccgtttttctgcatgtgggtccgacggacccgacccaa

SEQ ID NO: 124347 - DNA, 1352 bp, Cannabis sativa
aagagaaaagatatacacttactatatggctatgtagtctagattaaaagcatcctatataggtaataagaagaagctagtaggaaagtctctgtcaaattctacacaaaagacgattagacacagagaattttgccaagacatgaaagtaaccaaatacctaaatatatgtaatgaccaaccgctttattaatttgtttatacatatatattttatcttcttttctttttcttactttttattaattattaatattttctttagtttgtcttgtggagagtttcagttagaagtaaaaaagaatattgaaaatatcaaatactagaatccattacataaattaaaagtgaaaaagaagaaaagtgactatacatgaaacaaatattaactactaaaaaagagaaaaaattcaaactgatgaaagttggtgtgttgggttattggagtaatatatagaatatataaaatatgggtgcgtgtaaatattaaaagagaaaagtaaaaacatttgacctgaaaatagaagagagtacacagaaaatccatgtatcacatgggttagtggaattttactgtttagttgtatcaagtcaacaatagacgacaaagaaggtatctgcgttttattactaaagcatgaaactactgtcgttctggttcataaaaataaaaaagaaagaactactgtcgttcgtgtgcgctggaaagatttgtactaccttcttgcctctgatacgtgactctttattatattaactttgttttttttaacatatttacaattacattatacatgtactgtttagtcctctaccttttctcttttcttttttgttttccctctataactccatgcatgttttgatatagagaaaagaaaaatgaagaaattaatgattgaaaattagagtgataggaaaagaaagaaaagaaagaaaagaaaaaagtttatttctcatcagttttttggcgcttggaagaaaggaaaataaaatcataattaggtaatttattataaattatttttaattaataaatgattatgtgcagttatatttttaatgaagtggtatagtaaatagttgtaaaattaaaatatatgaatagaaaaaattcccggtgaaacaatacttttggtagaccactaattataaatcattgtcttgactcttgagactcttgagacactaagatataactaaccatagatttatttgagaaaaaaaaaactaaacatagatttaactttatattttacttgagaaatactaaagggcaccaatggtgtatgtgtcagtattactattggtccaattaagtattggatcccatatagtttaatataataact

SEQ ID NO: 124348 - DNA, 1835 bp, Cannabis sativa
agcaccaaggtgcaaggggtggtggtaataaattcttaattggtatgtattttttctttattgttaacttcatgaatgaagatagatcatatgtgtgttatattttcatcccaaatgggaatttataatgagcagttgcctctacaatattttctaattgtatagctcatatagcttgattaaatattaattttcataaagtattaattttagtaaaatttttacacttttacgttcaaatatatgtattttatatttttacggtattttataaacacgacatgaaaacaataaaaaaaccacatgaaactaacatgaaaataatatccaaataacataaaaataatatacgaaaaacaataaattaataacaaaaataacaagaatacaacataaaaataatatgaaaacatcaaaagattttattttctgtaaataaaattttaaaaacagtaaaaatataattttttttgtgtgtatttccgaaataattcatcgtacatttccgtacatataaacatgtaagggccataaattagaggccaaccctgacaaatatgggtggcaaattttaatacgtagggctggttccattggtgcatcactggagaaattaacaccaacattaattacctgtacggtggtcattggtcaatatcaaactttacttcatatctctatattatatacatacatatatgatttttatttcttaagcatttagaaaatcttttaactcatttttagatgtgataagatgatgatcatgtcagcaagattaggaagctcatcatcattactaccaatctttactagtattttcactatttatgttttgttgtttgctattatcaatgtttcatcaacaatagctcaggatagaactcacgatcagcccactactgatctctctgaaggtcttcttctctatcttaatgtctctctcaatttatgtattttgttaatttttctactttgtgatttgtattatcacaaaattcagataaagaaaaagtgttcttaattatgaaaatagtacctttgttgcagtgagagctttgaactctatgtttgagcaatggaagataaaggcagacactcaaaagtggaacataagtggagaaccatgcagtggttccgccatagatgactccatcgacatcggtgactcatcgagtccttttatcaaatgcgactgcactttcaacaatggttctctctgtcacattactaaactgtatgtacattatatacatctttttatatttttagattattcttcatgacattttgtgtttttctattttttttttaataacttacttagtctttaaatttatttttcttcaattacatattcgtaagtgccatttgctttaattctctatttatttattttactattactattatatagttttatttaaaaaaattacatcaaaattttaaaaaaataaagttacaaaaatacattaatacggattttttttttatgctttgaacatttttatttacaaaaatatctattaataactattgatcattaacaatatggactaacacaacaaaaaactatccaattaactcacattttattaaaactaataaacattaatctaaacaataactgatatttaacacacactaaataatacaataaaaaccaagatctttcacctatagtcaaaacaaacaataaacaatatttaacacacactaaatatttaaattaagggtaaatattaggggtgtacatcaaaccgcttaaaccgctcaaaccgcccgcaccgcaaaaaaaatgcggtttgaaattcttcgcggtgcggttgcggttt

SEQ ID NO: 124349 - DNA, 595 bp, Cannabis sativa
tagctcaagtggccataggtggtgcgtgtgtattggaggtcctgggttcgaatcccaggttatgttgatgtaatatataaacgcttaaattaaaaaaaaaaaaaaaagttgcccactacttttttatctttcttttttatctagtctgtacaaatggatacatctttttcctctgtatatatatatatatatatatagagataagacttatattgtggtgatggtgatggtggtcccatcaacaaagagtagtagtaaagtacttactagtttatagtactttacttgcattaggataggaagtaggaaggaacacacaaaattacagcaccccaacttttcctcttagtttcaccacatcttaaaattttaattattgtttccaatattttatttattttttaataatttattgtactaaaacttagcttaaaaataatgagacaaaaaacactcctaccatgtgttattagatatttatcttccggaacataaaaaccgctaaaccgtaggaaccgcctaacccattagaatccgcccgtatggaaaccgcccattaaaaacccgcaaaaattggattgggttgaattttaac

SEQ ID NO: 124350 - DNA, 1282 bp, Cannabis sativa
  modified_base (1169)..(1173): a, c, t, g, unknown or other
cgcatgcggtatcactcaaccatcagtgtgtgactcgaggtacaacattccagaagcatttaattccccaaacatcgaagatactctcaatcaagttatgtcgaaataacttcaacaactaggacacgcatcactcatccagacaacttcctagttgaatgcagtccacatgcaaccaagaaggtcccgcacatactttggggcaaatgttatcttaaattttccactgtgacgtggtacctgacttgatgacacatgtcttacatttctcagcctaggcagatggttttactcctaccagccaataaagattgatatgtagatcgaaattatacatacatagtatgatgtccaagtagagtcattgatggacatccgaccagctcgatcatgtaatcaactcgcatgcaccggccaggaaatgtgagttgggaattccaaaagtgatcgatactatctcgaaattccatgtcacgaagctatccctactattttgggattaatttgtactttcagagaataaaggcaatcatcctaaatttcccaatttcctcattgtaattatgaaaacacgataatttcctattttattagattaagggaagcattcttatgtaagtagcccctataaataatggtctcgtttcactactcaaagatacgaaattaatcaaagagaaccttcaagagaaaaactttgatcaaagagtgattactcaaagatctttgtaagagctttcgagaaagaatacttcattatttgtctcacaagttaatacaataaaaaaaggaataggctattaccactatcatggggccgaacctcaataaattttggtattttctttacttattactcttttctttccattatttatttaatctaattgctttattgaaaatttactgtcattggttgaaagaaaaatcaacatggagaaacgtaaatatatattgcaaacatgatctgttatatatacttatataaatatatatttatatgcttaaactatttattttaaagtaaaatatataaatatatacatgcatagattatatttttcatttttaaaaatattatacataaatagagtaatttgcggcataacctccttaagtgaccaattttttgcaactaacccccaattctaaaattttggtggttaaannnnntaaactcgtgttctgttagcagttgaacatttccatccatttttagctattaactgccatggtggaatgtccacgtgtacacgtcacacaattttattggtccacgtaa

SEQ ID NO: 124351 - DNA, 1408 bp, Cannabis sativa
aaaaaaaaaaaaaattaactactacgcaagagcttatagattagaggatttttttaaaagaaaaaaagtataactaattaatagaatatgactaattttttttttttttttttgacatgaaatagatatgactaatttaatcaaatagtcaatggaaaaaaagtaaattttgggacaaattaaaatagtaaaaaaaatatttatttttagtgtatatgtaatgtcctactatactttaaataatgtgggattattacaaaaaaaaaataaataaataaacttagttgaataatatattaaagaaaactttatagaatgctgccaacacctcttatgtgcttttatatatagatataattttttttattaaagagaaaatacatcaaagcctttaaaaaataatgagaaagaagggtatacttgtaaaacaagcacgatgctaacaagattgttattatgtatttgaaatagaataattattatttttacttcttgaatttttgacactacctgatcctatctcccaaaataacagtttgttaaaaatttctcctaaaatataataattacataattatatcccttctgctaagttatgtttcttttactgttaaaaaataatatatttactccttgaactttgaggaatataaaattttgtccccttttattgaaaaaaaaataattttaaaaattatgaagttctattcattctgaaaaaaataataaaaatattaaattaattaaaaaaaacattatatttacctaaaaaaaacctaaacttttcttaaaaaaaatatttcaaattttattttatttataaacatgtatcttaaaaaatcaaactaaaattattgaaaatctaataagtaattcaaacaaattatgattttttgaagaaaaaatcatacttatttatatatataaattcacatcttaaaaaattaaaaaaaaaaataataataataataatatataattattttgaaaaaatttataaattaaactaaaaaaatattatgtttacttaaacaaatatacttccaaaaaataaactcacacttgttcgcagaaagtttagtttttaccaaattaaatttttaatacattttttatattcaaataggtttctttataaaaaaataaataattttttaaagtaatttttttatttttacactttaaaacagtattattatttttttttacatttatgaaattattctgtagagaaacttttatagcaactaatggagcaacataaatcgcaaccaaaatccgtgtagcaacatacatagaaactactagataaaccactagaacaaccgaaatagtaaatttgaaaaaaaaaaaaaaacaattaaaaaaaatagtatataaggtaattctgttataaatagtattaatt

SEQ ID NO: 124352 - DNA, 1267 bp, Cannabis sativa
aatacaatacaatacaatacgatctaatacaacgttccaaacgagcccatacaatacaatacaacacaatgcaacacaatacattacaatacagcgtaccaaacaagcggtgagacaattccccacctcatataatataactagcttcgtcgtaaggtccagcgcaaattaaaggactctcctacggagattctcccctccattatggctaacaattctcgttcataattagttattaattttagttttttgataaccgttctcactacttattaattgtgatgattttggttacgttgtattttgtaaatttatatatttcgctaaacaagttgatgtgtaagtccactacactaggccacctgacatgtttccatgactaattcacgtggagccatttctttgaaatgaatgggcataacacgttgagacttggggcccccaaacactccaaactacaatatttagttttcctgtatcgaattcaatctaatattcttttcccatattatgttagtggagaaaacttagctgtaccccatttgttaatttattacaatgagataattaatacatatacttatgtatgatatatttgttagtactctagagcctttataaccagttgtccaattagttagctccaggaatagggatgtggggagaacatgatcatgtaaattgatttatatatcttctaaaagttgttggccttttattttgcaaatttgaacttatcgataatattttttagtttaatttgtttctgctacgtctccacttcactcacaattaaacgggggaaatttgaagttacactatcaaaatttaggcttcttttctttaacattatttagcagaatttttatttttaatttggaaaagtatattttttcttgcattttagtaccaaatctttatgttaaatttttactaattataaccatatatatatatattacagcatctatgaatatttatgttttgacatgttcactctcaaataaaaaatatttcagcctctttatacatgaagtattgatactttagtaaaaaaataaacataaatttatgtaattctaactgaaattttcctatttatatttttaaataaaaataaattttaaaatttaactttaaatttatttatttaaataaaattcacctacattagacaagaacttagggcccgtttggttggtggtaatgggccagaaaggaatggaatgaaatactaatgggcctgattcttttgtttggttggaaa

SEQ ID NO: 124353 - DNA, 817 bp, Cannabis sativa
atatatatatatatattcccttttcttttttaaaataattatacttacaaaaaccaaatatattctattataagtctttatttactatactctttgggtccactctattggaaaatataacaaaacattataaatttagaaaaattaactaataaagttttgatgtgagacaaaataacacttaactcattgagatatacatacaagtaccattaattaaagctaacaccaaatataacaaatcagagaatattaagttattggtttatttgtaccacaagttcttaaattatataaattttagtatataaattttagtaagttggtctcaattttttgtttagtaaattaatacccaaactatattagttttaatgaatggtctcaaactttattttttaataaattaattctctaacttttatttttttagcaacatcaagtccttattcatttttatcaagtatatttatttttttgtgttattaaaataattttattttttaattttaatactttgataaaaataattatattaatattttttttttatttttaagtatccatataatatatataattataatatttattttttaagaaaaatatttaaaatatactttattcatatatatactattaataagaaataaagtataaacactagtgaactcatataatggttagagaaaattttagccccctcatatttttatattttagagtttataatatattttattattaatttatgaatatgtagtattataattttaataattttttaattgtatatatatatttattgattatttaa

SEQ ID NO: 124354 - DNA, 711 bp, Cannabis sativa
ttatttttgtggttaattatgcaacaaaaaaaaaagataattattaaataatttaatatatattaaaaagtaatcaatcaaaaataactaatcaaatccgtatattacagattggattggactgaatttgaattactatgcaaggattagatctaaaatataaaattcacacttaacatatcatcagatgcactattagcaaaatagtatgaatttgatcgaatgaatatctatcctaattttttaaataaatgtctttttataaaacaaccgtaaaataacaaaacaggacaattaaaataatagtagaacaactaaaaaataaccgttggacaaccgttaaaacttaacatacagtacaaagtataaaactaattatacagtatttttgaaaaaaaaaaatccgtcccacaataaaaaagtaaaaaagttaaaattttcaatatgtgatgtaaaaactccttgtttttttgagcttttttattttatgggcttaagtttgacatattattataaatgtctttctaaattctatatttaatattttaaataattttcttcctctttgtttgaaacataacctaagaaagtcaaatatatggtattctataaatgtttattggatcacatccaatggatttggacccatccaatccaatccaattatttattagatattggatttttccatttgatccaatccaattgaat

SEQ ID NO: 124355 - DNA, 1473 bp, Cannabis sativa
ggatcgacctcacctgtgtgagatttactacttgattgcgtatacttgcgtagcgtttataaaatatagcaacagaatgagggcccacccccagtgccacgatcctccattgaggttgggccagcctcgatcatctcacccttcggccctgccaaaaatacctctggtggggttcactttccctaggaaggttgttccttttgaccctctcgacatgcagaaggagagggaaatgaactgggccctgaaggggcgtttggaggtggaaaggctacaagtctatagaagggcgattgtgctgtcggcagtctgtaaggctgaaatatcagatggtatgcatgctttgccgcctgtggggccgaccatggaggttgaggccttggagaagcgggtggcttacaaggtggggagagaggctacccccttcgctgccgagctttaggaccaggtggctgagagtgccttaaagcttcccatggagacctgggcttcctgctacagcgagaacattttcacgctggcccattccaccaagcagcaggcggttggggtaaatcctcgagacattttctttttctttttatgttctgccccttgttctgatactttggcctactttgacaggtggccttgctggtggagagagctgccaaggaagccgacacactggtggctgaattggagcaagtaaaggcagatagtcgcgacttgcataatgccaacgtgacctttctggctgagctcacagaggccaggctccaagttgagggtctacagaaagagaaccagcagttggaggacgagaatgctcatcaagcccgtctcatatggagtatgagagttgttcatgatttttacagggagaccatggagcggatgtccggagcaggctcctccacccggttaagcggcgcccaatcttgagcttcagcaggccttcttgaattgtttgtttgtttttgttgtctttgttttttttttttttttttgtatataccctcttttgctacacttttttagtcacggagtcaattataatttgtcctggtcgtgggggctactgtaatagtaaataggattttctctgccatttttctctagagatttattttgatagacttcttagaggctggttgtgtcatcgaaacaggtagttctaacggccactgtttcaaccttttcccattagtcttaatcatctcctaatcgatccaagggtgatttcttggttttaccctttcgttcctggagctgtaatgcttcttagcccaccactcaaactcttacttggaaaaaatcgctcgcttagagttagcccagagatggtttcctttcgtggcagagaagccttcgattttatacacatcttctgttggattatattttaccaggacctagatttactaataagtatgttttcaacatcctaaatatgaacttctaaaacgatacaaattaaacacatataaagta

SEQ ID NO: 124356 - DNA, 1416 bp, Cannabis sativa
  modified_base (27)..(33): a, c, t, g, unknown or other
  modified_base (74)..(88): a, c, t, g, unknown or other
  modified_base (1385)..(1387): a, c, t, g, unknown or other
aaaatagattacattgaaatggagttnnnnnnngggcataaaacccaacagttaatcaacatacttgtgagtannnnnnnnnnnnnnntaaaataatttccaacattctctccatagttactctctttccatagttgatgatttttcaagaaaattatgggtgtttattttgaagaataagatggaagttcttgaaaaatttaaacactggaagataatgaattagaatcaaaccagaaataaagttaacaggcttaaaactgacaagtttttggagtattattcggatgagtttgatgtgctttgcaagaatgaaggaatagtaaggcacaagactgtgaggaaggctccccaacaaaatgggcttgcataaaggtttaacagaaccattctagaaagagttaggtgcatgctattgagtgttggattgcctaaagtgttctgggcagaagttgtgtctactgtagcttatttgattaacaaatgttcttcaacaacactgaatttcaagacaccagataagtgtggtcagggaatccaacaagttataaacacttgaaagtattagaatgtgtcttctatgcacacatcgggcaagataaacttgaggcaagagccttgaagtgtattttcttgaggtatccaaaaggagtcaaaagttatagactgtggtgtctggagtatgaaataagaaaatgtataattagtatagatgtgacatttaatgaatttattatgggattcattgataaacctgctggaagtcaagccagatctaaccagaaggaagctctaggaaccgagcttaaggtggaccctccgacaagagtggagactaaaatgcttgtagatcatggaagtaatgattcaaaagatgtttttgaaagtgatgatctaaaaagttataaactagcgagagacgggatacagagagaactaaaggttcaaacagatatgcacatgttgatttaatagtgttagcatttcaagttgctaatcagattgtgcaggaagagcctactagctatccacaatcaatgagaagcaaagataagaagaaatggaatggagctatgtcagaagagatgcactatttaaagaacaaccgaacttgggacttgatattaagccaaaaaatggtaaagtcatcggatgtaaatgggtgtacagatggaaggaaggcatttcgggtgtacaagaggcacaatataaagcaaggttagttgctaaagggttctcttagatggaaggagttgactacaaagaggtattttctctggttgttaagcacagatcgattagaatttttcggcacttgttgcttgccaaggcctcgaactagaatagttagatgtcaagactaccttctgttggaaattattttnnnaggatcttagatctactcacacgtatgtt

SEQ ID NO: 124357 - DNA, 843 bp, Cannabis sativa
agaggtatgtttcaaataaatataaaattagaggcaaatttggttaattaattaataaaagaggcatttttcaacttaccccaattataaaaatacattgtacggggtttaaatatttttacggtttttaatattttgtttacaaaaagtatattatttttaactcttgttattttgttgttgattttttgttatttgtataatgattttttatgttgttttttttgttatttttatgtgattttcttattatttttatagaatatcgtaataatatatttaaaataaattagaacgatacattaaaattagtatagcctctctgcaaagatgacacacacaaatcgagaagtaaaaattacccaaaatatgagaaaattttaagagtttacttttttatagcataaataaataaagctaagtggttatgagtttttttgtttttttacatttatataggttttttatgtcataaatttgtaaaaaaaagatctcatatttgtaaacaataataagttttgtcggaaaagtcacaggcgccggagaagtcaccggagctgacaatgtcgccggaaaaactattggcgtcgaaaagccgtcggaaaaatcactgtctccggaaaagtcatcgttgtcggaaaagtcaccgtcgccggaaaaagtcacaagaagtagatgtctcaaatataaacaaaaatagaatcggttataattgaaatataccatgttctgcaatacaaggaataaaaacaaataaaacaaaataactcaaactaattataattaaattataaccggttataactaaaatataaccatttatataatataatgaatacaaac

SEQ ID NO: 124358 - DNA, 1204 bp, Cannabis sativa
ctctctctctctctctcttaattggtatcaaagcttaaaattcttaattcattttagattaaaaaaaaaaacctaaatccttattctgtaatccctctctcttccttgcgtctctagatcttcatcatcagcctcagccaacctccgacaaacgtgcaacctaaaccccattttctctctgcctaaacttctccgcctaccacaacagcagttcaacctccagcgatgtagatgcgagataacgactcaacctctgcctcgacttctctccacctcgtattctcttcgcgtcccccaatcgtgggtgctaataaactcgttttttgtatatggttttttatttttcaatattctttatttgtttgtttctcggtctctctcttatggaggtatatgacattgaagctcgagaagatctcgctcgtctgtgttcaaaggcttggtgtggttgacgggatgctaggttcgtgatttaagttggatgaggcttggtgttcgacgggcctaagaaatttgaaatatttatctgattttttggataagtttgaactattctggtttgaggattgtattaattattatgtccactagtttattctgtgattaaattgaatgttttagttcaatttttttttaatgtatttttgggttttggaaatcctcttctttgtgaaaattttcattgtcaattaagtctttagaaaaagaaatgaatgtatcaaataaacattggttatattctgtttattgaataaaatatttgttatattattgttattgtcattgtcaaaaataatattattttactagctaaatataatatttataattatttttaataataataatataatattattaatatatttagaaattagtaataaaaaaaacacgagtcatatatgatcacttttctagtaacactatacatataaaataaaaaagaaaatgatatagtgacgcgctttttgagatgtaaatagtattttttttgacacctacactagtgacccgcattgaagggacactgaaaatatttagagtcattcattgtgtatcactaaaaattagttttgtaatagtgctataatcgatgataaaggttttcatgacctatgtcttcagttattttaaaataactatgtaagttcgtgttaggttatttttaatattaattttagattaagtttagtatatttttaat

SEQ ID NO: 124359 - DNA, 671 bp, Cannabis sativa
  modified_base (614)..(622): a, c, t, g, unknown or other
gcaccattttttgcgatgcagtttctgtaattttttagtttcgcggtgcgggtgcagtttgagaaattggaaaaaccgcatgtgcaggttgatttgaaaaaatggtcaaaatcacaccactcgcatcgcaaacacctatatgagcgacctattttcttcttgataaataaaaaagaaaccctatcaatattattaatgaataacaaccttcaaatgtcctttaatataccatcaacatccctacaactatcctccttgcaatagattaatcggatagcttataagcaatcaaactcgatactaaattacagtaaatattgttgaattccagtttgtaaccctgcttggatggctagcaactccacttagaacggagagtattctctatttaaagttgttgtcaaagcgaacacacacgattcaacttcatctcgggccacacaactgatcccagcacagcctcctccaacctgtaccctgccatcaacattcatcttcaagtagcctccctgtggcggggtccatcttgccatcctcctggccacaattcccttctgttctatcgtcggcactttaaaaaatgcgcgtaatgcgtgttggaattattttaccannnnnnnnnatttactaacaagtatgttatttaacatcataaatatgaacttctaaaa

SEQ ID NO: 124360 - DNA, 1748 bp, Cannabis sativa
tttttattcaaaaaaaaaataaaagttacatagtttgatagatagaattgaacaaattctctatttattttttttaaaaaaaaaaattatctcaataatatccaattaaatacatatttttattctaatatgtattttcaaaagcataataataaaaaagagtatttttcgacgtcaaaattcttttatgttttacttttatttacttaaccttttaattttattttgtgacaatactccttttacttcatctatttacttttagtttaatatatatatatacatacggtgatcttgagcatatggtacaatgataatcagttacaactcttccattacgtgcttgatttagtaccataaaactaacacaactgtcatatttacttcttttgaatagttgataacaaagtcatcaaatcttttatatcactgtcttcgtgactattttaatccataaagagatttcttaagcaaataaacatgatcttcttttcccttttcctcaaagcctttgggttgtttcattaggatttgctcttctaaatccccatgaaataatgttgttttaacatcaagttgttcaagttccatgtcttcagttgcaaccaaattgagtaacattctgattgatgtgtgtgtaaagacgcttaattttattatggaaattagtagataattagggcttaattatgaaattagatttttaattacgatttatgaatttatggagatttatttgaattcaggatgtattatttatgatatatgaaattctatatttttttatgttttatgcccaataacattggaacgcggcgtttggcccatagaatcacattttagtaatagcggggcaacctagataggcattgggaatgttgagaatagtcagggttttaaaaatgaccatattatctctaggctactttctagttaagctttaagagaagggcatttttgtcattttaacttggattaggtggttgccatttagtgtggcagctcgccactatttgataaaatagtttaattttatctttcatttagtgatatattgaaaataaaaagaattaggaaaaatcaagaaaaaccacttctctttctctctctttttcgaaccctcaagggaaaccaacaacaattggggatttttcagctgcaatttagagtagtttagtaaggtttttgtgattcaactcaaggtaaggtgttctagcctgtctcttagtgatttcttaagctttaagttaggtttttgcatggtttttctaaggttagtgtttgaattcgtattctgtggttgaagtatggttatttgagttgatttggtgttgtttgatggcttgtttatgttgttgggcaatgtttgagctttagagctcaaactttggtctttgatggtgatttgagtttcaagggctgtttctggtttttgttgcatgaattatgtttaatatgatgtaaataagtattctggaagttattgtgaagtttggggtcgaattgaggttgttgtggggttttaggtgtttcctgcactgaatcggtcgaattctggttggtccccaagaaaccccgtagaactggtctaccgattggggaaccagtctgttggttggggcagttttgggaaccctgatttttcttatttttacaatatttagggtattaccatgttatccatcgataggaaaacttttagtttcaaatttaagtccccaaaaagtgatttagcgtgtcactcgtca

SEQ ID NO: 124361 - DNA, 1593 bp, Cannabis sativa
  modified_base (1544)..(1561): a, c, t, g, unknown or other
tatttgtatgtggactgtataaatatttaatgggccggcccatagtatttttgtaattttttttttcctttttctatttttttccctttttttttcttgggaaggtgggacaattttttattccaataggattaatacctatctactaaggtcatctcgtttgacctggacggtgatagatggatttggactttagaaaataatggtaaattgacgtgcaagtcgacctacctgggccaagctgttgaaagggctcctccctgtgacgttgctccttcgctttggaataagctgtagaattgtaaaatcccagaaaggatgaacaccctttggtggtgtctcctgtccaaggcaatccgtatgcgagctgagatctgtaaaaggtttcttattgaggatgttacttgtcccctttgtgggatagagaatgaatctattgaacatctttttctttcctataatgtggcttttcacttgtagcggtcctcttcttggggtatttatccaatttggggtactggtattcgtttatgggctgggtctaatttatttgggaccttaaaaataagagtattaaattaatgaagatgagattttcctttatgcctcgttaaccgtggacactatctggcggatccgaaatgaaaaggtacataataatgggctggttgatgttattaaatgtattgacattattcgttcttcttttgtagttcaccatgcttctttgttcccttgcgtgcctccgcgtatgttggatgcctggtgccctccccctcaggacttgttaaagctaaattgtaatgttaaagtggaattggacaacatgtgtactgcggtcattgcaagggatcatctgggtagggtgatctggatccatacttctaagttggagtttgttgatgctttatgtggagaagcggtggcttgttatcttgctctggatgttgcgaagcatcaaggtttaaagtttattattgttgagagtgatttgagggtagttattaacgctctcaatagggaggtttcccgatgggagattgagaactacgtctcattttgttttagatcctctccttattttgttagttgtatttttttaaaattagtaggaattgtaattttatcgcccataatgtggctaagtgggcatttacctaccaaaaattcggttatattccgattttctctatcctggaacacctgttttgtaatgtccgcaaggtctaactacttttgattctaatatatgcacgcttttcttcaaaaaaaaaaagtcatctccaaccatacactaaaaactcagaattaaatctttctcactaaaattaattcaattgaacattaaaagttatcatatatatgtatgagattgtctacaataccttactttattagtaacacattgtagaccatactaaaattactttttattttttttagtttttaataattaaataattaatttttcttaataaatatagggaaatttgagttattatgcttaaatgtgaagcacggtcttgttggaaattattttaccnnnnnnnnnnnnnnnnnnacaagtatgttgattaacaccataaatatgaa

SEQ ID NO: 124362 - DNA, 1320 bp, Cannabis sativa
aattatcccacttgatcttccccacgcggtgtagattgtccccttacggatcacgggactatattgactgtcacaccctgaatgggggtaagaggaattttgaagaacacccctaagccctatctcatcagttccaagcaaatacaaatttcttggtgaaacttcgaagagaggatgtccaaacgtcctcatctcgtggttgaagactcagactcagattttgaattggacgatgaatttttacatatgcccaagcttgataaggtattttttttggttatttttgtgtcattttaggggttttatttcacttactcctatatttctatgggatgtattacttttatatttaatatgtcttttttattttttttttattttgtgtttgtgtgtttgttttgtttgaatgcagtatttcattgttttataacagttgtatttttgtgttgtttattgttgctttgtttttatgcaagggaaggtaaatccccaattaagaacgtttaatcggatgatgttattgacgatgtcattgttaaaatggttgtatcatttatttttggtttgttttcgtgttgttttagttttattttagtagtttttatgttccttctccaagattggactcccaagtacactcgtttggaatatttttatagaaattcagtaattgaacattttaattcacatacaacaacaccaaaaaaaaaaaaaacagtagaaaatagctcgacgtttgttcttttatttttctggtcctataatgatctggttgcctatttattatacatattcttaatttacaataatatgtaggttattaagcaagaaagactctagaacaacgttgaatacttcaacatgaattaataatcgactgtttttttaatactcgtgcaatgatgtacattaatttgtatttttctcaatatgggatgtattctaatacaattttagatgtattttaatacaatttcagatgctagtgcctatttttgatttatgaatttcatatctaaatttgttatttgtttttattttcgtttataaaagaatctgatgggttttagtgtctaataaactttttgttttgtttatttctggctttgatgaagatgttgggttttcatctatcgttgatttgcctatttttctcaatctcaccgaaattaatgagtgtttttcgggtgttcggtgttgtcggtcaggttctgtgcgtggggaacgaagatggagtcattgatattgatttagtgtgtctacagcataaaaaaaaaaaaggctcaaccagtataaaagtaatttttactgtgtgatagt

SEQ ID NO: 124363 - DNA, 1407 bp, Cannabis sativa
ataattaaatatataaaattataaatattaaatatgattggatggacattggatgatttggattggatcagttcggattggattggtcagttgggattggatcgggtgactttctgcacacccctactggtatataattttattgtcatgatatatattttaattgtggtatataatttggttagtatagtatattatatatattagtaatatttttttttattattgttagtaaatatattttggtgaatggtatatgttttttttgttatacaatatattgtttttttaaaatgatatttaagttttattatctattgtacttttgttgacgtaacatataattttattagcatgctatatatttttagttttatttgttgttattatatatatgtctattgtaactttgtaagatatgtttttgttatatggtatatatattttattgcgtagtatatcatttattttacatcatgcatgtttagttttaattttattatatataaaagtggtatataattttgtaagtatagtataattactttatagttgtatataattttgtcaataagatatatatgattttttttaataatgtgttattttattttattttttattgtaggtatatatattttgttgtgtatattatatcatttatttaagatgatatttagtttctattttagtatatgttatctgcgtttctaacattgtacacgtggattccaggtcagcattcatgacccattagttggatcctcatcaaagataaaatgggccaagcctatctggatatgccctaccgacagctatcatggtccgtactcacagagtcttccacactcggcggaccgagcccaaaaggcacctctggtgtcatgaggtagaaggggtaagatagtaccttcttggaagatccttttgggtttcctatttattcctgcctacaaataatgaagttccagctgtcagagcacgccagaatattgtatcacgattaaaggggaaactttccataacaaacattgtgtagttatttcaaaataattatccaccattagcggatgcggttttaactcaattaaccaaattacaatctgcctagtcagtagttgtattcttcatgggctgaacttcatgaaaaagcctaaagatattgtttaattgtaaactacctaatatatggaaaagggaaaatcctaatgtaattctccaactcttataaatactcaatttaatctcatggattagggattgaactctcttacgtactttgctcaggaaaacttacgagcatacatcttgtgtatctcttaaagtgtttacatgttaataacttactgaataaaactgactcgtgaactaaggctagttaacgccccaactgttgggttttatgcc

SEQ ID NO: 124364 - DNA, 729 bp, Cannabis sativa
aagatgatatgtacaagattgaaatgaatcctccctgagatagtttcatataatcaagggggatttattgaaggtcaatatatctcccataatataatgatatgccaagatttaatcaggcattatggaagaaaaaaccccaaaccttgttgcatgattaaactagacttacaaaaggcatatgacacaatggaatggggatttttagaggaaatgttggtggctttgaattttcctgttaaattcattaaacttgtaatgaattgtgtaaccacacctaggttctccttactatttaatggatctcttcaaggattctttgaacccaaaagggggcttaggcaaggagacccgatgtcccctctattatttgtctttggaatggagtattttagcaggatcatgcaaaaggtgggggagaaagaggagtttggctatcatgacaggtgcaaaggcattaaactaaatcatctgagttttgcggatgatgttttaatgttctgcaatggtgacttcaatagtatatatctcatgatgcaaggcctaaagaccttctcacttacttcagggctatttcctaacatacagaaaactgttgtgtattgttgtggtatgcatgaagaagaaattcatagggtgttaaatatgtctgggttcagtagacagagcataccttttagataccttgggtacccatttgtgcaaagagaatctcagcagaagaatgta

SEQ ID NO: 124365 - DNA, 1027 bp, Cannabis sativa
taatctcatttaattataattagaatttcaatatttaacattggattgttattgaattagtcgattgtaaccgaatttcgatggatttatacgggcacccgtaagcatgatgcattacatattacgtatatatgtactcatgttgagacaaaaataattgactctccattttttggtatgtgaaagttatttattataagggatgagtgagcgtacgtgtgaaatttgttaggctatttaaaacaattatcacaattcacacaatatttttttgtccttgcttttattttcttttcgtgtcttgttcttgctaaaaatagctttatataataatattttggcattgtgaacgggctggtcaaaggtcaactctttgggtgcgagtaatgttttaataaacttgatttggtcagaagcacagctgcacagcacaacacaacaagcactttcttcagtattctaaccgtgtcagcagccaagcctcgcattaacgccacttcccacttagccaattacctctgaagattatgactcatgcctttaattccaagcaaatatatacaataataataataatccaaaccattttgtttcaggaaatgaggcttttgttctcaattctcattgagatttaaacacaaaatcatttgattatttaacattacaagttacgactagctacttatgagtacgtggttagaagcatagcatagtgtactctatattgatcttatgtggaaatttcaaacgaatcttctctcttattaaaaaagaatattatatacgagatatctatatttaattatttatttttatttttatttgacaagttggtaagaatatttttagactagttgatggatatgtacatgttttatgatttttcctcacaagtttacaaaaatatggggtttaaaaagtaaaccctatactatatttttgggtaattctacaatgcaaccccttaaaatagatgtactgatgcatcattgacttgtttcgacatccagaaaaattttgtagtcta

SEQ ID NO: 124366 - DNA, 2259 bp, Cannabis sativa
  modified_base (1248)..(1271): a, c, t, g, unknown or other
  modified_base (2115)..(2122): a, c, t, g, unknown or other
acttgtgagtagatctaagattgtggtaaaataatttccaacacattaaatgttggataatgatgaagtaggagtagttgagaaaggagagagaaagagaaaggggattgggaacatcacgaagatgagcaagagggactggaaaaaccagagagaaactagagtgttccattatttttttgatgccgtagagggtctctctaatcttttttctatcaagaaaaaaaatctgtaataaatgatgtcaagtttggcaaaaacataagctaatattatgaccaaaattttcaattatgttctaatgtatttagtctaaatttacttaaaaagtcaacacattatttaatttttattgtgaatataaaaaaattagtattaaataattaaagaaaaagtaaaaataattctattgttaacgcatattttcgttaattaaatttgagcctcacggtaataattccataaagaaaaaataaaagctatgtaaaaataatatatgaacacatggttttttacgtggttttgcagttaaaattctgcatagtgcacaggtcaatcttattcagatttctaattgtgtgttttttagggcctctcttgtatgaattttttttcgtcccccttttgatcttgtctgccactatttataattacatagtggtcagttaattacaaagttgaccagaatatgtttacaacaatcatccctaaaattatgggatttgattacatatcctgcagtgtaaatgcagtttatgatttgaaactcgtatagctgtgattttctcgcttttaatgggtcaaaacaatcgtgtattaaacatgtcttaaactattgtatttagagatgtctcgacagaaacttggttacagtgattctattagcgagctggggccattcttctttctaaggtcgacaatgtatatctggtgtcgatcgcggttcttatttttaaagagtcattttgactcgctaggattgtaagccttgttaccatcaactggacgaggctataagaattcttcccatagcaagacggtcacctcgctttacttgctcttgagccgatctgacttttacacttagtttgctcattgtacgctaaggactctcacgattgatacatgtcgctttctttggtgcctcgctattcgcatttagtgacacatggtttctcgttaatatactaagtgccagtttgtacattgattcctcgccttagaccttacagtcagcgggttacaaannnnnnnnnnnnnnnnnnnnnnnnatgagttattattccataaaaagcgatgacatcattgattcacattccttttatcttgacacgtgtcatccagccaaattttgagtataacaattgccccttaaaaagttctcttttagtaaaaagagctttttaataattacagagggcattttcgtcaagatcttttcttggaaaaaatgcatcctttgatcctggcgattgtacggtttcgagggtcattatgaatcatctcttcatattctgcacttgtcccaaccgttggatttgcaatacttagctttcttgtcactagaatttgtgtataaaagggcggctcaagcttgtcatttttcataaacctctggctctttagtgagatccattttcagaatggatcatctctttcctgccaaaatgtcccttctgagttcagaagttcatccttccaaactcataatacccagatgcaccaaccattttccatttgttcccaaagacttcaaggcttaaccaggcatggaaacgatggattccaaggctgaggagcttccgactaatccacactaggggaaccctgtagcccgccatgggcgattctcacaagtgatccctaggggtataaatcatgtgagcgatcttaaaggtcctcctcaggctgataaagaattctagaggaaggttggcatggttgcagatgaagttgggaagggaattggcgtggtttctatcagagaatccagccaacccaagacctaaacctgtgccagcagatatttgtgccaacctctttctggtatcgaggaatttcctaaggctgagaaagagatctcggcttcaggaaatgggatcttctgatgatgannnnnnnnaggtctgtgcaaagatcaaggctccctacatgtggccggtctttctcaagctatgtgtagttggtctttctccgagctacgtgtagacggtctttctcaagctatatgaagatggtctttctcgagttcatcggctt

SEQ ID NO: 124367 - DNA, 2213 bp, Cannabis sativa
tgcctgagtttgataagccatttttggtggaaactttcgcttatggcagagaccttgacgggctgagcacttgactagttggtgatgtaattggcaagtgaacaacgagtcttggttgaagactcaagcttgtgggcttggtaggagcggctatgacacttctttaaatcttctatcagtctagcccttcttccacatgagatcctatttttcctaactccatgtaaaaaacaacgttcatcttcaactcaccccaaagcttgcccttagctagcttctcgactttcgaagagcagagatccatggccataataactgccatctacctccctctcggccagaaaacaccagatgcatagtaggccgacggctgggtccctagccaagaaaaaggaaagaaaagaaagagaaaccctagctcagaaagaagagagaaaaaaccctagagagagaaaactcttatcactcatactctcaagttaaatgttttcacgatcaacaatatagataaaaggtatactcactattattgaaaatgatattcatataaattattttataataaaaatatatcataactatgcaaatatttaaaatatacgtataattaccttacaaacaaaatatatgattatttaaatgggatggccacttacatccaaagctttcatatctacaaattagtctataaatattataataagcgggtgatgtaatttggaattatatcatttctttttattaactactagtttcatcaattacgtacaatgtcatttaacaatcatataaatgtgtacatatatatatttggaacacttaaacaatcatattcatataaatatatagtatatattaattaggtgtgacaataataataataataattgatggaaggtgaaccaaatgacaaccatcggtcatattaagcattttatatgtatgtatttcttcttatatgtatgcattaatttcttctaaatatgagattcaagtatagtcttcttcttcttcttattttaagctagatgtataggaaggaaggatgttgacaaaatttatgtttattattaataatttttaattattattattattattatcatcatcatcattacaatcacctttgttttcttggtttgagctcatatattaatattattagacccaacttgaaagcaaaaatgcctcaaaaaataaagatgaaccttttataccgccattattataaagataatataatacattagttggcataccattataccaccagttaccaaatacgtagaactaatatatgtaatgtgattactttcagataaatttatttatacatataagttttggatagtgttttgtttctatacttttgatggacgattccatcggtaggtctccccaatttgttaggatcacttgtatctttagttctaataacattggagtctcttgttatgtgagagttacgatatccacaattttatagagattgatcattgaaatttgaatgtaattggaaatcctccttaaacttttttgtgaggctagctaattgttcttttgtcgtgtggtaagaggcttgaaatttggaggcatagtaaaccattgtgctagcatctgacataagtgatcaatgcctaactatttgaactacgagtgttttcgattgatcatttgagtagattgtatattgttatttgtctttgcaagcttaccagggaatctgagattgttgtgatgtccatttttttcataactttccatatatgtccacatggatatccatcacttatatattatatttaaattcttattaaattttaagtaattataaattgatactttaaatacaattaattattaattttgcagtaatttgtcacaattaacagtaaagtctatgtatctctaaccttctcaatttagtcaaacttagtgtaatttcttaaatttgacatagtcgatttctaaattctaataaatcaattaattgagacatcaaggtgatattatccaagccactgcggagattatgggcctatgtaattaagctcccaataaatagttctagaatttactctatcttattgatttctcctaagtccactatagattcagaattccactcttgattacatagaacgctctgatctccaagaatagatacgctattagttatctattatttcaatataaataatcaatgatcctct

SEQ ID NO: 124368 - DNA, 1094 bp, Cannabis sativa
acgataaagacagcgctaattgggaggcaacccaaattttctttatgttttagttgaactttcttatgttttagttgttatttttatttttgttctttttagttatgttcatagaactggtaaaacaattttggttttctttaaatttttgtactgtatataaaaaaaaaagaaaagaattttattttcaaggtttggcccagtggccgtggctagatacagcctggccgcaaccatatgggacttacagagaggccatttttcgagaagtatctggccacggccagattgatggcgtcgcggccagatatcctgggcagagagaggtttatttcgaaggcatctcgctgcgatgatgaggaggcccaccgcggccatataacctgggcagagagaggtttttttcgagctatctggccgcggcgagatatagtctagccgtggcgagagtgtcaaatgggtctttaagaggtaataaatcacacaatttcaaaatcaattctttctcaaccctaacaacaaacaccaccgaaaaaacctctcttctaaccattttttctccatctcatcttattctaacccttctctctttaactctaaccataatctctcatcccaaatcattctaaaaccttattcctctcatcaaacactcttttcctttcaaaatcaaccccaaatctctaaaacctcaccaaaagttcaaaaaccactattcatcttcttccttctcaagaacttcaaggtttccttcaatggaggttgaataaaggtggattctcattgaggtaacaattctaagactctctatacaatttttggtggataaatttgaattgttggaggattttggaattttagtgtgattttttgggatttttgctcaatacattgttcaatagagttgtttgtgattaggaattagtttgtttgtgattgggttaatactcgggaagtggaattttaaggggaagtgctgccaaaatttttacaaatcttaagtgttagaatatttggtgagatgggtcctaaaagagctagagtgggtgagagagggggagcttcatcatccaacccacctaggggtcgctcta

SEQ ID NO: 124369 - DNA, 1621 bp, Cannabis sativa
attttggtcattaaatctggaaactgtagtagacatttcaacatctgaaaaacttcactaaaaattccaatgagcatatatacatagcaaaacaaaccaaattgtgaaatacttgaacctcaatccataccagctatagattctcagtatatagtatatacctgtcaaacaaaaaaaaaagttagaaagtgtataagaatggcagccatttatgtgaattgaagttgaacatagatttttataatttctcacatctaaatatcataattgaagaaaatacacacctcagttaaatcgtttgcagcgcagttgttgtgtggatgctaaattgtgacattcggtatttgacaaatcttagtccagtacttctcattgccactctccttcgggtcatactttctcacataagcctaataacttgtttatagtccatgaaaatctgttaacagttgtgatcagtggaaaattggggtgatcaattgtgtttacaattccttctggtttagtgtagatttgtgaaacagtcaatccaatccgaggaaccatctcaaagtggagaggaattaaagaaggaaaattagattgtaagttatttgttgaatcatcaatccattttaccattcatttttagcaacaatgcactgcccatcttagaatcaacatgaatgactttcatgtttaacattagttccaatctaaaccttttgactttcatgtttaatgggaatgatttgatcttgttgttgtgtagataatacaatttattataaagagactcattcattgcatgtaccattaatccattttaccatcatttttaacaaccaaatgaggtgaaaacttagcatttttctatttagaaaataacagtagaaaagagttgctttacataaaaaaaactatctcatggtcctgctattaaattacttattatagtttgtttaaaatctttcttcttttcactgtggaagaccataggaagagaagagatgaaggtcacatgtccatgagtgacctcttcccaaatctattatctgatagccctcaattaattatggcggaggaaaaccgtggttacaatacaacaactaaaaatacaaaccaaaccaaaccaaaaaaaaacgaatactctgtattataacaaacgaacactgcttgtactttcatgccgtggaagctaccacttcctctttgctgcattacaagacataaaaacatgatcaacaacagcttctcacttctcacacacaaacatttttgaagcaaatgagagaaaaatgtttttatttctgatgatttcttttagtatatacaaagggtatatataatacaaagtgaagacctagtaatactagagtaaatgaaaaatacattaaatgtaatttacagctagcttgatttcctacactcaaacattcctaattttgaacttagttccataaaaattaggacgatggagagctttggttaagatatcagcagcttgttgtctcgagggaatatgattcaaggtgatgatctcgttttcaatcttttcactgatgaagtgacgatcaatttcaacatgtttggtcctatcatgatgaactggattctttgctattgctatggctgattgatt

SEQ ID NO: 124370 - DNA, 1643 bp, Cannabis sativa
attgcatatttcatttcttaacacaacctccatatattatatatcacctttggacttgggattatttgaactcatcaactacaaattagtttaaagaaatagtgttattgtaagaattcttttcttaagaattcttttctttctttcaaaaacttcttctcccattagtttgtatgtttccttatatttataaaacgtgatttttcttttaatgttatatatctagacttatacttattaagaaaataaataataacttcttatattgaaatattaattgttttttaaaggtctattttcaaaatctataccctttttaaatgttatttaattcctttttttattctaaaatttattaatgtaataaattataattatacatataaaaataaaaaaaaaaaattacataatagactaaaaataaaaaatatatatataaaatacgtcaacatggaaaaattttatttttatgctttgaacatttttgtttacaaaaatacattttcagtaaaaataataaccgtttgtttagttgttttatagttgtattataattctcatttggttgtttttctgtatttttggtcactttaatttttcgttgtttttcagttattttcttactttttactagaaaaatgtatttttgtagttttaaaactttgaaaccatatttttattaatgaaaactttaagtagtaaaattataaataaaacattaaaaaaaagaatatttataaaaatttacctaaaaaatagtttataatttatttaataatatatcgcacaaaacaatgttttaaacaataacaccaaacaataaaaaaaattacactatatacctcttttaacttgatgcttttaatttttaccttctattttaaaatctatatatttacttttttttcaatcattctaccaattttacccctatcacttcacgataatttttatttttttctaatcaaagttttgccccaactttcccacaaatctacacatccatttacaaagaacacaaatctattatatttgaaattatgtcttagttatctaagtgtgtgaggataatttgggtacaatatttataaaaagaggtatatttcaattaaattttatttggaggtaaatttggttaatgtataaaaaagtgggtattcttcaacttattccccaaagaatcgtgtctaaaaaccagctcaatccaatttcaaaaaaatgagtttttacaccacatactgaaatttctaacttttttacttttttactgtggggcaaaaattttgaaaatactgtgtaaattttatactgtatgctatgttaagttttcacaactattccactattattttttagttattctactattgttttaattgttctgttttattgttttagagttgttttataaaatatttaatatttttgtaaaaaattctgtgtgacagttaaattataaacttttgtctaaaatcgtatttttgttaaaacccaaaaaaaataataaaccaattcagtccaactcatcaatccctactataaacaaggactatttttcaaaaatatggaaaaaattattaaggttatgataaatatgacataaaaagtaaatgccactaaatatggcattatctaaccaatca

SEQ ID NO: 124371 - DNA, 1767 bp, Cannabis sativa
  modified_base (1689)..(1690): a, c, t, g, unknown or other
ttacacctggcatgaaagtcagggttagtagcaaaagcagctactccttgattgtccacccaaatcacagaaacatcagcaagctgaagttgaagttcagtggacagtgagataatctacttgagttctgttgcagcatttgccaaagttctaaactcgaattcagttgaagatcgagctaccacttattgtttctttgcagaccaagatattaaatttgagccaagaaatactgcatatcctcctgttgatcttctatcatcaatgcaactggcccaatcagtatcgaaatatgttgcaagagtattgttgattttttacacgcaagtatacgtatcgttaacaagttatagactcacaaaaagtggggtcgatcccacaaaaattgtagttacgtactttaaaattaaacttttatttttatttgattatttcgaatttaagataaaattaaactagaaaaataataaaaacaataaaaacaggaagcaagtaaatcaatatgtgaattaacaatgattagaatttagggttattgattttaattgtatcaatatattatggtctaacataaattaatttttattaccaatttttatgcaatagcaggtttactcaagtaatttatagtcttctcatatatataaatcccaattacatgcaaattttctactttcataaaaaattaaaatatgtaaaaggcattaaacataaaaattctataagctatccaaactacataggtactctcgtcctatatcaaaatttgtttctatttcactatagcacactcacttcttagatctcgtatcagaatcataaatatttaatcgatgtccaaacaattaaataaaaataagtaccaataaaatagaatacatagaaaattggaaaataacataaactgcttagctactcttgatcatcgtaacaattcgacatacatcaattaagaacataagtggaaaataaagaagaagaaattattaaaaaactcctttgaaaagccttctcgatcattttttatctctctaacgggtactctctaattgcttgtcaaatagtgtgaaagtccactcctttaaatagctgaaaaaaaaatttaaaaaaaaaaaaagataggaaaagtatcaaaaatattttttttttcaaatttaggtaggtgcgcctcaacactacaacacttgtaaagaccgcgtaattttaatatgacaaattagtagattattagggtttaattcagaattagacttttaattatgatttatgaatttatggtgatatatttgaattctaagtgtgttatttatgttaggtatgaaatttcatgttttttatattttatgtccggtaatattgaaatacatttggccaatagaattacattttcttatgagttagtattttagtaatagcggggcaatttagttagacattggaaatatcgggagtattcgaggtattaggtttgaccaaaatacccctaggtggcaagaatcctttttggtttagacaagggcaaattggtcatttgccatatgattctttgtcctttagtggtttttaattgagttaataaatcggaatttaagttgtgatgaaacaattaggggtacaaggcaggctatgttatatctattctatataaagtgtgcttatataagtgaattcttggtttatgagaaattnntgggtgactttttatttatatttaataaataaataaatttttattttttttaataaaataaataaattaaaattaaa

SEQ ID NO: 124372 - DNA, 995 bp, Cannabis sativa
taaagtctatgcataatttccatatgcctttgggttttggtaccaatactggatttccaagccacaccgaatgcaatgattccttgagaaaattgttagtggtaaacttgtcgatttctatctttactactttgactctaacagggtctaaggtctccttttttgacaaactggggtctcatctttgcaaatattaaaagcatgaaaaattgtgtttcgatcaatcctagacatgtcaaaatggctccaagccagtatatcttgatatttattgactgtattgatgacatcctttcttatagtcaaaggtatattctttcccactctgatagttctagtgggatcttcttcactgatacccacttcttgtacctcctccattggttccaaatttctctcaattctaactcttggatctaactcatcctcaaacttttcccggatgacttatgtgtccattaagtcttctgccctatgagtagtgggtacttcttcccaaaccacgaacacggtccacgtcaacacattgttgcaattcctcgcactttgctggtcaccttttatagtgtcgatgaatccattttcacatgggaacttcatacataaatgttgaatggaagtcactgccccaaagtctactagggttggctggcctaatatggcattttaaggagttgggcagtccaccaccacgaaggttgagtgtttgaacgcactcgcctcattttcccctttaagggtgattagcaactgaaccttacccatgggcaataaggcatcaccattgaagccttgcagttggatggggcatggagttagatctgcctcagtgagtcctcacttggaatgcaaaattgaataaaatattagcggagcttccattgtctaccaggactctagaaacccatttattagtgatcttgtaacgccctaatgctaaggcacgctacagtgctttttcaattacagtgttgtctttgctaatcaaagaattt

SEQ ID NO: 124373 - DNA, 632 bp, Cannabis sativa
aataaaagtttctttttgtaacaaataacagagcaatgatacagtacttaactgacataaattcgcacatatatgaccacaaataaatgtataaacacatgtgactcagcaaagtgagtgtcccatataatctccagttcctaaaaaggaaaatattcctgagatcctattttcctcaaaaacatagaaaaaggaattatcagtttcgaagcatatgaaattttaaatgcgcctctccggctcctaaaactctaaaatcactttgtttgagtaagcagtaaattttagcttttagttctaaaaaattcttataatagaaactagctttaataacttgctggagaagaattttttgagaagctaaaatcattagaagagtgctcaactaaatagggtcaaaacatctcatatactaccctcaatacattttttggtccctatttttttgaaagaagcgaaaaaaaaatacgatgttgatggcctaaactgatttatatatgttagaagaggaaaacaaaaattcaaatcttaaagcaactccaacaagacaagatatatatctattctatataaagtgtgcctgtataacagaattttcgatttatgaaaaattcataggtgactttttattt

SEQ ID NO: 124374 - DNA, 2437 bp, Cannabis sativa
aaaaaaaaaataataaatatatatcatgtacttaccaataccataaatttttgtacgagaatagggtataaaaataaattatctactatatacgtatattaattaaatcaaattttttctttgagactgagaaagaaaaaaaaaatctactatcaatgtatttaatacttttaaatagaaaaaaatcatgtatttaattaataaattattttcgaatgaattatgataccatgctatttaatattgttcttattatcatccttgtttttaatttcacatttttctttgtgttgatttttttttttggaagtaatttcttaatgttgattgataagtttattttacatattctatttaaaactaattaatatttgagaattgagatcctatactaaatatattacactgaatttcatataagataagatagcattaaacactacactgtttaggtatcttactaatattctttcaatatatatacgtacgagatcctatttatataaaaacattaagaaagaagaaaaaaaaaaacacaactaatgaatatactttaagaagactcaaaagatagacataatatttataggaaatgtctattatagggaattggagattattatttagtgtaatatatttattggtaataaataaataggtgccatttcaaaaaaataaaaataaataaataagtgtatgataatagttaaataataagattatattaaattatttattatgtattaatatattaattaatgtgtatattcagtagtcctatatatatatattagaaaatgtctctattttatgcaaatacctaccattgtttaaaaaaaataaaaatacctacaataaaattattcaataattataaataagaagcaattttttaattaattaaatatatctatatatatgaaaatattctaaatggagtgctcaattgttacacactacgaaatctccaaatgatgataggtaagaggtcctcttcaagaggacaaattcttaaatatacttttcgagacatgtcaatcttccagttaaattaaagttttattttatatctattaataatccaattacatatttacacattaatttttaattactaataataaactcctataatattttcatagtataacaccagcccagctagctataagcaaaaagtatgtccccatatcttttatgcttaataaccattattttaagcttttaactaataaaattagcatatatgtctccttattatttcgttctataatatatttgatgtaaaaaaattaattaataatagggtatcttaataaaattttaggtgttaaatattataatactcttttttagttattaattaatgtacattaattcatgatatatggtccaaaaatttggtagtttttttttttttttaaaaaaaatcttgataaaataataagtaattgttgatttacaattgcttaattaattaatttattttaaatcttatttcagtacatacaaataagcgtatttaaaaaatttgcttctggacatctatgtgtacataatacactcttaaatttggaaaatttagatatgtactatatacaatctagaggatgagattctataaatttgaataatatattgaatctctttagtaatatatattgtcttttatgaaaattaaaaaaaaaatctaaaaaccacttatttttttttaataaatttcaatcaaattcattgatttagttacccaaactttatcataaaattataaattagtagctatgagtactgtaatatatataaaaaaaaaacctaaaaaaattgtaaattgttgatcatcgatctcactatatatttaaataccacaccctaagaatatatattgtatgataaaactattatgcatattatatgttcattctttggtcaaggtctagaattaatacattttcatatttttaaatttatttgttagaacagtactatatatttttatatgtatttttctgaattagctacattaatatagtacattagtacatataacattatcaatataataatctgcatgcattgaaaaaaaggccaaattgtacaacaaaagtcatatatattatttgtatgtatgtagaaaagaatactgccactgtcataataatctctgcaaataattaattttctttaccttggcctcagtcattgttttccattttcacacattttataaaattatcgtttttttttttggtgaatcagaaaattatattccacaaaacttcacttacaaaccagtagcaccatttataatagccctacaattctatgttttacaatatcactcttcactttaaccacttggggctagctcaagtggccataggaggtgcgtgtgtgttggaggtcctgagtttatactgatgtaatatataaacgctta

SEQ ID NO: 124375 - DNA, 582 bp, Cannabis sativa
cttcctctagaaattcggatggctagttgttcccttttcaaagggagtttcagatagtcgactcaactattgttattcagggaagttccttcaacgtgcactctttcttccaggaagtatacgtctcatccggaagcaattcagcttgtgttgacatggagatattgttacaaagagtttgttaagttgtaaataacttaacaatttagcattcgcagccaccgaccttgggatcctcgtccccatctataaataccaccaacacttatcttttagagagtgattttcgagatgagttacaaggtaacttcgtagttaaagattgagatagaagagagagattgagaggtagagagaggtacaaagaaaagagagagattggggtttcaattttgtatgaaagaattttctgtagatgaaaaagatttttgggtaagagtgtacgagataaacactttaagatgatccaaaagataatcgatctcgactgcactcaatcaataaagaagattcggtagtgttctagaactggagtagagccatagatcacatcgattgataggatttgaactagtatatatc

SEQ ID NO: 124376 - DNA, 2247 bp, Cannabis sativa
cgtgaggacacgtgactaacgaccattagagctagagttgtgagaacacgtgaccaacgaccttcagtgctccacattggtttgacactcagtgctccatacatggtctacctttgaagtccaaatgactcatacgaacttgagtctacgtaaagaggcactttcgtgttagcacgtgccatcaaagctagtccaagaatatctacaacaactatcattttcggagatattttttttttaaatgttattttatattttaaacttaacttaactataattaggaaaaaagatatgttaggttaagaaaatcctaagccctaggtgtaaacctatataaaggctacaaagtcaattgtaaaaggattgactctcactctcttaaagttacactatttttactctaaaaaactcacttgattgaggattgaattcttggagaacataactctgggaaacttttctcaagcattgagatcaataacactctaattggccaagcctattaccgttgaaagagggtgaaccactataaaaattcgttgttcatcactgtcaaatttcattgtataaatcagtttacttttgatcgacattgacttgtgttcatcttgtttgtttacaatctttttagatccattgacgaaagaccgcgtcaatgacatataaattaggggtgtacgtcggtcggtttggtcagtttacgttataatttattcaactcaacgtaaagattaggttacaaaaatctaagtgcaacccacccgataaagaaaaaaaaatgtaactcacccaataaaaattggtcactttggtcgggttaacccgtccaaaccgagcgctcatatttatttttttcacattcaatagttatattttagttaattgtgataatgaaacaaatatataaactgagtttaaagttcaaatcaaccatcataaaaaaaatatagtaatttaaactttctatgttttttttaacaatatgtatataaattagataatatagagattatatatgataaaaatatgtatatatataaactctcttaatcggattggttgggttagttcgggtcgattaggcgggttgatattatttttaatccgcccaacataaagattaagtatgttatatttttgtcgggtttttcggttgtattttttatcgggttatcttggtttggtttgagcagattgttcaggttagacgatttacaaaaatttatttatagccaatgaatgttagattatatatatatatatatatattttgctgaaacattatttagcacatttttataaagttgtaatagtatatgatatatcggttaaatttaatataaaatatactatatatcatataaaatgtacaacacaataaatatcagttttttatttactcttatgcacccacttaatatgcactagagtttaattataaaatttaagctaaatataaaaataaataatcttttgaattaattaatttaatttaacacaaattttataccatataaattaattttacgttaaaaactccttaaatggtaatgaaaaagttgatatgttgaagtttttgcttattgaatttgctattttgtaataaattatttaatttatcaattttatttatctaaaaactttatacacattttattaagcacattatttaaatgagttaaataaacatatactcaaaattataaataaatatgtaaccagttatgtcgatcaatatatagtgtatattaacataacatgtcagacatacgagcacaataaattaggttaataatgactaagaagtggtttggtatgtcatgttatattgtgttataatgtattttatttgattgtattgtattaatattattttatataatactatgtgttgatattaatttatattaatattttgtgtaaaattatattatttttaccataaattggaccccaacttcgatctctagttgggtttggagtctggggtttcgggctgggtcgaggtcgaggtcgggatcgagtcgggtccaggttcgggggtccagtgttcggggtttgtgctagagtttggggctgagtcggacaccaaatctaagtcaaggttaagatcggagtccgagtccgagattgagtcggggttcgggttcaatattgggaccggagtctccaacctaagaccatgtgtaagtatcataaataagcttatatagatcatttgttaatggtgcgtttggaaagccacaa

SEQ ID NO: 124377 - DNA, 774 bp, Cannabis sativa
  modified_base (726)..(727): a, c, t, g, unknown or other
gcataaaacccaacattaacttccagtatgatctaggtctttcagagtgcataagtaatctacctatgatgacacagagactagatcgtgaaacaacaacatgcacaaatcatggatgatctacatatctcatcaatataaccaaaaacaagtaaataagaataacaaaaggacatattccctttcattttagaaaattttgcagcaaaatgactgtattttaaataaacctaaaaattataacctgtatatatatatttgtacaaaaatatatttggcactcagtgccccatagcagtcagaaaaaagatgcatattaaattttcaatttatctaatattttataaattataaaagttagaatatgtgtaatgttattcaacacaaataaaataaagtccaataataaagttgagttccctacctctcccaagtgattaaactttgtcaaaagagactatcctaagctctcaaatctcgagctccaattgtttagtccaatcttagatatcacttttacctataccatcaaatgtctaaaaaatgatcacaattgtattctacattcgaaatcgagtccagtgacatataatatgactatattgaatgtttggagttctaaaacgtcgcttaagtggttcacattaactattgtttgcgatagaaatcgggtctacaagaaacacctttgaaaataggagtagcattgtaaagcccgcttagttnntttggaaattagcagttgtttatgtttatttatgaaattatttatag

SEQ ID NO: 124378 - DNA, 635 bp, Cannabis sativa
ccatgggtaatacctattaagagtacacccatatatgtatatacgttagattttgaaatttgaatgttggcattcttcttcgattagactccaatataatctttgctatctcaatttttttaattaatttaatttttaataattttaacatgtatatatataatattgtgtttcaggactaagaaatcaagggagatgtaatattgttagtggccttcttaacaacttgtatgtcgaaaaaattggttcatttgaatcaaagttattagaaatcgatgctaaatctcaggtgattttcttgacaaaatatttcattctccttctagatgctttttatgtagtttgataataataataactattctcattctctttattttattttagtgtattttacttctcttcttctttttattcaattaattttatgtaccgtacaaaataaaatttgatgtgtaaatatatatagtgtactcctaccacatatatatggaatattttttaatgggtaatacctgttaataggtgttgatttcgcttttaaccaacgacaatgagtctttttgataagcgataaatgatatgtcttaatgagaatatataataaagcgataacaagacacagaaattttata

SEQ ID NO: 124379 - DNA, 738 bp, Cannabis sativa
aaaaagaaagtatagaagaactcacttcataacgaagcttttcaggccatggagctgaaaaaactctcttaaacccttgctttatttcagtagtagcagtcagacttgaaaaaaaaactcaaactttaacattttggagaaaaataaaaaaccccaaaatgataaaacgattaaactcaccacgtttggcaccaattgtggcataagtctcttcgactggctttgctagctataaaagggtaccccaacatccaataacactctatcatataccctcctagccctaacagaagaacctaaaacatcatcttcaccaaatttaattaaattataactaattttacagactaacataattgtacataataataaaaaagagggagtaccagagttgagacagggagaagagatggagcaaagaggtgggtttgtaagtttaaattagagaggtttgagggcttcaaatacaacaccattattactaatactatttgtgcagtatctcatcaaagtatagaaaaatatacaaacttatacctgaccatacgatcctgagaggaggacgccaagaggaagagtggagttatcggagttagagtttgggggtgttctgtcggagctgctgctggtggtctgaatggattacaaattgttatagtgagatttttctcacctagaaactcgagaccagactcctatttggaggacacgtgcactcaattttcccaagaaaagctg

SEQ ID NO: 124380 - DNA, 2450 bp, Cannabis sativa
  modified_base (26)..(28): a, c, t, g, unknown or other
ttttgttttaaaaataatgagatctnnngcttagttatttttattaaagaagtcttttactgtctttatcttaaatggttttaaatggactagtaagcgtgacgtctcgggaaatcgaggcattacaacttatgtttcatttctcctctgatgtcttgtggcatttgagttgtttttatattggtaaagcttggctggatgtagttttcactcaactttcttgtagcttgtcttttgtctataattcttatgtttggatcacaagtgtgtatcacctttttgtcatatttatagactatgaaagactttgttggtccgtttctagatgctgcgagtccccacttgtattttggatccaagcaacaaattttgtttgttcttgtgcaagacttttatatcttgtattggaagttatttctaattgcattgaaactaagcacactttgtagtgtttcattgtccttgtatatttgtgcttcctctattttaggattttgcggatctgggattagtagttcgtcataatctgtgatttctgcttctctgtcttgattgtattctagttggtcaactatttcctttgccacaagttttgcatagtccataaagtcaaacattatttcaccatcttctagcattgtttttttgcattgtaggttgttgagttgttgattcttctattggttgtgcattgtctttcatttttctattgcatttgttcatgaaaatactgagttgctcattttcaagaacgatggattgtttgttgttgttgtgttgctgatcacgttcacacacaatgtatatgttgtgaagttaggttccttttgttttagttctatgtagaaatataggctttgactgtcctttctcctcaatggttggtatccttctttaacatggtatctcagttgcaggatagtgttttcatggttgtattgtagaatttctttcaacttgtgtattagttcatcatatttacaatggattgagatgtatttcccactagcttcataatttgtataattcaatcgatcatcaaattgtctgtggtaaaaggttaggaattgaatttcatctttttcttgagtatccgaaattattattattgcaagtcaactattcaaaaactatattaaatctataaatgcttctgtcataaatgagtccgaatttttttgataaaaactttaaaaaaaaaaagaaaaattgaaatagtatgtatgaagtagaaaagaaacttacttctatcggctttaatctattcaagtcatgtattgcaaattatgaaccctatattttatattattcttttttgtatcaccactattttacaactacaataaaactaaaatgctactaattatcaattagttgaataatttcataaaactaaccattttgtagaagtatttttgaagcgatttctcttttttgttgtcaaatgaaatacctccaatgttgatgaacaccataataaaatgataatacaactataaagcaatctagaaaaacctggaacatacttctacgtatgtggctgcagattcattcgaattttcttttctttttttgtttatgaattaatatattaaatattggaaatttgaaatcaacaataatgcaattcgatataccttagatctattatttatactttttttcatgtctttggaatagactagatttggattgatggggagctccaatctttattttagagatataagttatatgaatctgaattttgatattaggagaagttgttttgttcgaataaaacagaaatacagtgttgaatttcactttcaaccaagtttttcttctcttattttcgtcaatttcaggttaaatcgattggtgtcttcttttcaagtgaattccttggaattaattgcagtcttcctcttgatatggtttcatttcggttgtgttgccaatttgaacgatcgacgctttttgttggtgatccttctgtttcgtgcggctgaaggtctagaagaggtggtatttttgtaattgtttgtttatgggctgtctaatttttgaaatggccgacccactgtattttagtaatttttatgcctttttggtattttcttgtttattctccgaaccagttctaattgtagagatcttaaagtgtcatgtcatatatatagagtttagtaagtgatagaaaaaatgatcattttttaaatatcttaataaaaaaaagccaaaatgccaaattttgtctaaaaacttagatcagagatcttaatttcaataaaaaagccaaaaaaaaaacaaaaaatgaggacctaaaataatgttaataaaatattaaaaatttaataatgttaagtaaatactcattctttgttggaaacttcaggcatgagtggaatattgatgtgacagcctttaagtcatacaaggtcggtcgacctagcattacgttaaaagct

SEQ ID NO: 124381 - DNA, 2053 bp, Cannabis sativa
  modified_base (43)..(75): a, c, t, g, unknown or other
  modified_base (680)..(685): a, c, t, g, unknown or other
gaaccatgcaacataaaatgatatctgatctttattaattagnnnnnnnnnnnnnnnnnnnnnnnnnnnnnnnnngggcacaaaacccaacagtagtacagtactatcgaatataatatcagcctatactcagtacgctagtcgtactctagtcgtaccaatatgatactgtcgagtagtacataagccaacatacatttatcgatatccaatataataataaatataatgatactgttattgtaatggaatctgtgatacccaaaatttggctaaacttcagaaagtgacacgtatcaatcttagggaatatgaatcaacaaatatgatggtgattatatcattaaatgaaaaatggaataactcattcaatatagaataaatagagtatgttcgtaactcgttggctgtatagccttaagcgagacaaggatatcaaattatcaatttttgtattgacgagaaacaatcttgtctcagaatgcataatctcgcgggagccttggacagcgtatagcgaagcatcaacctcgctgcatgtaaagaagtgttgacaaggcgagacatccatctcgctaagaaagtatcgacgaggtgaattggctattgaaacactgagcatataatttgcattataatgactaagtgaaatagaatgtaggacatgattgtccagtctnnnnnnccttatggtcaaagagcagttcttcagttcgctcagtacactagtgctcatgccattgctagaatacctgtaagctaaaacactcgtccgtgtccaaggtgagatgcctcgagtgagacatccttcaaaggaattttccatctgttagtgttgaccactttaaagacagtttcaatcatagctatgtgatttattaatattattcacaggtatttaaatgggacgtaattaaagcccataattttgtgaaatatcgttacgcaatttaaattcaaatgtaattaactaccaacctatattactataaataggggaagattatacaagagaggggatgaaaaatctttgagagaaaaaaccctgattctgtatccaaaaatatctgagtaagatagactcgtggactatgcagagttaactacaaaaccacgcaaaaacctggtgccattatcgttttttattgcttttctaaaatctcttataatttatatggaaaatttattacgaaaagggtttgttaattggttaaaaaaaatctacgttaacattttggttctctcattgagagcctacgtgataaaagcttagaagaatccctcctaaaaaattaaattttcctccatggctgaccacaataaaaacgataacaattgtcatgaagagactaatcatcgtcctgaaaaagagcgaatgggctcacggaggctgcccacctcaggtacaatgcgttccacatgatcaacacgttcgagaagaagccaacgtaatcaggatcaaaacctagaaactaggaatgaggaacacaatgctgaattcggtggttatgtacctatgggtgaggatgtctatgatcccactaggtacatgccattggttgaattagaaaatcgttaactccggcaacgactgaccgaggctaaccaacaaaatgctgaattagagagagaggcaatcgcagccaaggcaactcaagaaaacgcagcacaaaatcaacctgatcttgcagtgagaaggccacggggtagacctggaggttcaagaaccaagaggcagaagacggctcaggaaaatccccagaacacccaggaggagaaacctggggaaactagggatgtttcagaagatgaacaacaaaataattaggcccctcgataagaagtgcctcgaaaaacccagggatctacggatcaagggaatgaaaacaatgatttaccagagccttctcgtagaaaagagagcagaaggaaaaccatgactacggaataggaaatccatcatggtaacgaaagaaatcctggaactcaacctaggatttgcagtaggttgctacgtgtgacttcatcagcaaccagggaatgttgtttggaa

SEQ ID NO: 124382 - DNA, 1557 bp, Cannabis sativa
tgttagcttagagaagtcaaggtgctgcaggggtgttccgctgccttaaaaaggtgagcgctgtactaagcagtgcaattggcttttcttacctcgaatccgaaattaggtgtgcgggctgaccttagttgaataatgctcgacaatctcgggtcctatgtcacgacaataaaacttggtaaataacttaaccaaatcttaaatttaatcctaaacttgaaaccgaacaaaatttattccccactgccttagaaatagcttaaacatcaataaaataccctaaactaggttttggaaaaatagcctgagaaaaaccagataaaaaaaaactagggtttccccttgctggccaatcggttgaccggttccacagtaccatgtagaaccggttaactgattcttattgcagaaatggaaaacctagttttctcgaaccgaaaccaaaccaaaacttcttcaaacctattcaaactctctagaacaattcaataacataaaaacatcatatttaagcaatcaaaactcagtaatacctcaaaataacaaattcaccataattaagtgaaagttgagttcttgaactcaattcacccaattctagacctaacagccatgggattcatccaatacacacttaaacaatcctaatttaaacctaaaatcatactctgaactcaaataaaacccacagtcctgaaattaagcaaaagcccaaacaaaattcaacctaaactttaaaaatcatcaagaacacatggaggaagcttatctcaagattttagactgaacttaaggttgatttctgcaagaaaaggtcaaaaaattggggtgaactcctagttttcttctggatttctcttgagccgaataaagaagagagagagaaagtggatgggttttgtaaatatcttgatttctttgatttatcttctaaaacttaaattaataatcaaatctaataaaataaaaaaataaccatttcagcctaaaagaaatcatatgagacaaaaataatataacctaaataaaatgactattctacccttccgtctaacactaaagctaattaaacctaagggtattttgggtcatttccaactattctgactaaaccaagaactcaacattctaacctagtctagtataatatcaacataacattctattaccgtcgtgacatttctgaccattccatcgagtttttactgtcaccgaacctaaaaatttttttatttcaaaatagtatatgaaatacccacatattctgataaattctctgtaattaataaattacgcttaattattcatataatcacatatttaataaaatatatccaaattaacacaatcataatttttgggatattcccatgcatccatcttgcaagggatctctagctttcaatactgagataattgagattcaagaaccctaaaccaatcccacaaagataaatggttcttcatcctctggctaaaaagtatccatttttaatttacattcgatactgaccgttgttaggttatatttagcctatgtttcgggtctttaaagtt

SEQ ID NO: 124383 - DNA, 911 bp, Cannabis sativa
aaaaaaaaaaaaaggtagaaaaataaacaaataattttatattattaaaaaaaatttagtttttaaatcatttattttatttttttaatttaaatcattttaaattaaaaatataatttaaaccaataatttgttgacacgtggtatttttttttgaacaattctaataaaaaaggactaatagacttacgaaaatagtgagtttggggattattacttctaatttttgaagttgagaacttatttgtattaaattgaagtttttgagaacttatgccgtaatttttcttttaagaaaataagtcatttacttcaaataaagtatattcttttagttgtttagagcataaattggagattatttttttatcatctagatcagttagtgttgcattttattttattttttttaataatcttaattttagtcatctggtttttaattttttttgttttctttcaacctattttttttttttggggggaaaataaaactagagagaaaggattgttcttgtgaaaattatataattagattggtttaagaaaataaattataaaatgaacaagattaaatttaattttttagacatggtgaatttcattcgaatttttctgaaaagttcaaagaaatgtatgtggatgaatgagaaaaaagagagaaaaaaaaagagagaaaatatattattttattaatttagtaaattgttatttatttttaatatataattaaataataaataaaaaataatccaatatattccaaatattaactatcaatatacacttatacctttattatcattagatctatatcaatagcaagcaataatttctactaaagaaatgttttatatttattatatttatttttatttaatttctaaatatttattatttatttttattta

SEQ ID NO: 124384 - DNA, 910 bp, Cannabis sativa
gctatattcagattttacagtattctaacagaaaccaattaataaagaattaacgagcagagcgctacttgacttaaaacatagtatgaattgaatccttaaattgttgtttcaagctttttgtattttctttacaaattttagtttaacaattatttatctcacttatatgaaagaaaggcatacaataaaatgactttaatttatttaaaattttaatgacagttttagaaaaattacaatcatttaaaaaatttgaactaaaaaattattctgcccaaataaaaatataacaaaacaattttttgagtatgtgctatataattttccaatattttcttatggaactttctttcgactttaaatttattacttaaaaataaaacaaatataaaagataaaaaataaatgccccaagtcagtaaaaattcctaactagtaaaaatcttatcattttcaaagaggattaaaaataaataagaaatcaatatatatatttttgaataaagcatgaaattttattaaataatagcctggaatttaatcggaatatacacaagcaggattagaattaaaaaaacaactaaataatcattcgtctaattcccacactgtttcacaaataaataattgcaacttacaattaatcttaaaaacaattatattctatttcatccactgttcagaaaacacgacagtaaaaactgcagtaagtttaacctcatagcttgagcattcaactactctgtaaggtatgtaactgcactattaacaatcctttcagtcgtaaaaaccttgttatctcgaaccactaacaataattaaatggcgagccattgaagaagaaagaagaaccaacaacgaaacaaaacaaaacaaaactatgtcacataaacaagactaaaacact

SEQ ID NO: 124385 - DNA, 864 bp, Cannabis sativa
catagggggtgcgtgtgtattggaggtcctgggttcgagtcccagattatgctgatgtaatatataaacgcttaaatcaaaaaaaaagaaaaattattttcgacatttgtttctcaaattatgttttatgtatcattatgtttctgaattttctaagtgtaaaaaatagttgtcaaattaactattaacaatattataataattaaagtgatcattttgttaaattttgtcacatgtggcaaaacttaacaagctaatattaaatgtgtaatttaaaataaaaataatatgaaattcaataatataatttttatcaaaattaataaattgaatgaaagtaaactaattattattaattataatttcagtggaattttataaaacacttgctgaaaaggttgttctagtatattttcaatctatttcggtattttagagattttttagtataaatatttttatgattatgtactttgtaattatttacactaatactaaaaaaggatttctcgactatttaaaaaagttgggtaatgttattgtcatcggtctctataactaacgctcatggccgaccatagggtgggactaggcctcaggccctacaattttggagaccttaaaaattaaaatttatattatatatgtatagaaacaaaatataatatataaattttagtttaatatattgcaatattgtagtacaagtcattagttaaaacttaaaatgtacatattgatgttgggttcttaggttcaatcctcgccattgtcatttttggtttttttttttaaaaaaaattcttttacatatataaatacaatattatatatttaataaataatcatatatataattatgta

SEQ ID NO: 124386 - DNA, 751 bp, Cannabis sativa
agaaattgtaatttttaaagccaaaatgtaattaaggttaatgcaattatcaagatcatttcaaatggaagaggatcttaaatgttgaaatggattcaattatgtttaaatgttaaaacacttgaaaattagttgacccaattggatgcgtgggtatttcagaggaaatatcacactgatggcatggcatcatacaaactttaaaattagattattgactaaaaagtatagacaaaaggaagaagttgattatttttgacacatgaaatgtagcgagaacaatttctaagtgtactatttgccttggcgacaatatatgacatttaggcaatgtttggcatagtgtattgtatagtattgtatagtactatttattacaatattatgtttcacattgacttttattaataggttgtgaaaaagcacactatctttacataaactcgaccccaaccccacatggccttggaccttgaccccaaacacgaaccccgaccttagactcggctctggaccccgaccccaaaccccgaacgcgaacaccaacctcagacgcagcctcaaccccaaacctgaccccgaacacgaaaccagactcgaaacctaagcctaaaccccgaccccagacttgggcctggacccccgatctcgacccaggacccaatcctcggctcatggcctcaggcccagaccctgacccccaacctctgcctcggactcaaacccgagctcgaaccctggaccctagccc

SEQ ID NO: 124387 - DNA, 973 bp, Cannabis sativa
ttaagatttttattaaaaaaaaaatagtaatttttaacttattccctatttatatgtattttggataaataaaaaagatgtcaaaatagtaaaattagttattgagtacttttatatttgtgtgaaaaataatggtagtttaacaatattgttttgcttctaaaaacaatattttttttcatccaaaaaaaataaaataatatttatctttttttttccatcaaatatatagatatataaatctttattatattaaatatggttataaaacaaaaagtgtcttttttaaaactttataatttaaatttaaatttaatagacatacctaaaaaaatatatatccattgttattttttataacattagacacgtattcaaaaaatatttttcaattattatttgtttagatatctaaaaaatattttaatatattatttttttatattcattgttcatatttaaaaaatatttttctatcaatactttttttaaaaaaattaaaatagagaaaacgttgatgatatatgacttcgttacctattgtagttaaaaaaaacaaatctttctagcttttctaaaaaagaaatacaactaaaaatacacataattaaaataaaaactataaatatacttaagcatacgtacattacacataacataacctaatatatcttacctataattatataaatgtgtatttaatagaatttgttgtggttaacagatttgttgtgtcaaaatgttaaatttaacggaaacagttaagtaagtcattaaaaagttaagttgcaactctttctaatattcttgatagcttttcaaaagattgcaaacaattatatgtatctctttcaaaaattgcaacctttcttcctttaagttagattctaaaaaaatgaaatcagttgtgaacaagcaagcatttggggaaaaaaatagggtaaatactattttgtaccctgtgttttgcaaa

SEQ ID NO: 124388 - DNA, 1932 bp, Cannabis sativa
attgaaatgagttttatttacagcataaaacccaacagatggctgggagggacacgacaagaggtttggattccatgacagggcagttggagaatgatgcagttactggtataggtcgtgggaaggaagttatgggtgataataatattcaaaaattaaaaggaaaattgtatatggattctgatgtgggccacactaataaagagatgggctctttacaaagcccacatatatttgaagctggacagagttcaattgggctggagaaaattggacctaatagcctgtcgaatcactcacgaggggaagcttttcgaggtgtctttgattcccagttaacaaaatctattgcagggaatgataaaggggtacgatgtcgtgaggaggaggattgtatggtggagttcgatattgaggatgagagggaaggaagaaaatggaagtgtggtcggaagggagctactacggatggcggggcagctccggttgaaggagatacgatggtggagatggtggatactgggcgatttatcatgggttgtggaaaggaagtgcaaggggacgggcaccatggtaaagaaactaggaagagggtctcgattaaaaataaggctcgggcaaaggctaaaatgggtggatcgcaagtggcttgtattctatccgagaagaagaagatggaggcaggtgcggttggactgcctgaagttggtgttcttgatgggaatgaaggaaaccgaggatgtgattctaattcggaggtaggtatttctaattgtttggatttaccttcttcttttactgaaattgaagcggcgagccttgttaatcaaggccgccgagagcaatgaaacttttaagttggaatgtctaggggattgggaatccctggacattacgagcattgcaatcccatgtgcgtgatattagtccgagtctaattttcttagctgaaagtaagttaaaccgggctcaagctgaaagggtgtgtaatgttcttcaatatgagaatttgtggactgtggatagagttggtttgattgggggttgttgttaatgtggaaagctgatatttaggtgcaagttttttctaattcacctggacacatacttgctactgttgtagggagcggatttccgccatggcttttaactggattttatggtaatcatgaagcttgacaacgtcgtttttcatggcaactattacgggatttgaggaaggaagtgcaagggccatggctctgcatcggggactttaatgaaattgtcagtttgtctgagaaagtaggtggtcgagatcgtcttccaggggttatggatgggtttaaagaagtgttagatgattgtcgatttattgattcaattctacgaaacatgagttgacatggtgcaatgaacatagtaattcatggattatggagcggttggatagagggttgtgtacagaggagtggttggaccaattcgaaggggctgatatttcgttgcttgattagtgggagtcggatcatcgtgcgttggttgtggatatgccggttcgagtggatggagttaaatgtgggaagtctaaacgtaagagtcggtttcattttgaggaagcatggtgtcaagaggaggagtgtgctgagattgtggatcgagtgtggcaagaggaaaatggtagtggctgactgggctcatttagatgtaggattaataagtgtgggaaggctcttcagaattggaatcggaaaaagaagcataaactaaacaatgaaattgagatgattaaaaaagcgctccatgagttaattatgatgcaacaaccggggtgtgggagactatacaacagatggaagctaagttgaatgggttgcttgaaaaggatgaacaatatgttggaatttattttaccaggatcttagatctacttacaagtatgttgtttaaaca

SEQ ID NO: 124389 - DNA, 953 bp, Cannabis sativa
  modified_base (904)..(927): a, c, t, g, unknown or other
ggggcaaaaatcataattagccaaaaagaaattgtttattttttttttaaaaaaaaggaattatttatttcttgtatattgaattgtcttggctgaatagaatgaaatataaaggtatatataggccaattagttagccaacttagagagctaacaattagttatggaattaactacagttagttggggaactaacaaacttacttaactaagtaactaattacaaggaaaaaaaaataacctaactaatattaactaattacaatggacattgctatcccgttcaacaattttttattgactgaggatgagggatttgctgtttgtgtggcagatggtgtcattttccctgtcaaggtggatggttcatcccctctacaagagccatagtaagcattgcttggaactgtagaagattgggataaacctctatagtttcaaaattgaaagccctaatttagccgtactctcctaacattatttttactactgaattaaaagtggaagctgctaatctggtacgtattcttaggaatttacatttttataataacattattaatcctgctgtgggtaatgcggagggtttaattctagcttggaaggtaggttttagttttgaaagtgtatgtattttgagaaactagattttgggtattgtgtattttgaccctgagcataatttttggttgttgtcttgtgtttacgagcctccatatttctacggaacattatggatctcagtttcaaatttggcaggccatggttgatcctgggagatgagaattttgtcatggttgaacattatgttattttagtagtgttttttttttaatcatggttgaacattatatatgttattttgatgttgttttttttattaattttaggctaattagtaatnnnnnnnnnnnnnnnnnnnnnnnnactaaatcgtgccccctgaacttctt

SEQ ID NO: 124390 - DNA, 564 bp, Cannabis sativa
  modified_base (508)..(508): a, c, t, g, unknown or other
tacttgttagaaaatctagatcctggtaaaatatttccaacaagggattggccgagaccaaagacagttacaaaagtcaggagttttttgagtttggctagttattaccatcggtttgttgagggattttctaagatttcaacgcctttgacaaaactcactaaaaagaatcaacggttctgtggacagacaaagaaagcttccaagaactaaaacaacgattgatcatagctccgtattggccctaccatcttttaaagaaaagttcatgttgtactgtgatgcctccagacagggtctgggatgcgttttgaagcaagctggtagggtaatcacttatgcctcccgttactttaaaaaatatgaatagagatacccaactcatgatttagaacttgccgcaatagtatttgctttgaagattcggcaacattatctctacagagaaaaatgtgaagcttacacggaccacaagagcctcaaatacttctttactcagaaagatttnaatatgagacagaggcggtggttggagctggtcaaagattatgactgtgaaattct

SEQ ID NO: 124391 - DNA, 1205 bp, Cannabis sativa
ccctttatgtcttcagtgttttgggaacttaagtcttctcctcaaacgactttggtagtgagcatttttaaaaagtgaagacaaattgggataaaaacaaaagaaatgtcttttttctagtaataatggaatcaacttttgtgatgagtcgattgagcaatataatgaaccatttgactagtttataccttcatatcaatagagtacttattaagattccaagccacaattatactttccttatccatccaagggtttgttatttgtaaagcaccaactcggaaataaactcgaatacagagtatccatatttttattctttaccttagttttcaagagactaaccagtctaactttcttagaattaatcaattgcttgatttcaggatgcttataatgctagttaatccctctaacattccaccaaaggaatctatccattggaagttgagggatctgatcccccttccctatgttgaacccaaaaactcctccaagcacttgctctaaatcaagaacaacagatggattaataactgtagtctctattgaaacattcttagccacctttttcacttcaataactttctaaaagccatcactctgcaacattggcatatgaaacatgtgctctttgtggtactcttcttaggttgccaagtctacttaattagtttcttcttcctgcatattttagtctcatgttcaaaaccagaagaattatgacaaacaagtgatagctattcatactataactctaactctatgtcatgatcaaaatcaagagtaagtcaatatatccctgtgcttggtgatgttttccacttggattggtgacccaagttgtcccactatcttaaagagcgattgttgtccaatatttaatatctagctaaacccttcaatttaatccaagtagaaactaaagtaacatcttagtgaagtcatccccttccgttgtttcataataagaaattttctatcaaaggatacgaatcctcctacaagtacattaacccattgctccaagctttaaaatatgataataaaaattctatgagaaggcatactaatattttcttccaaattcttctcacaaattgtaggaattttcttggtgaaattccaagaatgccctacaccactcaagcttatagtcaaaaacgacagggacaaaattatcccagaaaaattcaatttaaaca

SEQ ID NO: 124392 - DNA, 1075 bp, Cannabis sativa
tttggaaattggtgtctagaaaaattatatgcatgcatgctcatattgcatgagaaaagcatgttcctccactcacaataactcccacactacaccaaacctacgtctcaatggaggaagttgttttcgtaagtatatttagattaatatttagtcgttacattaaaaatataattataattgttatatttttatatgaaatactatacgttattattaataggtaaaaatcctatttttaaacataaaaattattataattaattaatttttaattaaaatatttaataagatattttcacgtttataaatatatttttttattttttatttataaaaaaataataaataaaatcaagaagttagtatcagattataatttattaattatttttgtttaatttttaaattaattacaattatttaacattcatgatctaaaaattaaaataagtgtaaccacaggccattatatatttaatgtaactaatgaaatctccttcataattaattatattatgtgatcagtacatatattataattatagcatgttaattttaaataatttatattatcaaaaatagaattcaaacagttaattatttacttatttgtttcaatactcgtgttattcactattttaaattaaattataaattattttaatttttttgaaaattaataaaatactatgcatgcggtagaaaaaaatgacacatctaccgaaaaatctcagtgtatagtaagggttaataatagggacaaaaattaagatttcttgtttctaagtctatatggctatagaggttgtcttttttctctcgccaggcctgccgtccttccttgggcttaggtgtgacttggtcagggttttttttttctatgcaattcgatttttgctactgcgaatagtcttctctgtgattattttgagtgtttagtcttgtcatagtgacatagttttgattatttttgtcttgtcttaatttgtgacattattttgagtaattttcagtcttgtctgtgtagtacagttttttttttttgtttttttttttatttcgttgttggttc

SEQ ID NO: 124393 - DNA, 552 bp, Cannabis sativa
  modified_base (62)..(62): a, c, t, g, unknown or other
  modified_base (509)..(510): a, c, t, g, unknown or other
gtatctaaatgttatgttttaatcgcaagtaattttttgttatgactaaaagtcacatttantcacaaaaaatttatgttgtaactaaaatattatcactaaaagtgatttttttgtagtgtctcttgagttaactttaaaattttgtaatactgattgataaaatctcgacattaaattttggttttaatttttgtataatttacttattattaaaaattaattttaagttttaatttatgttaaaataatttaatttattagataacactataaatattaatttcttacattgtataaattttattacttgtttgatctacgaataccatatgtatgtagtgtcttttaattctcaattatcttatttgtcatatcaatatatttggtaatttattatcttatatatgtagtttatttggcaaccataatagataatagggcattacaattcggtatcagagccgcactatacttttattgacaacattttagtcacaacataattnntttgtgactaaatgtgatttttagccacaacaaaatgttact

SEQ ID NO: 124394 - DNA, 1003 bp, Cannabis sativa
ttttttttttggggggggggggttctcgtacattccaaaaaaaaaaaaaaaattaagaagaaagggttgaaaaaaagagggtaagaaaagaaatttattttttttaaattatatttaaaaatttcaattaatttttaaattattacgtggactacgaaaaatttgtcacgtaggtagtccacggtagtacttaactgaaatttttaaacgaaagtgtaaagagcaaaacagaatgtgggttcagtagtttttgccgtcaaaaattaaatttatgtgattaagtgttaaaatatataaaattcaagtgattttcctgccaacatctcatgaaagaaataaataaccgcataaagtgcggtttcattttctagtttgaatataaggcaaattctttttctttttaaagaaaggcatgatatgttttgttgcttccatattgtaatctctaatttcatttttaaacaatttttttttttgtaagatttttaaataacctatttaagtccaaatatatgataaaagtagaaagatatctaaaaaccttaaaaagtagaaagatatctaaatttaaaaactttaaaaagtaaacaaagattgtttttaaaccaaattaggattgagaatttaattgaaatcattttgataattttaaattttttgagcaagtatgtaaaattatgaaatttgcctaacacatatagatggaaagttcataaaccacctcaattatgtggctcactattaattgcaaaatgatataattatatatatttttaaaaaatattggcctaatttgatatagatacatttattgggcaattttatggtgtggaaacacttttagcaaataaaaatttgccacatcagcatgtttttgtaaggtgagaagtattatattatttatttttgagtaattgacggcataaatacttaattttaacttccaatagcaaataaatacctaagtttaatttttggcggtaataataccgaagttataatt

SEQ ID NO: 124395 - DNA, 605 bp, Cannabis sativa
tggaggcttgaagcggggacgttacacaatgcctcccttattttcccccagaacaagaatctcattaaaatccccaccataaagcaaagtaaacatatcattaagcctctcaagcagcctccatgattcattacgaagctgagaatttgggtttccataaaaccccatgaatctccataactcaatcactaggctcttcagcagtgcatcaatatgaccattagtaaatgatttaatcgacacatccaaatcatccatccataatagcagcaaaccactacttttacaactacaatcaacatgaaaattattaagaaaattaatctgtctcttcacaccttctgcctaactaccataaagtttagtctcagatagaaagaccgaacttagagaatacttacgaaccactgctcgtaaggcagacaacgcaccggggtttcccaatccccaagcattgcaacgaaggagacttattgctcttggcaagtctgtgttgggctttgtgccctaaataaagttctatttcaatgtaatctttttctattcaattatcaataaagaaacagatttatttttattatttatttaatgtgttatttggttca

SEQ ID NO: 124396 - DNA, 600 bp, Cannabis sativa
tcggcatgtgatttcggacgtggaaattgactaaaagattataataggaggttgtaattaacatttctcttgaaaatttgtaactttagaattccacttatctttttttaacatagaacattaatttttgcaataccaactagcctttaagggaacttaatactcccactagtcttgattttcgagatagaccttattgatccatttaattcaatgattatcctttttatattaaaatctctttaaacaattatttttaaaattcataaaaatctacaaattatgaattttaagaataacatcataataatttactttctctaatactttaatttattttattccgactactaatattcttttaataaattataaatatagacaaaactaatatttaaatatagttatatcaattactttaaataattaaaataagattatttataagtactctactcatttgagtaatacccgtaccttactcacaaaaaataatagattaatagcatcttaatcatgccacaactagattagctacttaaggctccaaagggtcatagcccctcccaaaattttgaagaaaaaaaattatatatatat

SEQ ID NO: 124397 - DNA, 1680 bp, Cannabis sativa
aagataaatatggactcatcaccgtccatctttgcaagaacccgatttatcgtgaaaagagcaaacatatagatataagactctattggattagagaaaagataaaagaaggactggttgaattagagaatgtcagatcagaagataatcctcctgatgttgggactaaggtcttaacattaaacaagttcaagcattacttggacttgatcaatatcagaagttagtatactgagatttttggaacaccaaccatgatggctttattctttcttcatgccgataattttttaatttgaagaaactaggttaaatttgtggtataattcctccaaatgtaaaggtctccaaaagttgttcttcttatggaaagttagaagtcattcagaaggctgttcctaaaagtctatcttgtccactctagaaggagtttccaaggaaagctagtcttcttccgaaaaagagttttttatggatatttgtttctcctgaaagggagttccggatagttgactccagttgtcatctttcctatttgggaagtcctttcagcgtatgctctggtcttcctttcaagaagcgtatgtctcatccagaagcgctctaacttaagtttttgtggagactctgttacgataagtttgttatgtcgtaactaacttaacaacttaacagtttcagccaccgaatttggaatctatatcccttatttataaataccaccaatacttatcatttatagtaagtgataaacatacgagttttgagaggtgatttcgaagagagagattgagaggtagagagagtttgggtttgggttttgtttgaagaagcttctatagatgaagaagtttcttgggtaagagtgtgagagataattaaacactttgagaggatccaacagagaattgatcttgactctaatgtactttgttcttgctcattcaataaagaagatttcggtggtgttccagaactaaagtagagtcatagatcacatcgatttataagacttgaaccaatatatatcttggtgttgatttaaatgagttaatcgctttatcatttctggttttagatactctgctcatccctgtttttatctccaattagcatttgtgaattgttactcgtattattgttaattatttgttgattaagttttagttgatttgattctgcatattagttgtaatattcccacacatacattttatgtaatgatatgaaataatcaaacacattctatccttaataaacgagtaataaaaagctactacttatcaattattatacaattttttatggattagagtcagaagaattatgtttgagtcgaaaatgggtcgacacaattattataaaattaaaacaaatcaaacacgacacaattcacttaacgcaaatttaatacattttttttttaataaaataggataaaaaaattcctaaatctaggctagctcaagtggccataggagggtgcgtgtgcattggaggtcctggttcgagtcccagattatgcattgtaatatataaaacgcttaattaaaaaaaatatatcttaaaaatacttaatttttatgaaaatatataaataagctatacataagggaaatttgaaaaactatacattaaaaactctaatattttatgcttaaatcaatacatttcaaaata

SEQ ID NO: 124398 - DNA, 606 bp, Cannabis sativa
aaacaagataaacgtgacatctaaattttttatcggttgtatttttaaatatatatgtagataatgtaatttcactactcatcatatggctaagtgggcgttttctcaacagatgtttaattttttgccactatgctctatgttcgatgaactctttttgtattgtgcgcaaggtctaactgcttttcatttatatatatgcaagcttttcttaacaaaataaaatgggtgaattggagtttcatgtgctggaattaattgttaattcattcttttactttctgttcgaaagatgaagaaaaaacaaaaagtagcatgcaccagccgggaatcgaacccgggtctgtaccgtggcagggtactattctaccactagaccactggtgcttctacgttcaataatggtatcatttattatttatttaatatcttacaacgaaatttctactaaaaaaaaaggtatatatataaaaaagtttgtggttatatagggtaaatactattttaaatttattttgtaaaagatactgatttgatctattattttattaaatgataaattggttgtgatattttttaaaatagtactaaatagaatactgaact

SEQ ID NO: 124399 - DNA, 978 bp, Cannabis sativa
  modified_base (886)..(891): a, c, t, g, unknown or other
gaaacttataaaaaaaatacagtaaaaatgtaaaaaataccacctggcagtatttttataaaaaaaatagcaaaagttattataccatgtaaatttccctagctaaataaagagtacaagtccatagccaaaactcataagcttagggacagctgtggcatacttagtgaccaaggaattgtcttttttatttcttatttattttaattaattaattagttagaaaataacctagattcctagtattagagagctattctttacacttgattttgcaatcaaaatctctctaaaaatatcgtatagccgccacttacaatctctctcttcccttataatttttgaatatcttattcaaagaatagcctgcaccattctatttagtacattaattgagcattgcataagatcctgaaatattcttgttcgtgttcaattgaatattcgtcttcattgattgataatattctgtgatagaaaaaaataagggttagattattgagcgaaaagaatcatatttcgatgtgctacaatcactttaagtattctaaaattcacacataattcaaagattttagataacatattatagaaaaattattatttatgttaaataattatttacatgagaaaataatgtgatcatgtataagtatttccaatagacaagttgcacaagtcgtagtttggtgtctcggaaagattgtgttaaaatagtggttgtggcaatcccaaaggcggttgtacctttagctgaatacctttttacgaattggtaaaggggaaaattctccgaattttgtgggattgtgtcagatatatgacacttaggattcatctggttaatggtcaatcctggatgataccctattttaataatttttannnnnnataaaatttatatatttaattgtaataaacttttttctttcaattatattcttaaaaaatgtacatatcaaataaaaataaattata

SEQ ID NO: 124400 - DNA, 1936 bp, Cannabis sativa
gatttggttcaatcaacaatcgttatcggtaggaccagtcctaaggtatatgaggcctaaggcaaaatcaaattttggggcatctatatatagtttaattattatcaaaatgatagttttagtactttagtgtaatggtaaaacttacaaaactctaaagagctctaaggttcaatccttcatagctacacattaaatattctttaaaaaaatagaaaagtatccttgactcttaagaccctctaccactacactaaataatatttttttctattttcttcttatttatatattaatatttttttttcacaattttgaggccctgagcgttcgacggcctaaggcgtacgcctagctcctctaccagggtctgccctggtcattggcaacccctaacaaaatgatgaagtttcagctcgggacgatggcaccagtattgcgagcatttgagaaccccaatgttggttctccttcgcgttcttcactctctctccatctctttctcgacttctctcttcttaaagttgaacgaagatgctctaatcgtttgtgacctaaacaaacttcaccacgaggttcgcaacccttaaaaacccctagatttggatttctaccgctctgtctccctcatcgcagtgtccctctctaattgtttctctttgcttgattttggacggagcatcttgacggagatctaggcaaggatttgatgggacacctggttttggcagagatttgggcaacaccgttattctcggcacggtgaagaccggtttagggaaaagtctttccttcttcgtacatgtgagttaatttttattgatggtatctcatttaatgtttcagtactcaataatttagaaatatgaataaaatttgagaaaatttttgaagctcaagtgtgttttgtattttctttttttttagtgggttttgttactattcctatatgttcttgttattttgggaaatttaggggaataacaaattaggaagaagttatggaagatgattgatgatgaaattattagagtgggggttcgtaatttttaagtatattttttaaattatgtttaattttattttttatatatctaaaatgactattaatatatttttttaaaaaaattttaaaatgattgtaaaaggtttaaattgatttttaaataaaaaaaatttaatggttagagtgacacgtggacagtgacctgacatttaatggccagaacttacagaagttccaagaccgcaaaattttttacttaggcatcaatctgcaaccgaaaattaaatttaaatattttcaccgtaaattatttttcttggatactttcaccgtaattttactacaaatattattttaatttaagtaattttacttactaaatttcactaaaatatagataaagctactcttacttttcaaaaataattttatacattaaaccgttacaaatagtaacctagtacttcttttttttttcttttttttttttaaaaaaaaacaggagtaactttttttgagcccaaaaaattaaattttattaaatcaaatcagctaccaagatagcttccaaaccagcagggacaaaacccccgcgggaaacacagccaggaatagaaccagaagaacgagctaaaaagttagccgcctggttctcggaccgtttaacgaatctaattgaaataggaaatgaaagagaggattgtataagagcaaaacaatctgaaatcaaaagtctcaccggagacaacaaccgcttcttctgttgcacggcttgcaccagcagcaacgagtccgactccataaccacacccgcaggcacaccctgtaatacccgattaaaaatatacatatattttaaattttatttgttatgcaatttgtatgagaataagtattttatttatttctactaatagtgaatagagataa

SEQ ID NO: 124401 - DNA, 760 bp, Cannabis sativa
tggtaaaataatttccaataataaattcagcataggtgaaattgtgttttgcatttattttaatatgttaaatgtgaaaatttttgcttaacaatgttctttctaaaatattgatagatagtaagagagtttttatttggttcacgcctatttgtttcaaaatttaagtgagttttttttttatttatatatttacttttataattgtgtccattctaattatttaaaactaccggtacatcctacttttataattgtgtacatcttatgtgtttctatatttaagaaattatttttttatttatttacttttatatttatgtacatcctaattatttgagattaccagtaaattttgaaaaaaatcacgtagtttatattttcaaaagtaagattaaaatattttttttataggtatattaattataattattattttgaatttattttcacattatatgtatgtataatttaaaattcttaaatttgatagtagcctttttttttattaaaagcgtgcataaataaaaaatgtttagaccacagttattacaaaataaattagtaaaaataaaagtagttataaacaaccatactgccggtaagtaaaaatcgactttaccatattagtcgtaaatcgccaaattttacaaacagtcttaattcactaaaatactctcttatagtcttaatttgccaaattttacatgtagtcttaattcactaaaatactctcttaaaactaatatttatagttaaa

SEQ ID NO: 124402 - DNA, 1550 bp, Cannabis sativa
caattgtttttttattttagtttagttttggtattttcatatattagcttttgaaggagatttactcgaactattatacaactataatattaactacctaatttttttttttttatttttactgcttaatataagagttgatgttgtgtaaaaaaaatatatatataaaaaagaagagtgtaggttcttatttgtaattattataaaaaataatattaataaccatacttattttttttcaagagaaatattactataaaattaataatatatattcttttgatgatccgtttgataaattatggcagtcaaactttgtgtagaaaaccaattattttgttgatgttgcaccaagaaccaaatgaaagagagcatatgtaaaaggaaacaatgttaatttaactgaatctgtcatctcattaaatcataaaaataaaaataaaaatataaaatattattagtttaactttggataaaaataaacacatgagtaattataaaatgaataaaattatataattacattaaatcataataaaattttaaaaagatttaattaagaatttaaataaaaatttaatttattttcaagattaaatcaaacacaaatatagaattacacatcaaattaaagtaaagatgaagaaaacgaatttcaggttgatctcctatattctccttctctttaatattatttaaagtatttttgttcttaatctcaagttaattaaaacctaatttttcttaacttttgaacaaaatgcccagcactgcatgccgccaatcttaaggggtaggacagacccacatagaagcgagaaaggacaattgtctcacttgaaaaaaaaaaacaagtaaaaaatgtatatgaatttcagttagttacgacatatatttgtaataaaagataatatttataaaaataatactagctttagtgtaaatgtaatggttaatctaggttgcatatatgatataagttaaggggtcgaagcccattaatttttattttttttttaagtttatttcttcccgtgccttaaaaaaaatgacgcctccctcactttaaattctgagtccaccgtagacgtgtttgcttaggcttgcgaccctctcaagattcaagaaaagcaccgttttacctgacttatggtccacgttgtaaacaattgtttttttattttattttatttttagtatttccatatgttagtttttagggaggttcacttaaactattatagaacaataatattaaccacttttttttttattatttttcatttgtatcgcacctccttaatataaaagttgatgttgtgtcaaaaaaaatatatatataaaaaaaaaagtgtaagttctcatttgtaattattataagaaataatattaataagggaaaaaaaacagaaaaatacaaaagaagaaaaaaaattacaaaaaaatacatgcactaagccttcagctgtacagagcgaaccatgaaggtgaaaataccgcgatcgtttcaaaaccgcaaaacaactaaaatgaaaccaaaacgataaaaa

SEQ ID NO: 124403 - DNA, 1373 bp, Cannabis sativa
gttacagaaaagtatatttaggtaaagcattggcaaccacattaatagttttaggacaatacaaaaaatcacactaaacaaatcatatgaaacagataattatcattaagaataagaaccaagcatacaaaaattgttgagtttgaggaccacactttagcagtctttctcaaattgcacccgctcaaagccaaacaggagatggtctgtcgaagtgcaagagcctccgcaaattctggttcgaaataggcttaaactctcaacgttaaagaagccaacatcacacccataccatcctgaaccaccattccctagccaaccatgcccaaccctcagtcaagtgtcacatcagtattaatcttgcaacactcttcagacagacaaagccaatgaggaaccttgacctccaccggactcaccaaactaactccacaatcaaccatcctagctgaaactccccttactatgttttctttttgataagcatcccgaaaattccacgtccaatcaacagtgaaagtcaaactcaacatgtcattctcatgaataatcttatttcctcgcaatgaagatcttggtttgatgatttcgactcatggaaccttattaaagaaaaaactctaagggaggaaaaagaataaagaaagattggattaaacttttgctaagtacaaaatcccatactcccatacttaggaggagcttagccactgaaagaataccacaactggggcagtgtcccactccctgagggttttcttcgatcaattaaaaaatctcttcaggatgcagcgtcctgcttctagagagctttctgtaattgataatgcttttattttctttttcaatttttgtgatccaaagagtaacacttgcactagaactttaaatttataaactcggtcattatattcttgtgagacctcaagcgtttatatcagaataatgcttaactttggtgtgcaaaatccttgaatgtcactgtagccgctgactctcgtataccatggtaacagctggctccgtataccaaagtgtatgtgacatacatggctctcgtgtaccatgatttttgtaaatgctcatgtaatgtgcatagctcttgtatactatgtcttatttggccctgagtgatcaaagaaatgtcttcattaatcatttgccatatcaaatctcgtaatgctttcttgatcacgggtctcggggagttgttacatgtgtgatcactcgtctacttatctagagatttgtgggttggtagtgtttaactcactaaggaaataactgtaattacctcaagacaaactctacaagctttgtttagcgtttgagagcattgtcaggtctgtgagttgtaattgattaataacaat

SEQ ID NO: 124404 - DNA, 1287 bp, Cannabis sativa
  modified_base (64)..(64): a, c, t, g, unknown or other
gttttactggtgttttataaaaacacagtatttttgaaaaattttccgtgtgacagtatttttntaaaaattaacttaaattccagtatttttgtaaatttccctttatgaattagaggcaattctttatttattatttttattttaattccatcacatttctttcttctttttctttatttagtaattacaaatattttctcacgtttgactatttgtatttaatttttgatttagtgtggttatctttatataataaaaaaataaatatgtgcatgtatttcacaaaaataatatattgattcagaataaattaataatttcataatataaactttactcttgacttttatttttattttaaaataattgttggtgttttaagatattaatttaaattcaaataagatatttataactaatttttagtaattatatatactgtgcatattgtggatattgtcccacatggaataaatagtggagtattgaaccatatataagaacatgagctactccactcatcaccaattaattttgagatagaatctcatgattctcaacaatgcatattaaaaaaaatatgcattatattttacaaattttttaataattatataaattcgtataattaccaatataaaaatataatataactaaaaatatatatatgcaaataataaagtaattattttttttattattatttttgtagttaattatttaattactttgatttattaatttatattctgattttttttttattagtatcatgattgtttggtgcttgaaactatggtatatagtttctcatttttttttagcattttaataagtttattattattaataataaagatctcttcctgctaagtgttgtttttttatataaatttctcaatttttcaatctttgctttcctataaaatttgaacaatatgtcttattaatcttgtttctatagatatggcattgtagtgtttaatttttttttttttttagcttttaatcttttcatttctattagcacttcattatatcatttatttgtattattatttatggagtaaatttattagggataataatggcaacgactataagtagaatatggtgatagcaatagatgagatataacgattgacaacgactttaaataattgaggtgtaaataatattaattgttggaaagagtgtttacttaaataataataataataatactctaatttttctctatactaccctatttattttattttatattaataattttttaataga

SEQ ID NO: 124405 - DNA, 1378 bp, Cannabis sativa
attattattattattattaaagcattatcttaattttaaaaccccatcatcaagtccttgagtacatatacatgatacatacatgtattaatacttaatatttaattaagcttacaatttgaataaatcaatgtgaaattttccattatactcacgtgaaaacatgagtttaatatattctttactagtcattgttttgtataaagctggattttgttgagtgaccaagctttgtattgggcctatgtcacaatcttcatttgcattaagaaatgtgacaatagacattctttcctttgcagagttcactactgctctgtggatattgctaagatatattccatttgttataatctgcaaattgcatatagtaacataataattagaacactcacaataactaatgtgtacatagtattgaaaaaaaatacagagaaattgatatatagggtaatgatatgtgcggtaaaataaaaaaaaaatgaaattttagtgaatcccatattaataatgtgtgggagtttaatatcatatataagatgcatgaactactcctttcattaccaattaattttgagattgaacccgatatgcattttaaaattgaatcccacccatcttaccaacatttaccctaaattagagaaattttaaaatatttaaagagtcatattaaaaacacattaaatgctctgaactcttttattttaaagcttttttaaaaataatattcatgctctacatttatagaatattatatttgaaataaataaaatatattaaaattttaaaaaagtagagttttcgtagtgtattttaaaaaagctgatatgtatgatgtaatgtaaaagtatatcgtaaaaaagaaaaagtagagtttaagtaatgtattttaaactcggaagaatggtgttattacctctagttgatctcctagattgacgaggaaagcattgggaagagggttgacagggatccacatgccatctttgttgacttggaagccatcaacttggttcaattgatagagaatggtaatggctgctgcatcagaatgaggagctaaacctgaaacttggtctggttgagggcatggagggtaatagtggagacacattccttgtattccatcttcaaataattttgaaatttccttgctttttattcctagaatcttttccatttgggagattaacatcatcgctagctttgcaagttctactgaataaattttcaaactttcactgcaatatacatacttttgcgtgttagaagaagttaggtgacgtttggtaatacttttttaattagttttttgtttttaaaattgaaaaagtgaaaatatttttcaaaaacatgttttataaaactattttta

SEQ ID NO: 124406 - DNA, 1092 bp, Cannabis sativa
acccgaacattaaacatgactcgggacccagaactcggatcgagacgtagaactggaccccggtctcggtcctatacctagacccaaacccagtccgggacctgagacatgaactgaaacaagactgggacctgtgattgggatccagatgttgtcccagggtttagacaaccggggcttggacaagacccatagtcgatgtcttgatctgagactcggacaaggactcaaagctagaccaggacctgcacccagacccaaacctaatacccaaaaccaaaacttgaacaagaacatgaccaagaccctgaaacaggaccaggacagtcaccaggacctggaccgggactcggaactagaccgaacacagccccaaaactcgagctcggacctagtcctggacccggtctcggacatagacaaggactgagactcgaccccgaactcgagactcgatcccagattgagcccttaaccgaaattggaattccgacctcgacatggacactaacccaaactcggacccgaataccgaccaagacccagaccgggatcaaaacacgggacctagaccgaaacccaaatgcaaacccacacctgaacctgggacccagacccaggacccaaacatggaccttgactaagacgtggacccaaatcgagatctgaaaaacccgcacctagacttggaataagactcggaccccgaccccaacctggaccaaaacccagacccagaaccaaacccgaacccggaattagaactggaattgtgactaggacccgcacctgagactagaaccaaacccaaaccataacccaaactcagactagaacctagaccgagaccttcactaagactgagaccagagacctgggacgtgaacctggaccgggacctgtacctgacctgtacctgacccggtcttaatccctcaccgagtcctgagacccgcaacccagattaggatcgaaaccctgacaaggacgggaacctcaacccggacgaagactaggatcgagacctagacttgaacacggaccgggacctggactaaaaccaagactcaggactcgaacccgaacccgaac

SEQ ID NO: 124407 - DNA, 602 bp, Cannabis sativa
  modified_base (32)..(61): a, c, t, g, unknown or other
tttagaaagttcttatttaggatgttaataannnnnnnnnnnnnnnnnnnnnnnnnnnnnntaaaataatttccaacaaatcatgtaagaactcatttaatgaaagatgttatcacaattaacactatttgtagaaagggttatttttcacattttacagatacttaagcactcacatctctaaaatagagaagttttaaaaatttaaagagccgtactaaaaacacgctacagcagatgctctaaaaccgttcttaattttaatgtttttttaaaatatactattgaagctctacaattatagaatatataattacttttatatattttattaattatttttatatgaggatatttttatatatttaatattatatatttgaatgaataaaatataataaaattttaaaaaataagactccagtgacatcttttaaagaaatgtaatgtaaaaatatgagaaagtattttaaaaggtatagtgaaaaagttgttgggttgggagtgctcttagggggcgtttggtatgaggtgttcaaaataatttaattatagggaatattatgaaggagaatatgattatagggaaatgtgtaaactgt

SEQ ID NO: 124408 - DNA, 961 bp, Cannabis sativa
gaaatattaattttttaatatttaattaatgattataaatatcaaccattagatatttgatctaatggtcaagaataaaatacccatacatgggtaatacccatcaaaagcatacctatatatgtattagcttctcctacttagtgtatgatcaaccccaaattcaaataaataaagtacaacaatcaaactgataaaactatttaatttaaatttgaaggacaaaaatagaaaaaaaaaacttaacataatcatcattcaattgatgcataaactgcatatttgtaacatatcaatctagaactccaccaatatatgtatcataatttgcatatgtatcagtctaacttattatttagagaaatttctcacttgaagaaactaatgagagtgaattttctctaactcctttggaaaatttttcaaagattaaaaacttgttaagttctacattaccttttcttttctaaccataattctaattctttataaaaattatatgcattatttattattgaaattatgaatatataacaatgaagatagctattaaaattaagattgacacacgtaatacttcaatcaataatattatcaatatagaaattcaaattataaacataaataaaattgtgatcatatataatttatggttgatatatatatatataaaaaataaataaacttacttaagccctttttaaagaatgtgaaacttttatctctctattgcataaacaatacgtagatgatgctaatttatttgagaaatctacaaaataaatgaaatcaaacatttaaataagagagttaataaataataattaattttagtgtagtgtaagtcatatacaatggttaatttagtttttaagcatcatatctattctatataaagtgtgcctatataactaaaattcttggtttatgagaaatttatgggtgactttttatttttatt

SEQ ID NO: 124409 - DNA, 1203 bp, Cannabis sativa
  modified_base (416)..(420): a, c, t, g, unknown or other
ttaattgtaccagcaactttaatatgtagttgtataatatttttttctaaaatttttattagcagaagtaataaactatggcttatgtgtaccacaggtcgttaaactatatatattttagtaagttggtccttaaattttattttttagcaaattagtctttaaattatataagttttgataagttggtccccaaactttatattttagtaaattgatccccaaacttttatttcttaccaaacattaggtttggttgggggaaatgaaaatataaaaatgagaatgagaatgtgaataagaatagaaatgaaatggaataaaacttaaaatgcatacaaaaatttgataaaaaaatcattaaattttttctcttattacattggaatgatttttccttcttttttaaaatggannnnncattccaccaaaatagtagaaagaacattccattgaaatgtcatttcaatactttaagagcatgtttgctttggtataatcaagattggaatggaatggagattacaattataatatttagttggccttttaacttttgtaatcctctacattgcaatgagtattaccctacttgtatgaattctcattacatgagtatgactcatgaatgaggattacaattaccaatacattacttttctacctctctctcttacctctttatcaaatatagttgacaataaataaaatgaagatattttggtcaatatattaattagtcaattttatttttatactaaaccaagtacaaaaaaaaattaattacaatgttcattacaaaataaaccaaaaatggtaacagtaatcccattactattaccattatattccattaacattcctattaccattacaattacattcaagtcaaccaaacactacctaaaatacaaccaaataaaggaatggaatgaaaattattttctttccattccattctattttattacctccaaccaaatgacattcccactattagatattgacatttttattaattattttactttctttaatttatgtttttgtgttaaattcaattttttttttaattttaataatttgagaaaaatagttatattaatatttttatttattatatacattaataataagaaagaaaaaaagataaatactagcagacacatataatagttggagagaattttagctcctcacatt

SEQ ID NO: 124410 - DNA, 2282 bp, Cannabis sativa
  modified_base (2150)..(2156): a, c, t, g, unknown or other
agggcataaaacccaacaacctagtgctggtacctaaacccaacaagaagtggagagtttgcatcgagttcaccaacctaaataaagcatgtccaaaggactacttttcgcttaccaggattgactagctagtagatgcaacagattgccatgaagtccggagtttcatggacgcatattcaagttacaattagataaagatgcatccacttgagcaggagcacaccaacttcatgacagacctaggcccatactgctacaaagtcatgccctttgggctaaaaacacaggggccacttatcaaaggctggtgaacatgatctttggagatctcattggccacaatattaaggtgtatgtggacgacatgcttgtgaagtctagaaaggctgggggcatgtggaggacctaggtgagtgcttcaaaatcctttgcagctacaacttgaagctcaaccccctcaaatgctcttttggtgtaggctcaagaaaattccttggcttcatagttaatgcctgagaatagaagaaaatccagaaaacatcaaagcccttttgaacatgatgtcacccacaactctcaaggaagtagaaggcctaactagacgcattactacgctaagtagatttttgtctaagtctacagacaaatgcgtacccttcttcaacattctcagaggcaacaaaaaattcagtttaattgaggaatgtgaagacgcattcgaggagttgaataagaaattgtcccaaccactggtattgtctaaacccctagataatgcagagctagacgtgtacctagcagtcacagagcacgctgtgagtgttatcctcacaagagaagaatgtagtgtacaacaccttgtatactacattaataaaagactagtcgatggagaaagttgatacctactcacggagaagctaacctacaacttgctcttggcttccagaaagttgaggccctacttccaggcacaccccataaaagtgtacatcgatcaaccattgtggaaggttttgcagaaacctgaagtatcaggctgactactcaaatgggccattgagcttggccagtttgagatcatataccaaccaagaatagccataaagggtcaagcccttgaagactacgtggctgagtgcacaaacttaactcttgagacccctcaagactcagaagaactaacatggaaactccatgttgatagaagttgcactgaccaattgtctggtgtaggtatttcccttacaacacctgggcacaacaactgcatggagcaatcaaattcagcttcaaaacctcgaataatgaggctaaatacgaagccctgatagctggcctcaagctggcacatgaagtacacactgaccacttagacatattcagcgattcccaattagttgtgaattaagtcctaggtgaatacatgactcgaggtgatagaatggtagcctacttgagaaaaatcaaagacttgttaagtcctctcaaaggtaacatgatcaagcagatccctacagaatagaatgtcacagcagatgcacttgcccgtgtggcaagcagcaccattactgaaaacgcaaacttggtgcgcatatagttcctcgaagaacccagcattgttgtcccagaagaatttgacatgttggatgacactccaacatggatgacacctatcacagcttacatccaaaccgaagcctttccagaagacaaaaatgaagctagcaaactaagaagaaaagctactaggtacttgatcctagacgagataatgtacagatggattttctctatgcctctcctgaggtgcgtcaccaaagtcggagttgaatggcttatgatagaagtgcatgaaggcttttgcaacaaccatgtcgggggccaaagcttgtccaaaaagatattttggcagaggtacttttggccaacgatgatcgaagactcgatggactatgtcaaaaaatgtgataagtgccaaagattttcaaagatacccagagctccacccaatgagtttacaatgatgcagtctccttggctcttcacagtgtggatgattgacttaattggtcaactccctaagggaaaaggtacaaagacaaaagctgaacccctggcaacaatcacctctaagaaggtccttnnnnnnnttgtcaagaacatcatatgtcggttcggccttccccagaagattgtgccaaacaatgaaaaatagttcaatggtgacatgttcatgttgggttttgtgccctatttaaacccatttcaatataatc

SEQ ID NO: 124411 - DNA, 2342 bp, Cannabis sativa
cgtcgggtaatatcctccgtaagccacaatctgggcctcttccatattaatgtatttctggactctcttctaaaagtcctggaggctagccgctccttcctattgcaactcattccaaaaaagggttcctgtacagattccagcttgaagcagggccaactattgtccatcatccacctttttggtttttgaggcctcctccttgaatctctttatgaacttcttcagggttttcgcaggtagttgttttatattgggtagggcactgacctcaaggttgatctttcgtgccgccacgaactgctgcagaaaactcacttgcaacttgttccaacagtctactgatcttggctgcagtttcttgaaccattctttggcagacccgctcagtgtcagtggaaagcatagacgctttgcatcattactaaccctcatgatggtaattaccctattgaatcgggacaaatggtcactggggtctgagtctcctatgtaggttgccatttcaggcattttaaaatttttggggagttccgcctctaggatgtttcagacgcaaggctcccggtcctcgcaatcaaaatctgagtcatcccccttttatctccgggcgactctagcaatgtctttgcggaggatcaccaactcggcaaagattccctcattcaaggcgtcccttgacaccggtaccgcataccttttcttttcgaggtggtttctcaagtcaccatgtttttcgttaattttttatcttatatcaacggggggtgccttcgacctttcctcccctttccctgggctcctagtgcacagacacgctcttttgatcctctcggtcctgagggccaagactctctcaagggagcttgcccctctgcggaccttttcctttcgggaaatcagagcgcacctttctaggatcttgggcctttttatttctcctagggattgaagtgggatttttcctaggattttcctcaaaagggtaccgtataggacttggctccctagttttgggcctttgggttcttggcaaggactcttcttgtgtttcttctagtcctgcaggcacgactttgggattcacatgaattccagctatatccatggccttttgcatggcaaccattatttcttatatccttctacttttctctttttgggcagccagttcggcctcatgatcagccgctttttgcattaggactaataactcagtgtagctactatcgtcataagcatcgtacccttcgggattttcttcatactcctcatcgtttgactcgtcttgttcctcaaagcccacatttactcctgaggtcgcctcttcacttttgggttctaaggatcctgggaagacgaggttggcctgtgtggttctgagtttcaaccattgaagcttagattcttgactgttgtttctcgaacaacgtttccctcagctcttaatgaaagcactaaaatattgactgagattttcggtaaccaattaaatgagataataatgagagctttgggataattaatgctaataatttttacgtggttcaagcattaatgagttgtagtccacgagtctctgttattaatgagagtacttccttaaagagaatgttctttgtgtgttttttctctcttttttctgatccccttcctcattttctcaagggtatttatagagattagtgggaatagtcgaaaaggggtaacttgtctttgagagccagctatggataagcgcaagtttccaaaagatacaaaataaggcatgcataacctacatagtaggcatcgtagaggttaggtgagattagccttcatccttccttgattgatgtgattcttcataatggagccgtcactagctcctttgattatagtgtaatcgccctaaatcaggcttacgatgtctgacatgttctcttatgggcgtttccagatgcttttaccatgctgcattaaatgcgaggtgactgttcaagtagctccttgtcatcctggaggtaccttcctatatcttaactcccagaggagaaggcgtgccttttgcacttgttctggagctaacgccatgaaccatacttgttgcctctccatacgacttttaacttatcaccgggtgaggtgtcttctttgtccgcatgtcatatatagcagtgaccacgtatattaggaataaactgaggcaacaattaggattataacaatggttagtgtatctatatcatggagcatatagaacgctctctataattgagagtgcaattctaaatctatagtggtgcaaggaggaattaatattgggttttatgtcctaaataaaacttcatttcaatgtaatc

SEQ ID NO: 124412 - DNA, 789 bp, Cannabis sativa
ctggcacaatctaacaaacaccagaaagctgacatggcactaaaaaagatttagcgaaatcagatgcaactaaccacagaaaagatcttagaaagacaatacggatgcagaaatactaaacaagagtatttatataatttgccactcaaagacatgacacgtacagaaaatatgatagaaagtatagagatgatagaaaatagaagagatagaaaggaaagtacatctcctttctagttgtttggtagataagaatgaaggaaaattgaattaatataaaattattacattaccctaattaattacataattaatataaatttcttacggtgaaggtctctatgatctctatagcactgaacctagactctcatagaatttttagtccttttgtatttgaaaagtcttagtcaatgcatttcttccaaagaatcttcttattgctcattttttcctactttattaataattttgttcgataaaaacaacactaaaataattgaatgtggtaacttatagattaaaacaagtattttaactcatgaaattatacgaaaaatggttactaaaatgacctaaagatctagtctatagggtagttgaagggtgtgaatagccaatgatttgaaaactctaaggtgcctaaaagacactatagtggtacttaatactgcgtaaggtgccatatcaatagggaaatttcatttttaatgcttaaaaaaataccctctaacaaaatttagactctaattaatttatacaattaaatgctattattttcaattttta

SEQ ID NO: 124413 - DNA, 1514 bp, Cannabis sativa
attgaagtatgaaaagatccatgcatgtccgaacgattgtattttgtatcgaaaggaatatgcagacatggacagttgcccaacttgtggtttaccccgccctaaaacaaacaagagcgaggagaaaaggaaacgtattcctcgaaaagttatgtggtcactactacaaaaaggggtattttcgtcaatttctaagtgacatataaagattttgcgtcgatctataaaattgacatataagtcataaacacaaattgttttatatttgcgtcgttttaaaagagacccaaaaaaaaaattttttgtcattttgaaatcgatgcaaaatataaaatttatttataacattttgtgtcagtttgaaagtgacatgaaaagggttgtgccatattgcaaaactgacacaaaaaatttatactgtcgattcttaaatgacgcataacttgctgcaaatactttttttcacctattgcgtcagttataaactgaagcataaatataagtaagagaaaattgctgatttccatgtaatttttcctacttgtatttccaaattttagaatcgttttatataacaataaatacataatataaaaaaagttaaaataatgattataaaacttatataaaatttttataattagtgattaattctacgatcgatgacgataaaactaactattaattaattacataatatcaaaattattgatagaaacaatcctaaaacttatattccatgtatcataaaaacttactataaactaatcacataatgcaaaagagttaagcaacaatcataaaatttatatcgtatcataacaaaaagtggtaacctaatacacaatcaatatcaaaggattcacaaattgggctcatgcatcccgcactgcattgaaagtataattaaaataaaaattgattaaagaagagttattcatatttacatgattttttaaaaaacttgcaggtttaacaatcatcatgaagctctggacaatctccataacataataactacattataatccattcggctgctgtcgatacatgtacgagttgatatttattggacctttattttgtatattttttcaaattatgtacatgtctacaacactaaatcaaaaagaagttaattagtgaattaatttttaacataatctaaataaaaaaaattataacacttactttgttacacaactcataatatcatttgggataaggtcatttgtcaagtcgaggtatgcaacactttgagtattgacatggtccgaccatcggaccactctctctcttcctctctctgaaaatcagaccccatcggaccccatggtccgaccattggacctaggcctttttttttcattcattttcagagagaggaagggagagagtggggctaggtcgtacgcggtggagaggggggctggggcttcagtcgtacgcggtggagaaggggactggggcttcgaccgtcgttggggttagggctgggattcgtgggtgccgtg

SEQ ID NO: 124414 - DNA, 848 bp, Cannabis sativa
ttagctggtgaccgacttttctattctgtagctctatgcggtagcatttgcgagccaggatttggtcacctcgcactactcccacacctatcggtgtttaaaactttcgaggtaagtgctttattgaactagttgcccttagtccaattaatgctggttgacctagtagtatcttgtaggctgatggtaggtcgacaacaagaaagtcttgcataatagtggtggataaaggcgcttagcccaaagctaatgggagctcaattattccttgactagcgacatttttgcctgtaaatccacacagatttaccatgcaaggttttaactatgctttttcaagtcccattttcttcagtgtatccttataaaggataccaaacttccgttgtccaccagcaccctttttctccttttgttggtgagctcgatggtaatcactagtgggtcgacatgagggtatctcttatgctttgcatcctcttccgagaacacaattagaggttcctcagtcttagctttcttagaagattctagagcaaaaacaaactgcttgttcttaacttcttttacgtatcttttttgggcattattactttccccgacgagatgtggccctcccgagataaccaggatgtcctctccttcaagaggaggaggttgtaatctctagttgcctaggttattgggcggattaggctggttttatccaccgccttgtcttttcacatattaccggaagtgacctcgcgcgataagactttctatctcgtctttcagttgacgaaattcttttgtcgtatgcccaatgtccttgtgatacttgaaaaatttggttgcatctcttttgt

SEQ ID NO: 124415 - DNA, 1743 bp, Cannabis sativa
gggcataaaacccaacagtaaaggctacccgatcagctatttttttgacaaaaaataacatgaaaccaagattaaatgacacttggatggctatgtcttaaggttatggcttgaaagccaaataaaaagaaaaaatacagaacaagctgaaactccgtgggagtggctagattcatatcctcataagctacaacaccatcctagtcggcaatagagaagtcaaggtcctcatcgacttgctcttaatttccaccaatagccccctcaattggctcgttggactccttagtgtatttgggcctccttcttggccttcatatactagcatctgagtagcaaggcaccacgatcgctcaactttgacttgaacttttttcagctcaacttttttcgtagcagcctgagtagctaaagctttagtacgagagtacacaggcccaacttgaagattcatctagaaaacatagcaagttccatgaaatagtccatttagaacatataacgtatcaaattaaagataccttggtcatatctctaaggagtcctccaatcaaaatttctaatggaagcaaatctcaacccttcaacacctaattcacttcagctcgaaaatagtctcgatagctcctgaccacttcctccttcctcctcatctaaaaaactattagggaagatgttttcttctatattttctagtttagagggacaaaaggtagagtttggttcttctttagctcaatctgggcgacaaccattgaagaaggagcattaataaccaaggcctcatcgccaaaggctagaggaggagatggtggagccagaggttttggctgcgccaagactatagggtctttcttctgagttttagctgggatttcctacccggatgcccctccaaacttcctcttcaaggcatcatttagtctagatgatatggatggacagaaaaaaaaaaaacaattgattaaattctacaaaatatataacaaaaagaaaggtaacatcgttaaaaaaggtataccctaaacttctggaggaacatcctcctgaagcactattaaagggacgtcatcatccgaagagtctgctcttaactctacttcaatgaaatttttgccttttccagtgatatcttacacaatgggatgtgcaacctcaaggcgaacctcaatcggaccctacttttaattttccctattcattttcttcttctttggcttggatgtcagtttcacaagaacaggtgccttggctaccgaaccttcttctacagcctccccagacgagtatagcccatgccaaaggaaattctcattggtacccaaggaagatatgtttcgtgctgtgctcgacatctgtagaatagcttgggccttttcctcaaccttagtgtgaaaagaggtcggccagaagttttggactactgaagagacatgcggttggccttcatcccttgcacaatataataatatttgatgaacccacctatctttgagacatccttgtccgtcgtgtcggctagctaggagcagtaaagtttggaaaatagaaataacctgagcagtcgtgcctcgtgctgaacttcatgtcaatgaactagttggtatcatgaggagaaggcatccccaatttctcttcgcatataggacgtacagtgtaaagaccgcttaatttaaatttagaagttagcagataattagggtttaatcatgacaattgtttattgatatttaaataattatt

SEQ ID NO: 124416 - DNA, 1201 bp, Cannabis sativa
tttggacatccacataattaataatatttataacaaaatagatattttagttcaattacttggtcattcaagaatacaaagacttcaaaaagataaattttattacaattatttttcttaaaaaattatttttattattattatcttgagaaactaattgagtacgtatgatgattcatgttttaggtatcttatattgtaagacaaaatcaaatataatggtgacctttaaaccaataaagatttggatttcctaaggagatttttacttgaggtggttttatgtcaagttttgtattagatttatttttaagatctcagataacatatttccaataaagggtttctccaagataagtttattttattataataataattttagtactttcgtttatattttcttaagaaattgttttgagtaaatatatggtgttttatgattcaagtttattttagtctaagaaaaaattaaatataatggttatacttttagcagtgaagactttacagataaattataattattacattataatataaattttcatattttattatttacttaatttgatactgatttatctattttcttttttgtagttatgttggtggaacagaaacacatttcgggaatttcttttctaatattaaaattttattgtctagttttttggggcatctttttcttatgtaagtcgcaacattatgttgtggcccatgaatagatttagcatgcccttagaatagatagtaagttttttcggatagaagaaatctcttcactattatcttttggcattttctctatcctaaaacggttatccttataaaaaaaaattatccattttagaagtttatcataactggtatttctaatataataataaaatatgtattttataatttgcactacaattaagatgcaaaaattaaattatataatttttttgttacaatagttatgaaatgaaaattaaacagataaaagtataaatgaaatagaacaagaagaatagctaggtacgtgcatggcacgtgctagcctcacctagtataaataaataaaataggtaataattataacctcctattacaacctctttctcaccctcgcatttgaaaacacttgtcgaaatatttttttcatagtggtgctcgttatagttacaacatcattgctgtaatttttttttttttt

SEQ ID NO: 124417 - DNA, 1162 bp, Cannabis sativa
ccattcagtagcttgctactcgggtctttacgcgtcgcctatgtgttgcactacagcatgggcctggcgcacccctccgagcccagttcaacattttcataaggtacagtcattaaaatagcaatcggaatcttttcttaataataacaaaattgataagactaccaaacgaaatttataaagagaaacttatacaaaacactacaatctttttaaaaatattgtatttttataaaataaacacaaaacagaaatttccctttataataaaaaactaccaacagactactacaaagaaagagtttaattttcacctcccaaaaggagtttatcaaactaatcaaagcgccaacttaacattttcagtcaccttctctgtaaatatgcaatcaaaaaagaaatgctgaatagtttcagtcacctactgaggtggaaggaatcaaacggactttacaaagatgatctctttgtcaagagatgattattaatgacttgccaagctatagctgacttcgagagaaaggtacaaagtttttaccttgaattttcctttcctacataaaagagcatctttaataaaactacataggacttttgctatcaaattttttacatagccagtaagagcatctttaataaaggtgcttgctgatgtggaagaatacttagaatgagctaactattgaaaatgtttgggtgtcaagccaaagatagagtaacactgatgccaaaacttgccattggtatcatccacttttttattattatttttattttttatgaacaaaactataataaataatatattaaataataatacacgagacaatagtattaacttttgaagtaccttttagaagtaaaattataaaaaataatgataaaaaagagatttttgacgtggaaattttttacacctctaaatagtttggactttggaaatgctcaaactgcaacaaataaaagtttaatcacaattttctctctaacaaaaggaaaaaaagttaagctacaattattcttaattatacaatagaaaattttataatgtatgttgttactagaatttcacaacaccaagaagtgtaatttagctggtaaaagatagaattatttgaaagaatataaatgcgagtagtcaacctaaaacggcgagcactca

SEQ ID NO: 124418 - DNA, 2322 bp, Cannabis sativa
gtattctcaacggtttaaaatcgtagtaaacaaaataagcgacgttttttaataaaatacgatttttttaatgaacccttataggcgacggttttaaacacggtcttgatctacttcatataacatgatgttactaatttttcctatcaagctatctagtgtttttcaactcgttgttgatttatatgttatcatgaaacagatcaaggaagattcattgtacagtgagctatctcatgccaaaatttgacacaatttgttagaattagttgacagttatttctattaactgtcttaggtagttacaagttagttttttgttttttgtctctaattcgaattgtataaatagttagaattcaattctttgtaaagaattagccttgtacagtttccattctctctctctctcaatgtaatttctccattttatcaataaaacaacatagttcattcaacttgttcttgctggttttggtcattgtttttggtagtttattgaaatagcattcttgctgctattgttgttcatgtgttctgctctttgaacacctaatctcgattgttaagggctgatgatctatcacaacaatcataaagttagttgaaagtaaattatgaatatgaataatttgtatcataaatatgtttaatgatgaaattcttagataattattacaattattattaatagtatcttatgttatacatatatacagggtcagcctaagtattttgggggttttgtgcaaaattttaaaattggtttttttttaagaaaaaaaaaaccgtgtacataaaaactacaattctattactagctttttttttaagatttgttcataaatttttaattataatttttttttatttatgtacatataatcaaaaaaaaaaataggtctttttttagaaaaaaaaaattgggccttaaaaaaatgggggtcttgtgcaatggcccaagctgcctaatacttgggccggccctgtacatatatcgaacatataattttaatacaatatgtattagaagacattgaaataaaagaaaaaaaatacatatagttagaaaatgacacaaaaataaagaattattttaataaagtaatacatttgatttgttcaaaaaattaaaaaataatacatttgatactaaactttaaaatgaaataaaaaattgcacatacataaaaatttgatataataataaaaagttctttcaatcaaaagtaaatatagtagaatacaaagtttttctaaataaaatatatacaaaagatttactaaatagcaaccattaaaaggataatgcttaccatcatatgtataatcctattcggattttttttttatttaaaaaattttaagtatcaattaatttaaaatatattaatattatttcaataaatattacataaactcacataagcatatattaatatataggaaagattcttgatattaaaaaaacataattaataaagataaattaaaattacatattaaattaatatatataattgtattaattattttaaaatttattactgtaatttaaaataattattaaattaaagacacatgagatataaataataatagtatgatatattatgggagaaagctacaaatattaattaaaaatatgtattttttaaatgataaaatatgcatatgtatgctaatatatattataattatttataaatttacttttttttagaaataaaataatgttatttaaagaaatttacttatggtctctaattattaaattactaaatacattttttaaaaaaaaaaaaagaactaatgagctcatctttaacaatgtaaatttaaaaaattaagcaaaaaaaaaataaatatatgaaagagatgagggagggagtaaaagtctagcaataatttttttattgtatttgaattttaagttataaatattaattaaaaatatgcatttttttgtcatggtaaaaatatgcatatttaagtgaaaaaaacttttggtcacaattaatttgtgattaaaataaagaaattatagctaaacataaatgatcattcctacattagagcaagtttaatgtgagttgtatgaggaattactcgtccgaggtggaggtggaggtggaggagagaggtagagagatttgtaaagttaacgtagtagttgagtcgttgtatagcaacgatgctctgcttttttcttttctttttataaaaagaaaaaaaaaattaattgggtaagagctaacaataagtccacttaagtacagggccggctctgaaacaaagtgggccatagggaaaaaaaaaatt

SEQ ID NO: 124419 - DNA, 1979 bp, Cannabis sativa
  modified_base (546)..(563): a, c, t, g, unknown or other
  modified_base (1940)..(1952): a, c, t, g, unknown or other
ttgatgattgattgatgtttacgaaatttttacgtaaaataattggattcacgatctaaaattatttttatttcgtaagcaatttaacttttttatagaactaaatttcgattttattttttgaaaaattaaaaacaattacgagtggggatcgcccacatgcgcgcgcagacacctgagtgtcactcgggtacacacgcattcagatacgattttgtctgaaggagctcgcccagcccatgtcttaagcacacctccacgcccgaaaatcatgcgtgtagcatgatccgccgaggtttctctacagcgcttcaccatatgcaccaaatccaaattttttttcttcattttttcatgctttttaatggaatcaatttcaaattttttgtgtagttttgtatgtagttttttaatttttaaatttacaatctaattatcagtttgaaattaattaattttagatattagtaaattttgaacttgaaaaagataaaatttatattttttttttgcttaattagttattttttttaaatttgattattnnnnnnnnnnnnnnnnnntaaggtcagatattttatattttgattatttaaataacttcaataaaatgaccttatttgaaatttacaaaaaaaaaatatgatataattttataaaataatctagataattttaaaaaactaaccaaatattttgtcaactttcaaaagtttattattttattttaattaaattataaaataagaaaaatgaaatttatttatcattttattttattatatatttaattttattttcttctaaaaataacacaaatttaggtttgttacaaacataatttttaaaaatataggtttaattttaaattaattatttaatttaatttatttatttttcgaaattgaatacttaattattttggatttttgaaaattaatttaattatttatttaatttaaattaaataaatcctataaccaactatcgaatgttgttgcttgtgtattttgtttattgtttatttttatgtggttcaagtgttagtgaatcttagtccacaagtcactgtatttggtcgaatgacttgatgcattacaaaggggattctataattttaagaaccctagcttcttgctatagtttttacactaggatttcatcatacaactaaaaatctcctcttgcatggtggctatagtgtagtatttataggttaggaacttaattcgggttcactcgtgacctgctagggtttttgtgtcaactaggcccactaatggtaaatacattaaataagtgactaaaggccaaatagcagaagtccagctcgtggggcggaggtgttccgcacgcctagggaccacccaatccttgataggtgtctgacgcatgccgcatacatgtactatagtgttaggtttgtgttgtttgacaaaagggaggtttctttttagtggtgtgcgcattcttatgctctgacacatgggtcaaaccttcattcgtgggatcggtgtctgagggcagccacatcatcttatattaagcttttgaggcacctctttgtgtactctttccgaatgcatcccaacactcatctagaagtttgattgttccatcccaagaagcaaggaagccttcctagacctggataagcctcgtctcggaggcgaatcctgtaggctttggatgggctttggtccatccttccgtctatgttggacctctcctcacggaagggcttttgcccatactaaagtgtcatgataaggacattgcagtcgcaggaggtggtcttgcaacttttatagttttttggtgtcaagtggtccatggggaaagagtagtggctccaacgtacctcttgtcaggacaccagagcttgcaggcgatatgcctccactacttctcctaaaccctgttggaaatattttaccagnnnnnnnnnnnnntaacaagtatgtttgattaacatccta

SEQ ID NO: 124420 - DNA, 759 bp, Cannabis sativa
aatataatatttatatatatattacagtttaaaataaaattattaattctaaataaataaattttatttataaattaatatatttttattaaaatatgattatatagatgtatacttttttaataagggacttaataaaagtataccttataattataatttagagtttacttttatttataattattctaaattaggacttaatttttttaaatttttttttatttttacatttaaaaatagttatttttgtattttacgaaaatacatgaaacaactagcaacttaaattcacattgcaatccacgtaacaactataaattagagcaacgtaaactgtaaaaataaaaaaaatagtgtatgtaataattttttttatatataataaattaaaaattattcttatttttatatatatgtattatttatatatatatatatatataaatatatatatatgagagcattattatagagtatacctgatgtagtgcttaacatttttataaaatgtatgattaatgacattttattattataaagtaaaataaagtagaatcaaatattagtaaattgctcacgtaactatataatacctcataattaaggatgctaggtataagaggaccctttataatttctcaatatatattgttataaactttgctgctttttaataatataattatagggcaagactatggtaggacctagcaaaagttccctaccggtaaggaactttttttgaccattgatttt

SEQ ID NO: 124421 - DNA, 1885 bp, Cannabis sativa
  modified_base (913)..(915): a, c, t, g, unknown or other
  modified_base (1809)..(1841): a, c, t, g, unknown or other
aatataactttatcctacctaagcaattctcataactccattaataaaagaacaaatactaataataaacattattggtgctgttgactgaatttttagacaactaacgcggagtcgtaataaatgagatttaaatcaaaatcacagtaataaatacagttaataatactgaaacttgaaataaatgtaaataaaaaataccggaatttaaagaggttcgaccccagatgttggtaatagcctactccccttgtgttttattgatctgagttgtaaaagtcaagaactggctcttgattgcaaaaagaatgataaaatgtttatttttctaagtgttcaaaattatggatccccctcctaggtcatggatgaccccttatatagaggaaagggtcggtgcttcttgcttcaggagacgcgaccgacgcggagctaccacaacttctctttcattttcggaggtagttgaagtctgatttttatgataatatcctgctattttcgtgggttgacaactgtctttgagcattttgtgggttttgtacatttgaacgagttactgacgacgagggtcttttatgggtgtgacatggttatcaaccacctttggggatgaagcccatactttggggcaacacccccgagacccaacttgaggggggtgacaatcgtcattgttgggtgattccccgagacctaacttgagggggttgaaaagcgtcatcgttgggtgacccccggtgactcaacttgagggggttgacaagcgtcatcgttgggtgaccccccgtgacccaacttgaaaggggtgaccaccaccttcgttgtcagtagttatggtgcaatgtggatgtccctatatacctttgagaatgtcattgtatctacgataaaatgcatgactcgtaccatnnnggtgtaggaggtaggggtatacccctagactaacacttcatggttggcggttatcccaacgatcatgactttacatattttttattaatttaatctcgttatttttataccacgtggtgctactcttgacaaattatcgtcgtaaaaaatttaggtaaacacataccctaatattttcttgatttttcttatattctttgtactatttttttcctattttttttttttttatactctttatatctaaatccaacttccaagtactttgagaatgtgtctcgcaaattttatctagcttctatttaataataaacttatcatatgaaagatcatgatatttttcaactctcaaaatttgtaagtattattgtgccatgggttttcaattgctaactaaatatttggagaattaccattcagccaagaaccgatcgaaggcaaccattagaaccaaatgcctccacatccgttccaattcgaagttccatacgagttgacataattccttggaagccacatatgagacaaatggattaaagatgaactttgatgctgaccatgatggaagagaagttgctactctttcaaaaccaatgcaagggaatttcagaagtaatgagatgaaagccgaggctctttttcaccgtgtcaattgggtgaatcaactgcaagtatcaattactcgttgagatttgagactgatgctatatatgtaagtttcctctgttttgtctactacatctaaagaattatctaccttttcaaatttaatgttgaatgttcgttgtctttttatttatttttttttaaatttattgtctcacatgttcggagacacactaatcaactcatcatggattagcaaaatatacggggtaagttgaaaaataccannnnnnnnnnnnnnnnnnnnnnnnnnnnnnnnnattttatatttaattgaaacataattaatcaaatttacctctaa

SEQ ID NO: 124422 - DNA, 1459 bp, Cannabis sativa
  modified_base (78)..(78): a, c, t, g, unknown or other
tatatgtgtttaaattacattgttttagaaatttatatttaggatgttaaataccatacatggtagtaaatctagatnctggtaaaacatattccaacagccacgcgcgccgcttgcccgaaaattgagggcagacaagctgttggtagccatttacgcgcacagacaaggcatcgagtctgagtttctcggccatgcccatggtagcacgcacccatgcatccatctttgattctaatttttcaaaaaatgataacttgctcaattttttatcgaaattaacttgcataatttttcctaaattttcaaagaaaaataattacagaagaaaattctaattatttactacagaaaatttataatttctcaatctttcaaataatgcataatccacttaacattaacatccaaatctcataaacatgtaaaaaaatgcaaataataattattctatctagtttacatgaatagtaaaagattaccatgactctgagatcagttgatgaagagcatatttaactacgatcttattttactattcaagtatgttgattattactaatctaacatcctaaatatggaacgttaaaaataattaaaattaaacaaataaaagtttcagaaaccttacaattgtgcaacgaaaattatgactccttccatttgaattctctaacccttgttcttttttgtcacaaagtattaacaaaaatttgaactaggatcttctgcgaaatgtgaaagactacacagtctttcacactattttgagtattcacttaatttgtgtgggaaaagctcaataccactatacatgctatttagagaagaaaggaataagaaatcagtttgtatatactataactaggaaaaataatcgtgcgttgcgcggtcttcataatagttaaattatatatattttttatatttttattagtttatttatataaaggagaataatattttaaaatagatatttttatcttttgattaaatgatattattattgtagttttttataggaaaatttgataattcatgcttaaaaattgctcatggtcttttagtatgccacattaaaatgtatatgaatttaatattctaaaattaattaaatcccaaaataccctcctcatacattccctctttctcttagccccctctctctccctctctaactctcaccaaagtacatctttttagaaaaataatattatatctaacataaaagaaaaaatgttacattttctttaggtttgtaaagttattaaattgtgctttagtttttgtctaaaaattttattttgagaattaaataaatcacttgctttatttgtatttttaagtggtataaatttgggaaaaaaaacaaaaaaatacaaaaaaggaaaaaaaattacaaaaatactttgggccggcccattaaacatttatatagtccacatacaaatatttacaa

SEQ ID NO: 124423 - DNA, 2756 bp, Cannabis sativa
ctaggatctctgtagcatctctccctcttctagagtcgatcttctccaggtattatctcagccctctgtctatttaaggatattttctgaggttgttcttttatctcttgttcgttctagccctaagtcagtccaggtattactcacctcccatgcactcaacaatgtctaccaacccagaaaacctttcccattctctccaactcactgcggatgaagctttggtccatgattttgaccatgtatccataaactctgagtcccaataacctgagtcatactgccttgtcgttaaaatcctgttccctaaatcggtcaagcttgactggatttgtaaagctatgaaagacgcttgggttgctcgccttccatttacctttttagaataccattctggcttattcttggtgacctttggttgtgaaggggatcgacgccgtgttgtcgaaggccaaccttggcatttcgaccgtactctgatgctttttgccattccagatggctttgacaccatcctccccagccagcttcgatacatcccactatggatgcaggttcactttattccttttggtaataggtcccatggtcttgcccatttcattgctgacactattggggacctcattgaggttcaccttccatccctgtatgactctatcacccctttcatgcgtattcgtgtgcttctcgacaccacaaagtctctgttcaggggaatgaatgtttattttaggaaactctcactcactaaatggctgaagttccaatatgaaggcatccgaaactattgttaccactatggtaagcttgaccacacattcaataaatgtgatttcttcctccattactgcgacactcacgcccactccccatctcttagctacaaggatgtcttaagggctcctgctaagtccttctacaaaaaaaagtattttagaactctctaactctatcccttttgaagagattccatcccttaacattttgtccaattaaagccttcaagatgcggtggatcaattcctggttccaagtattgctaatacttctttggttaatactttccctgttgagaatccctctactctgactccccctagtgcccctgttgaagataaccatccaccacccgtccatacttctctcacttttagtaacctcacttcctccattgattctgcacctgttatgaccaccactgtgattacctcctccaccaagggaaaggccccaatgtaccctgaggctccaagggatatacctgctcctccaatacgtcatagggctcgtgttgcccctgtcaccatttttggtactaagcggtcttatacaagacaaagctgtcaagtgggctcctctgtcaggagtatgttgaagagagcccgatcttcaaactgtgactttgctgtggttcctactttctctcatgctgatgaagaggcgggtgttgtttagcaaccccgcctagaaaaatgagtataatcagttggaatgctcgtggattagggagttcctgagcattccaaactctctccctcctggtgactcaacatcgtcctccaatcctttttgtgatggagattaagcaaccgacaaatagtattagtttgtttaaggctaaactgtcttttgataatgcttttgaggtccctaggcaaggtttagggggggttgtttcttttttggaatgatgtggttaatgttaatattttattgtgcctggagtatgtttcccctatgggtcctttcttcagtgggaggcgccagtggaggggctttccttgaaggcaagggcattacttagatccaccaagatgtttgtgtcaccctggctagttgtagtggccaaatttgtggtgtctgccgagatggcaggattgaccacatccacagtgtccatggaaatttttgtcgtggcaagaatatggacataaggatatgcaattagaagatcttgagggtgtagccggagttctcctcgtgtcaagcatggcgtttgataagaaataatatcaactcactctcaatgaaagcaccaaactgttgatctcaaatttggccaaccaatagcggagtcatattcaacgctgatgcttgccacgtgttacacaataagaacaataaagtaaatgaatacaagattttgtagagatttggcccccttagttagcaggtaatgatcacatattcctattttagttgtattgataccaagagataacactacttagatcactatagatgggatctgaagtagctctctaaaggttacaatgtaggaatcaaagttggcaaatctcaagtatgagaatagcagtagtgggcgtgagagagagagagagatgagagcaggtaatgacctattctcttttaagtttattgataccaagggataacactacttagatcactatagatgggatctaaagtagctctccaaaagttacacaatgtatataggaaaatcagaagtgttggcaaatctcaagtatgagaatagcaatagtgggcgtgagtgagagagggatgagagattagacttagaacttagagttttgaacttagggttttagggtttgattaaggctctttatataggagagcttaaatccttcagataggtaagataagctgatatttacatattaatttagtaaaatataaatgactaaaatgccctttaaaaataaatactttttctctatttttcgtgagctgttaaggcccaattcgcagtctgacttgttatccac

SEQ ID NO: 124424 - DNA, 751 bp, Cannabis sativa
  modified_base (717)..(726): a, c, t, g, unknown or other
atcttaaataaaaataattagttagttaaaattacttaccacgtaaatatgtgttaaatttgtgtgtaatttatgtgtgccatgttagacactttgatactttattgacaaaaatcttcatacaataatatactctatattaaaataatgtctctcatatatttatgaaatattttgccgaacttagaactaattttaaatactagtagtaaattctacattgtaataataattttaagatgcacacgtagccttaatgtggtaatgactaatcagccacacattaacattttatttttcacatatgattaaaattaacaagtcttatattttagcattacgaataactcatagagataaaaattataattagcctattataaatggttgagttaacatttttaagttcaatttcaaattcaactactcatactattcattaaatataatacttatagtgaagattatatattttatgtatttttttttgttaaagattttattacaatggaagaaaattaaaacattacaactctattgcaacataatacaaagattaataaagagattaaataaatgtaacaatacataatatacaatatatatacactatatatattatagatatatatatatatgaaaagtagaagaagaaaatacaacacatgtgtatatatatataacaagagaataatatatatatacactcactcacannnnnnnnnntagattagtggggatcaccatgact

SEQ ID NO: 124425 - DNA, 1103 bp, Cannabis sativa
tctagcataaaacctcatagtgttaaagctgttcttaaggaccatgtatggaataatgctatgaatatagaaatagtttctctcaagaagaaaggtatttggacttttgttcttcttcctccgagaagaagagctattacctacaaataggtctataaaaagaaggaaaatcccgatggaactgtgtccaaatacaaggtcaggcttgtagcaagaaggttccatcagtgatatggttttaagtttaaggaaaccttcagtatagttgtaaaatcagctactgtcaagattatcttaactgttgctttatactacaaatgatccataagataacttgatgctaataatgcctttttgaatggagatttttaaaaagaggtgtatatgactcaacctcttggtttttttgattcagaagatcctcaattagtgtgcaaacttaataaacccatatatggcttaagacagacaccaagggccttgtttgataaactgaaagctactctagtttcctttggttttaagtgtgcaagggcagataattccttatttttaaaacacacaacaactcattccacatttttgctcatctatgtggatgatatattggttacagttagttctactgcaacagttgtctcgttgataaatagtcttaactctttgtttggtcttaaggatttaggccctcttaattatttcttagggatagaagtaaatcatactactaaagggttacatgtatatcaaaataaatatatttttagatctcttcgtaagggccaaaatggataatgcaaatccattacctacccctataacagggatgaaaaactcacaacaacaggttgtgatccatactctgagccttccttctacaaaattattgttggggcattacagtatgcaactgtcacaaggccagaaatatcctattatattaatagagtatcatagtttatgcaaacaccacttgaatctcattagaaaactgtgaagaagatacttagatatctccctaacactactgattatggtctactcatataattgttggaacttattttaccagaatttagattactaacatgtatgtttgatta

SEQ ID NO: 124426 - DNA, 2232 bp, Cannabis sativa
aatgcccccataacctataacttaagcattttcaagactaggggtaaaatggtcgaattccaaaaccccgctcaacctcggtattctattttctccaatataaatcccactaaaaaataagattttagactgatccatgtgatcaaactagccatccatcgcattttttgttgtcgccgagcaaaaattacaaaaattacataattcacatataagtcaaataatactcctagagtttaataaaatcttcggaatcgagaaattataactctaatgcctatttctaacaatgggacccacaattaaattaaattcataaataattataaaaatatcagtaattagtgccaatggtcattactaatccaaattagtaatgcggtcattacaataatacttctcagatcactataatgatgggatatgaagtagctctttgaaggttacaatgtaggaaccagagttggtaaatctcaagtatgagtatagtagtgggcgtgtgagagagagagagatgtgagttatcaaacttagagttaggatttaagacttcatgacttcagtcttagcactagcacttagggttttaaggtttgattaaggctatttatataggagagtttacaccctttcaatcccttagaaatttgttaaataagctattatttacatattaaattaataaaatataaatgactaaaatgctcctcaaaaaaagatatttttccctctattttcgtgggctgttaaggcccaatccatagtttggcttgctgtccacgtatgaagctgtgcatcaaaatcttgctaggccaaaagttggtcggccatgcatctgcaggatgcaagctggccggctatgggatgtccaaaatctagttggcttatgttatccttagggcttgccagaggtggctagccatcctgcttggggttgctggttgtcacttcgtcatcccgcttgagtattcagacttcacgtttgttaaactggtgagtggatgacatgggattcttgttggtaagttctactgccacgttgcactaatgttcgccacataagcatgccatgctaggtgggcaaacattgggataacaagaacaatgctaggcacctaccttgtctatttaggacaaggtcggtgtcttttatcttgacaacttttgtcttgacaaatcttgtcttaacaattttttgtcttttgcctatttaattaatttgaaaattttatttatttattataaaaataaataattattatttttccaattgaaaatagatttttccaatcatctttatacaactatttatccctccgcttgacagtgttttaaggtggcaattcggggactatagacctataattctaagctccaataaactacattatttattgactctcatcaacaaaataaatccttgtttattaattccattattactccactattaatatagaattacactcttagtaattatacaattatatttactgagtttcgctatagtgtccattgacataatcaattctaatgattagccctccatgtgtttgctcgtaattagttttggtcaaattaccattttaaccttctattaccggcctttttacaaagtgggacatgtggcatgaagggaagaaattcatgctcgtctccctgtaactatggaacagttaggaggtcttcctgaactaagagtcgttaagaataagggggtgggtgagaggttgtgtgcgtcgataggaactccctaaaaggaggatgggaagtatccttctcgaacccagaaaggtctaaagcggatgtcaaccttcaattggcgtggcgaatgtcgactttttccatgtcacaagtgatcaagtgacagttatgattttcttgataaaattagatcttgtcctctacagccacgctgatagtgcacgcatcgccaccatcttcttatcaggcgaacaattcagcgttccatccatatggagtgagctttgagtgacacatgtccttcacttttaaaggttaaacatttgcgtgacacgtgtccaagtagtacagagtgatccccattgtttggctgctacacacacgggcataatgctacccacgggatcaactagtcagtgttgcaaaaattattaattaaacactacgcaagtatacgcaatcaagtagtaaactcacataggtgaggtcgaaccacaaggaattggattaactactactaaactatac

SEQ ID NO: 124427 - DNA, 1517 bp, Cannabis sativa
tttctggaactttatatgtgtttaatttcattgttttaaaaattcatattaggatgttaatgaaacatacttcttaaaaaatctagatcctggtaaaacatattccaacaatctattggggtagaggcttactaactgctggtcttagatggaaaatttgagaaggatgcagaattaattgtgctacagatccatgatcccaggtcattcaagctttcgcccatatcttttttcaagacctcaagttacggttgtttcgaatcttaatttattatcacacatgtattttttttttaaggtatgttgcattttaatttatattatattatttaataataaataatataacacatgttctctgaatataacaagtgttttgggaagggtttgccacttcactctagaccgataacattgtagattgtaccctcttgaggcaatagtacgtaaggttggtaataatattatcataacacgatgatgtgattcgaaaacaacacaaataaatgagttccggtaacacgtttaataatcctatcgtatttgtattggagttatagtttgagtttttaacatatttaataatcgtgtcgtcattgtctccaattgtatcatatcataactgtctcatcaagataaaacaaattaattgaaataggtttcatatttgtgttgtatcatggcacactgatcgtgttattgtattatatcgtattcatgtcatatgatttattaattaatcgtacatgttgtatttgtattcaaattttttacgcaaatataattatgtcgttttcatatttcccttaagtatataaattaaagaaaaaatattaagcttaaacaaacaaattggttaagtttgttaaataagtccatgtaaaatatacacatcaaacacataaataaaatttgaaatgtgcattctatagccgccatctacgccaccttcttcaagtcatttggaattcacaattgctttgctttggcttgtgccattttcctcctcaagagattgctattcgggtactcatttattcttctaccaaatctaaggagtttcaggtataggtattgaaagttggaaattttatttacaacattattatttttgttttgtttgtttggttttttttttttttggtattatttcttaattttattgagtttgcatcatctctatacatttatatatgttgtatcaattagttcaataatattaaaagacaggattttatcaagaatgtttgttttttttattattttttatatttttactgtcatatttttttttttacatttttactgtattaagttttcaaaaatacagtcttaaagttttaaaattacaaaaatattttgttttagtaaataaaaagaaacaactaggattattacatacaaaatataaatatacactttatttacaaaaatacctccataaggtaaggacaacatttataccttttatgtgattttaattaccaaaataccacttacacaatcagacgatggtt

SEQ ID NO: 124428 - DNA, 2088 bp, Cannabis sativa
  modified_base (281)..(282): a, c, t, g, unknown or other
  modified_base (2032)..(2055): a, c, t, g, unknown or other
tttgctcttggctctagtatatcccggatgagcaggattagtgtatgattagttgcagtacgtggcgttccttttgttaggacattacatagtgactctactagtaaaatcttatatgggtcatataactaatattagactaagagagatgcccaattttcttttagggcaagtgtgagatggttagggtttgtgccctttaaagcctgtaaaaatatttatatttataaatgagagttgaatattttcatatatacttaaatgttaaattattaatattnnatattgaataatttatatataaatttcagaaaattccttattcatatatgagtttgtgactcgtattttacagagaattatgatcacttagtgatgaataaaataatcagcaacatattaaagtttttagaatctttaatcaacagttgttagtgcgattcactgatgcctgttatttggtaaaaacagtctagattcacattgctaatgtagtatgacacctaagtgaaggtgctgtatataatagagatgaaatatgacaaggaccaatatataattaagctgtctttatcaaatatgttatttactataaagatctaattaatatcataaagataatcaatagtagatcagtttgaatcctgagtaatcataaactcttgttcatgttattagtttttctgattcactcgttaaagtttctcagagaagatgattcttacaaattctgttttgggaatctaataatatggatagctgggaacatgatctacaattatagaatcttgacttttctaatggatctatatttatagaggagtaatcatggaattaataaataagattatttgattaatgagattcaataaataatttaatttattagagcttataattataggtccatggtccccgaattaccaccttcaaacattgtcaagggtaaggataaaagttgtatatgaaagttttaaaaatttatattgatttgataaaagtgtaattatttatttttttaataaaaaatttattttttcaatattattaattaaataaattggaaaaaagacaaaacttttctcgatgaaagacatcaccaatgtcttattaaaatataggtggccctactatcactgtgtcgtgataaagtgataggcgcctataatatagggttgtccccactatatttttatttttttggatggattaaattaattaatttaattatttaatttaattaaaaagataaatatttatttgaattagaatttgaaaaatagttatagatatttttattcgttgagatattctctcaagatagttgagagattctcttaagtggttaagatattctctcaattagttatatgaaataaatatctctaacagaattcgtttatattatatattcaaataattaattaaatatgatttcataaataaatggatttgaatttaaataattaatcaaattaaatatttattgattttaatttaaatatactgtataaacaaaaaatagataagtattatttttggtaagcctaaaatggattaatctgatcaatctttctctccataatcactaaagaatagttcttgctcatgtgtgagaactcaacaagaatttttgtatacattttatcctattagcccataacttagttcttgtgtgtggtggaagatctggaagattacggtgtgagtatatcgagatcaattaagaatacaacatacgaaaaagacttgaggatatcctaataggcttcaagaggtaaatcagtctttcgtctgtttactttcagatatagtatatatacatgtggtgattctgaggatgtgatacgatgataatcagaaacttttattccgctgtgtacctgatttagtaccacaataccagtatctttaacctttgttttggtcgctacttccatcatcctttgtatgtaattcttaaggcttttaccccttgtggcttgatattggtcaagcaactgacctcctgttggaaattattttatcaggnnnnnnnnnnnnnnnnnnnnnnnnttgattaacaccctaaatataaactttctaaaa

SEQ ID NO: 124429 - DNA, 948 bp, Cannabis sativa
ttgaggagccttcctgaggcctcaggcttctgtagaacctatcaaagtgggtggttcgtgaatactttgatggaatgggcctaaaagtagggcctgagttttcttgaagcaattaagaggcagaaagctagtttttcaaccaggggtaccaaattttggctcctatcttgcattttctaacataatataccgggtgtcatactttttcctcctcccggaccagggctgcactgactgtgttctcagaggcggccaaatacaaaaacaagtctacttcgtgaaccggctttgacagaattggtggtttggccatgtttttttttaattttctgaatgcctcctcgcattcttcagtccattaaaatttctgacattttttcaaaatattaaagaacggatgcatttgtcagtcgagcgagagatgaatcgactcaaggcggcaaccttcccagtcaagctttgcacatccttatgttttcttgaatgacccaacaagcaatagtagattcaacctttatcagcgatggtccatctcaaaagcgagatatgcaagcatggatatatacatcttcttaggattaattttatttgagtgacaactataagtgagataagccaatgatacgaatactctaatctttggtcctaagattcatttcatttagctgaaaactacaaatgagatactgtaataacaatagatactctaatttttctcgacaccaccttatatcctaagaataaaaataataaagaaaaaagaataattatcattaaaattaatcctataatgaataaaatttaaaaatcttttttttttattttattttagggagttttattttttaataaataaaattattaatgataataatattatactttgataatataactttaatattaaaatattttctatattatattaatatattttttattttttat

SEQ ID NO: 124430 - DNA, 1564 bp, Cannabis sativa
  modified_base (212)..(212): a, c, t, g, unknown or other
tactgagtctagaacattcatacgacaatactatcgaccataatgtcagcctatactcaatatgctagtcatactctagccatattgatgtgacaacataaattagtatttcagccaatatacatttatcagtaatcagtacaactctatgtatactattaccgctatcaatgtaatctaataggcataaacaacatgtacgctaaacatgnaataacatatgcatgacattatactaattttacctcaattccaaattcaggtgttccggtcaacctgagtggaacaactgctcggtgaattataggctccttggcttagatcctcttaaattagctggaaaccacagcaaattactactcaaaaatcagaaccctagttagttctatagggtttcgaaaagagagaggaagcatttcataaattttttctaattttgtaaaaaggaataaacttgatttattataagttattttccgccattatactcatcaaaatcagattaataaattactacaaagtccactaaaggacaaaaacttatggggcaaaatgaccattttgcccttcccacactaaaagggcatgaaaggcacttcggtgtattttgggcaattctaaaatcccaactattctcgatatttgcaatgtctaaatttattgacccgctatactaaaaatactaggatgtgattctaatagccaaacactgcgttccaatgttgctgggcacaaacatgcaaaagttatgaaatttctatatatgacataaaaatgcattctgaattcaaatggatccataaataattaattcaatattaataaataattttcataattaagccctaattatctactaatttctaaattaaagctaagcggtctttacatagatgatgttgaccaacgggttttgacctatactttttgaagttagattagaatagatattcttacagtgatttatagataaggtagattacatcgtaaggactcctaaccattttgttccaccaacacatgatcacattagagtggacctacgtagtaatatttactttccaggattcttccagcacgagactaacttaggtcgagaggacattatcccttttctagaggaaaagttaattatgctaagataaatagtttggattcttctagtttattatttgattgcttgttccattaattatatttgacataatcttacataatgtatctttttgtttgtttcatgaagactagccagctacattacatatggttcacataacaggttcttggataacatcaactctacatctgaggaagtatgtgaggtggctagggaaggcaagaacaagggcataaagggacaaacatctaggagtggatcttaaaagccaccacctctagccttggtccaggaggctgctccaaaggttatagtcttagaagacaagtctacttccgccattgaactaacagggttcattctggatgtggattgttgggttttatgccgtaaataaaacttcatttcaatgtaatccagtttattcaacatcaataaagaaacaga

SEQ ID NO: 124431 - DNA, 922 bp, Cannabis sativa
gaatacatttaataacataatcttgattacaaatatgtgaactaaataacacattaaacaagtaatgaaataaatttgtttctttattgataaatgaatatccaagattttaattaaaaaaaggttttatttagggcacaagtcacaacatttacatgctttcggtttcaaaaataatacacatacataaacaaacacacacataggacaatcaatcgtaattaatatatcatgtttctactatgagatgcatgatatttaaactatgtggaatttctatgtatgacatgttattcatgaatgcattatcgtgttattaataaataattaatgaatatttatttaaatataataaataaataatgattacaaactgagtaaaatattagaaatttctaattttacaactcttgataaatttaggaattaaattaccaactaagctccataatcttaatatgcttcaagggcaattttgtaattttgtatgatcactttaaggctctaaattaataaaaacatttttaattaagtattctcaaataaaattatttattaaacataattttaaaacctataaattaattaaaatatttataattaatttattctcaaataaatattttatttaagacaatatgattatcactattattttatctttgttaacatgatgtctccccttgacggaacacacgagggctgaatcgttgaggttggtaaggtaacaccattcatcctgcacgacacgcttactttagtcatcaagcagcagttatttaaaaggtcatttcccctaagcgaccttccaaagatggtatcctccaaccaagtcttgtaaatattccacatgtcatctagagaagtgttgggctttgtgccctaaataaaactctattacaatgtaatcttttctattcaa

SEQ ID NO: 124432 - DNA, 575 bp, Cannabis sativa
aaaaaaaaaaaaaaaaagcattaacaccacctaactagttggctacctcccacttcccaaattcacaaagccatgagtttatggattttgagctttaaatgattttttttaatctatggaaaattttggtttgtgacatattcaatgttcaatttatttattttataaatttcaaattctcatttaaattctatgtcttgtccactataaattcctaacacatccactaaactattgtttgatttgttgttaccaattttttgtttttatgttgtttaggtgaactattctttgtttgtttgtgttctataatgagtgggcactattccaattcaaacctaaaatctctcacactagtagaaacggtagggacattttcataaatacctaaatataataaaaaaaattataagaataccaatttacagtttttctattattaattttcttttttacaaaaaatacagagatatattttttttcattatattcaaaacgatttttctttgacgttgttggcctcaaaaaaaaatattttggaaaaaaatgaaaaatccttaaaaaaaaaaaaaaaa

SEQ ID NO: 124433 - DNA, 1015 bp, Cannabis sativa
tttaaattttagattccaaatatagaaattttaaattttagtttcctagaatacattgactatacagtatgactttcacatggttattaatgtcaattttttgtcaatatattcaaactgtatgttatgtatgaaatatgagttttgtattcagtgaccatggttcatttggactattttaagaactttttgttataactaaacctttttcatcaaaagaccacaaccttattttagtaaatctacgatatttgcatcttgttcatagtagttttgacaaaatgattctttgtaaagagaaaatatgcttatatcaacttgaaaataggatcatttatattcgtatatattttgcaaaaaaaaaaaaatatgcatatatccactttgaaaataagattatttatatttgtatatatggatatacatttagggcatatgagtttttgttaaatttttaaaagtaatgatgtttatcgttataggattcttccaacatgatagtgttgtttatttgccaaagtttcaattttaatgatgtcatgcacttaattcaacgctttcacattcaatgaacttagacgcacatttgaaacttaaatcactctataaattttctttatttaattaattaataatttagatgcagtactcgatgtaatcatatacttttaattcgtgaaaatataatttaaaacaaatggtacaaattaatgcagcaaacaccaacttgggcctttcaataatttttgtatctatatattttgtgtttcttgtcattatatataagactaattagaaataaaattaaaaggtcatgatgatattaatataggatcttatccttaaggatgaaccaactagctataaggcctgtataaagactgaggcacgtccagagacataatatatacttaagtcttctccacacgacacagtagtaatactatattaaatggtctcgtttatcaaaagagttacattatttttttttaaacaaagattgcaactttcatta

SEQ ID NO: 124434 - DNA, 1112 bp, Cannabis sativa
  modified_base (1004)..(1007): a, c, t, g, unknown or other
  modified_base (1054)..(1076): a, c, t, g, unknown or other
tgtaaacccgtccactatgacccatacagagtcaaactgtcccgtggttctaggcaaacctaccacgaagtccatagcattatcttcccttttccactttggtatgttcgatggctgcagcaaccctacagtcctctgatgttcaggctttactttcccgagtcatgcgatgtagtggtgactctaggaagatcttctgctaccgttcgtgttggccaagtcgtcctgatggacaaggaagaggaagaaggagagatcatccctcccctggagcgcaaatgtaaaggcaaaatggtggagacggagcatgttaagaaaccaaggagggcggatactccagcccccggcgctgatttaggaattccttctgaagtggatgagtatcctgtgcctccgggtattatctcgactctcgttcatcctgatgaaggaagggttcagctccagatttccaagtacaactatgccttgggggaacacaccaaggggaatgcggaggccctaaagaaatcactaagggatgcctaagatggatctttctagggcgagtatgtcagagacatctgggatttgaatttggatcccttgatagacaggtttaagcgcttcgtgggacctagcctggctccttttacttcggagatgatgagccattttaccgccgacctgaccaaaatcccgttgaagagatatgcggcctgcgcttttacctaccccgtgtatcaagtccaggacatgagcgtggcccttactgcagtgagttcttatttctcagatttcttatgcctctttttcatacaagactctaagttttatttgttgactactagattgctgtcgtcgccagtcgtctttcaaagactctaatcaaccacaggtacgccatgtccgagtttgctagcacggatgaagtgatgaagcgtctccgggagtcagaagagcagaagcaagcgatccgggatgaagcccaaaggatggaggtcctgttggaaatattttaccannnnctagatttactaccaagtatgttccattaacatcctaatatgaattnnnnnnnnnnnnnnnnnnnnnnnataaagtttagtaaaccttaaattgggtgcagcgga

SEQ ID NO: 124435 - DNA, 1905 bp, Cannabis sativa
gatgtcccctaggttgaggtccctggcgagcatagttatttcaggagtcctcttgcttgtctcgagggggttgaggcaagtcttgacttggaaggtgactaggaggtgactccctttgtcgtgacctccctctttgggatggttgatgtggtggtggtgcattagtacgaggaggctcaagatgccttattggtgatgggggaacttgattggcgaaggagggttccaaacatgatttcttcccccctcatcaacaccaatatccctaggaacaggagacatttgagaatgtgagactacattattgtgtgttgtgccccgttcctcacggtagcctctccgtaagggatgtggagtatcattttgagggatagtaggttcttatgcgtccctccgaatttgttgttgtgtaggagggggtgtattgttccttttttcctcacgacccgaggtttttacaaattgttgatgttttgatggaggacactcactcctcctgccatgggtgtcgttctcatgagaaggccattgtggtatggtattacgggtagtatcatgactttgggttgttcgtgacctagaactctcttggcttttgacatggtgatgtgtagaacaacttccacggggtcgctcccttcttgccgtgccgggatgcccgcgggctccacgtcatggtggccttgtggcctcttggcaccatatctctcttgccactctctattgagtctaagagtttcatcctggcgttggcacaacaccttattttccatgaacacctcatgaacattggtggtttgcctcacaccctgagatggtgatgatgaactaccagcatctcggacctgaccttcgtcgtcatgcatgggttgtttgcctgggcgtcgagaggtcccattgcaagcgggttcagcaggttgaaacttttcatgttttcttcattcatggggtcaccatggtcttcctcctcataattcatccgtctcgtagtcaccatgatggtaagtggtgattaacactcgtgttcactgctctcaatgaaagtaccaaactgcaaatatccaaaagcaggccatgcaaaaatccaacacttggctagacaaggctgcacaacagagactacaaataagacgagagctagaaagtccctatctgaccggatgtctgcacagggacttggggggcaaatgttatcccaatttttttctcatgacatggcatgcttacgtgaacagaatcagtgccacgtggcaatacacctcactaaaaggagggtcaagtaaacacctgagcaaatgaagaccccgacactcaaacagggatcaaacgatagagtagctccctctgaggagctggccggctacccttggcgggccagccttggacagcaccatggttggccagcctggccatcacaagggcctggccagccaaggagtgcattgtaggcttttctggatagctctgcacgtgcacaacagatatggctgcaaattgggccctaaaaccccaacagaatggctgaacaatatctagattcaatggcactttagtcttttgtacttatctaacaaactatgtaaatatttaggatataaacttgtaatctagggtttaggcctgctatataaaagccttaaccctagcctagaaacctaagtcactaagcctccaaatcactctaagtcaaaaaccctagcctctcttcctctctctctgctacacgccccaagggctctgcctctcttctcttcatctctcacacgcctttgaggctattcatctttctcattagagacttgcctacttgattcatgttttgtatctttatagagagctatatcagatctcacctatagcgatttgaatagtgttatctcttggtatcaatacaaccaaaagggg

SEQ ID NO: 124436 - DNA, 1389 bp, Cannabis sativa
tcattgcattagctgctgaaaactcatgacctatcttccagttggatctaaaatcagcattcttacatggagacctggaggaataggtatttattgattaaccccaggctacgttaagattggaaatgagcataaagtgtataaataagaaaagactctttatggactgaaacaagctccacgggcttggtatgaagcttattttttaaaggaaggttttcataaatgtccatataagcacacacttttttaaatttagagatggaggtaagatgctcattgattgcttatatgtggatgatctgatttatactggaaatgatagtgccatgactgaaaaatttaagcaatccatagatgcttgattttaaaatgactaatcttggactaattcactattttcttagcataaaagtggtgcaaactaatgataatatttttatttctcaaaagaaatatgtccaagaaattttatataggttccaaatgaagaattgcaatcttgtgggcactccaactgaggttggtttgaagcttatcaaagatccaaaaggaaaaaagattgacaacactctttataagcaaatagttagaagtatgatgtacttgacagcaacaagcccagatataatgcatggtgtgagtcttattagtaggtatatggaatgtccaagtgagatacatcttcttgctgcaaagagaattttttggtacttgtgcggtacaactaatttccggctcttctacctaaagggagaaaaagtagatttagttagttttattgacaatgattatgcaggagatttggatgatagaagaagtacatctggctatgattttatgagaggttcagaagtagtttcatggtcttcaaagaagtaaacaattgtcactttatcaacaactgaagcagagtctatagcagcaacaactagtgcttgtcaagctatttggctgaggaagattcttgaagagttacacttcaagtaggaagaataatttattgtgataatagttcaacgattaatctttctgaaaatcatgttctttatggtagaagcaagcacattgatgtgaagtaccattatttaagagagcgcactgtggaaggcattattgatcttacttattgcaaaagtgaagagcaagttgctaatatattcacaaagcctctcaaattatccatattttagaaactaagaaagatgcttagagtatgtcttttagaagttcaagcttgaaagaggataaactgagtgtttgcaaacacatcactttaaaatagagaatgttgaataaagaagtaagtttattagttattaattattattatgggccgagtctttaggaatattttgttaatagtagggtatctatatatataaagga

SEQ ID NO: 124437 - DNA, 574 bp, Cannabis sativa
aggtcgtatttcttaaaatatactacttgttattaatattttttctcgaactttttcatttacagacttttagttcttttgtaagatttcgtcctactttatcgtttaaaattaaatactaacttgtctttgataattcttaaaaaattatttcagatattaaaataatagaaaagaaaattccttttaaatgattaagaaaattaaaagagaaactaaaattttaaaactaattaaatgatttaaaaaatttattatttttattaaaaaattatttaaatatgaaaaaatatattaaaaatattcattttttatacaaacttaattttatggaacaagcttaaatctcttatttttttggttccaagactctagatttgctaaagtatgtaaatataaatgagctatttttattggatttatttattattttttaaaggctaattagcaatttatcccccaaactttgacatatacttaattatgccctcagaatttttttagccgttaaaattttttcctaaactattgagattcttagatttaaggccttttgtctaatttcattcaattt

SEQ ID NO: 124438 - DNA, 1125 bp, Cannabis sativa
aactaagcggtctttacatttaaggtgtaaatgaaatttcccaaaataaactaaaataaactaagtagagcagaaaaatagaaaattagttttttttttctttttaatttaataataacatatacatatatagttttttgggtccttctataatgcacccctttaaaggaatgtgtaatctctacttgttttgtcatttagaagaattttttagttcatttttttttttatatttgtgtacgttataattatttaagatatcttatataattttgagaaattcgaaataatttacaatatagaaatagtgttcaaacattctatttcacacacgtataaaataaaatagtcacacctgcaacacaatatttgatccctatttttagcatgttaaagttttctgaattttttaaaattttacagaatgtcttaaataactataacatgtatataatcattagaaaaaattagacttaaaaattatattttgaatactatttatagatacatccttttttttaaggggttgcaatgtaaaatttttcaaatattttttttgttcaaccgatcattattgtttatttttataaaggagaaaattttataattttataaataaataaaataaaacaaaaaaaaaaatacatttatttgcaatgtatgtattgtcagaccaagagtttttctttttaagaaaaaaaaaaacaaagtagaaaagatgtttggtcttaacggaaaagttagaaacgttttctttttttgaaattaaatgatgtgttaattgttaaaaataattttcaaaaataatagtttttctaaaaattttcaacgaataaaattttcagaattaaccttatagtttttttttattttttttaatgaaaaaaaaagcaaccaataacttaaacaaaattcaatatggcaactaatttcatattactaaaaataatttgtaattatatatataaaagttattgtatggtatatattctttataactttattttataaaattatttcgataacatcatacaataattatatatatattaaaaaatatatatttattttgctaatataaactatttagtaccttattagattttaaatatatttaaaggtaac

SEQ ID NO: 124439 - DNA, 2079 bp, Cannabis sativa
  modified_base (1969)..(1994): a, c, t, g, unknown or other
  modified_base (2042)..(2044): a, c, t, g, unknown or other
atgaaccaccccaattgtgaagactcatttgccttatttaaataattgtattatgttaattacagttaaaaatgtaagaacaagactgaaaccagagggaaataaagcagagaaataataaagtaaaatgttacagagtatagtagcaatatgcggcaaagtgtattctatttgatttctcagtgagtgattacatgtaataataggtgtatatataatacaaggaaaggaatattttccttaacaagaaaatattctcttgatcaatgattggctgacatacaaaagaatcccaagattttaggagatattatgacagctcatgattgggaaatatctacagaatccaatattgacagcacaccgaaatagggcagtgatctggtgcggcaaagacttgttaaatttaacacgctccctcaaacttggcgtggttgagccaccacgacaagtttgtttttcaggtacttgaactgttgaattgagatagcctttgtgaatatgtcagctgtttgctcagaagtgggaatgtgcctgatttctatttttccttgtttcacttgatcacggatgtagtgtacatctacttctatatgctttgtgcggctgtggaagataggattggaggcgagtaatttggcgcctgcattgtcgcaccagattatggcaggcagtttgtgtggtatgccaagttctttgaacaaagagttaagccaggccacttcactggcagtttgtgataaggccctatattcaacttttgtggatgattttgcaacagccttctgtttctttgagctccaagtgatgagattacctcccaagtaaacgcagtaaccagttgtggattttcgatcatcgatggatccagcccaatcggcatcactgaagcattctacattgagatctttagattgtttgaacataatgccttgtccgattgtcccttttagataccttaacagtcgtttgcacacattccagtgatgttgtgtaggattatgcatgaattgactcaacttgttgacggtgaatgcaatgtcgggacggctaagggtcaagtattggagttcccccaagacacttctaaaaaatgtaggctaatcgaatagcttgctgtctttggcactgagtttgtcactaactaagatgggagttgtactctcatgagaaagcagcatgtgtgttttgttgagtaaatcagtagtgtattttccttttgatagatgaataccatacgcccctctagtgatttcgaaaccaagaaaataattgacaaaactgagagttttgagcgagaaaaactgttggagttgggaaatcattgtttggaccttttgagtgttgttaccagttaataggatatcgtctacatagacaagaagatatagctcagcaccagaatttttgtagtagaacaattaagaatcagagactgaattgcagaagccaagagagaagagcacatttttgagtcgatcgaaccaagcccgaggggcctgacggagaccatagagagctttttgcagtttgcacacataagatggatgtgtgaggctgacataaccaaatggttgttccatgtacacatcttcagtgagaatcccattgaggaaagcattgtcgatattgacttgttgaatatcccaattgttggtggcagcgagagaaaggctgactcgaatggtggcacacttgacaaccggactaaaggtttcaaagaaatcaataccaggttgttgttggaaacctttggctacaaggcgagctttgaggcattgcacagtcccatctcgattaagtttcacccgaaaaatccatctattatcgacgacactcatacccggttgtcgaggaacaagaacccatgtcttattgtttcgcaaggcaaagatttcagcatccatagcagactttcaccagggattgtgaatggctgtgagagcattatgttggaaattattttacnnnnnnnnnnnnnnnnnnnnnnnnnntgtttattaacatcctaaatatgacctttctaaaacgataaattaaannnatataaagttaaagaaaccttacactgggtgcagc

SEQ ID NO: 124440 - DNA, 1572 bp, Cannabis sativa
agcaaaaaaaaacttaataaattattatatatgtataacagtcggtttaagtttttttgatcagtttattacccgaaaaaaaaaccgatcgttcaatggcagttttaaccgttagctgttttttcggttcggtttcgtcggtttcgattctaacagtgtttggtaggtcagtttgaacggttttttcgattttctcaattttatgctcactcctaacatccccataagaaaaatgtgcatccctatattatatgcatttataatataatatagtactcctagccattcacaaaatcaaatgattgttattattaaaagaaaaaagtatgacaagtacaaatataaaaacaataaaaccatatgtatttttgtaaaaaaccaaaatatacaagggagaagccctatagcattaacaaggggaaacttagaaaaatactagaatttaagttaatttttacaaaaatactgtcacacggaatttttttttaaaatattgtgtttttataaaataacagtggaacacaaaatagaacaactggaaataacagtgaaacaactaaaaaaacaaccgtaaaacaacagtgaaaacttaacacagtacacagaataaaacttacacagtatttttgaaaaaaaaatccgctccacagtataaaagtaataaagttagaaatttcagtatgtggtgtaattatcccttaacgagtctgacgcatggttagagcccattttaaaaagccctaacctctagaaaaatgccattttttatatacaaagaccccataaagtttttaaaaataccatttttataaatattgctgacaacagaaaacagttgtataattgttcaacaccaaagaaatggtaataacatacctccacgtaatatttttacagtgtaggatgactttgaatcagatttaactaaatttattaggtggtatgtttgattttgatagcaattaataagtgtttctaaattctaagagtttgaatgaaataggaggcatgagctctccatttatagacttgtggaatttagtcatgaaaatgtcactctcatattcttatttgaaatacgaaaacttacatatattatatatatttgaattttcaagtttaaatgataaaaagatatttatttcgaacctcaaattatctaaattataaaagataaaagatatttaaatttgaaacttaaatctagatagataagataatcaatatttgaatttgaaactcaaatctctaaattataaaagataaaaataaaaaataatagaaattatgaaagttactttttagtaatttcataattttaatgacacagattataagacactaataataaattttcagactcatcattttgtgtgagtcactgaaactcaccatttatcttttaataatgttactaaaaagtgtcattaaaactcaattttatagtagtgttcgatcatataagatattaatttttagaatttttacacaaaatatttaaatgatactttttttttttcaattttttatttcatttttacggacttttatttaattttttactatatatat

SEQ ID NO: 124441 - DNA, 1215 bp, Cannabis sativa
agagctaggaatacgatttgcaagagggcgtgtactgtccttgtctcgggtgaagaggtggatgtttggtggcaaccgtggattccatggttggactatgatcaattccgtgaattgatggagagtattcgttcaaaagctccgagtctgagatctgtggcagatttgatgtatagaagcaccataaaatggaatgtgggttatcttcgatacctatttggtagtgatgtgggcaacaagattggcatgatccaaattaacctgaatgcttctagtgacttccttatctggaaggattccttagtgggaaattttagtgtaaagggggcttattgggttgaccaaaaggagaggtttggcgaaaaagatgagctttggagatggatttggaactctaaggtacatccacggatgagtttgttgctatggagagtgtgttcgaatgtgttgcctacgggggacaaatttctttctatggaagcaaacacctgccccatgtgccatacagcccctgagtcggctatacatctctttactaaatgcagtcttgctatggctttatggttctctagtccttggcccataaggatcgagagggtgtcgggtgccaatatgcaggaggttattcgcaatctttgcagttccgttgattcctctcttcggcccaagtttatcaactgcattagtgtgattttggattgcatttggaacacaaggaataaagtgtaccatacaagggattatgtgcctaatgtgcatttgatcagaggagaaatctgcagcagagttgctgaattacaccaggttgttgaggagaacatgagtcagtcaagcaatcacgaaggggaactcttgccgaggatatccactaacacttctatcatggtggacggctcgttcaaggaaggtacctatgggtgtgctatggtggccctggacaaaaattctatggaatggtggcaaggcacctcctctggtgttggagaatccgcaatggaagctgagatgcaagctgtcctgctgtgcctgcagtgggcttttctgcaacaatgggataattttactgtcatctctgattctaaggtgctggtggaggctgttcgagccaaaaaacctccggcttggaaatgctctggccttttttctctaattttactgaaactttctatattttctgcctgtcattttgtttttgctaaaagagaacattttact

SEQ ID NO: 124442 - DNA, 907 bp, Cannabis sativa
  modified_base (214)..(226): a, c, t, g, unknown or other
  modified_base (280)..(285): a, c, t, g, unknown or other
aaatggaccatgtattttccaaaatagtaaaaataggaccctgagcttaatttttaaactttttttttaacataatcaacttaaaaacaattccttatacgaatagatacagaaaatgtaaacagttttgtcatgatacttttagatcggattataattaaattttattttgacaaaaaatcaattcagagtcctatttgtaccattttagaannnnnnnnnnnnnttttgtcatttaacaaaataaattgtccatttgataacttttgcaaaacacagnnnnnnaaatggtatttacccttatttttacaaaatttatatatctttgattatctttaacactactgaaatcactttaatcagagttatacaactttaaatatgattgttttactatgacaatttttaaacttgtaaatttctctaaacttacaaatttctcaacattaactcgataatagtattatttaataccatttatacaaataattaaatccactaaataaactacaaaatcatgtttttatattgggctttaattaaatgattacatataaataccataatattttaccttcacagttaatacaactctaactatctttgaaaattgccacaactactctaagcaataatctcaactcactaacaacacaaataaataagataattattatcatgtaaataatatttaaaaacaaattaaatattattttaatctggatattacatggtctttgttttggctccgaaattcaaatctagagtcggggtccgagttcaatttcggggctagggctgaggccaggcctgatctagggctagggtcgagctgagggtcaaaaataatgataacagaaaatacaaataaactataattaagaaaaaaaaaactatttaaattttt

SEQ ID NO: 124443 - DNA, 2153 bp, Cannabis sativa
  modified_base (26)..(42): a, c, t, g, unknown or other
aagttcttatttaggatgttaataannnnnnnnnnnnnnnnntctaagatcttggtaaaataattttccaacaggtgtggtgtggcgtaacattttattatttttacaaaaaaattatttaatcaaataataatttttattatttttttaatttttaatttaattgaaaaacgtatttaattgaaactgattaattaatcgtatcaattaatgggacacgttcaaccaaccaactacacttcacgattcagagaacgttctttcttctcgttatattatttcaatccattcatcaatataatgtgattgaactgatgggaagaatacatcttttttatatcgaaaaaatagacacagttttcactataaaagtccatctgcgatatcataaattttagggtgtattcgacagttctttatagtacagtgggcttttgatacagtacgactgtactgttttatcttggggatgatcgataaattttgactacttgtacattctttgacagtgttgcaaacgtcttaaagaaagtgacttagtttgtgactcaatttaaaaaatttattcgataatatcgtttctcttttatttttactaggagttaatcaacatcatcacattcacatcatatccaaattgtaatgtgaaatagatgtttaaaataatgaactttatttattgttaattagtttcaaatattgtatctgataaattttagtgtacccttaagtattatctaaacaatatattttttttttctttctaactacattatgaattatctaacctttcatttccttttctattcaatagtatcttaaaagagtgtatatgtaatagtatctacaacaaataaatgtgtaaaaatgttaaagggtactcatagtacctagcactcttacgaagtgtatattattagtacaataatatcaggtcttacttattttaatataataaaaattataaaaaaccgataattaattataagatgacatatcatagagatactagacaccttggtgtcccgtaagaatactgatagatattaggagataaatcttttactaccatgaactactttatttattgtcgattaatttttcgagttggaatctccctaatctgaagtgacatcttatcaatactaaaatttaattatattttatattgtaacaagaattcacaatattaattgtacacggaaaataattattttaacattttaataattatcaatactaaaaaaattatttaacattttaataattattttaattaagtgtacacaatttacaatgttcataatattcaaataaaaaaatataaacaatttaatataagagaaattaagaacaacatttattatcacgaattaagaaatcatattttaaggttttgaaataaatcttaactaaaaagaaactactctatgctaatcatcataatcaaaatcataattaaaaggtaaagagataagaaaagaaaagaactaaaatgatgaataattggtaatacaatcttcttcttctccattttccatgagtttttctttcaaaaatgcagtctccaaaaataaaacttaaaaatcttatttatatcccatgaaaattctttgatttaaattaaaaataaaatttaaaattttagaaatcacgctcttgttgtggggagggtttatgctcgttgcgacgagagctttctggagaaaaccctaattgtccaatcgcacgctcgttgcggcaacgctttaggctctctgcagccacaacacgcttgctatagcgagagccctactaaattttttttgtcgcgtgttaagattagtattttggccataactctttcaatataattcgaaattggacgattaaagatgttatgaaaagctaagaacgagatctacagcttttatattcagctttaagcacgggcggagggaggtagagcttaagggtggccctggccccccaaacccaattatattgatattgttttctaaaattttctatgtaggtaattgtattttgttttggtaactcttatacatggcccctgataactctagaaattagagttatttttcacatttttttactaaaaattggtttagttcttaagtttttaattaatttagtaagtttttaattatttt

SEQ ID NO: 124444 - DNA, 1236 bp, Cannabis sativa
aaccacaggtcggggggtagtcacgtgaaatctgctcttgataaagggattataaatggagcttggatacaactgtttcctaaagctgttattcgctcttcgcatacaagcaactcggatcatagacctcttttcttggatactagtggtcctccccctacctttaagagatttttcaagtttgaggagggttcgatgagggatgtcagaagcaaacttgtagtggccaatgcttggggttcgatagatcattcttgggctccggcccgagtatttaaaaagctgggagctactaggattgctcttcttaagtggaatagaacgcagtttggtaggattgactaggttattaaagacctggagaaaaaattggatatcatccagaggcttccggtgggggcccgggactggaataaggaatgtgaaattaggaaatctctgaacgaaatgttgacccggaaagcgctttattggaagcaacgagctaggaactcttggctcaagcaaggtgatagatgctcgaaattctttttcctctcggcagcaataagaggaaggagaaatgccattgaaagtataatgaacaagcataatgtctggctcactgacagagacgctattgcccttgaatttactgattattttaaaggtatctttgagggctccgggcttaaccagaacttggattgtaggggtttgtttcaagagagactttcccaagaggggcaggagggcacccttctctatccatccccggatgaaataaaaagtactctgtttgctatgaatagccataaggctcctgggccgaatggcatgtcagtactttttttcaaacattattgggagtccgtgggagaggatttctgtgaagcagtgtctgacttcttcaggaatggtcatatgcacaaaggaataaatactacaaatgtagttcttatcccgaaggtccagaatccgaaaagaccgagtcaattcagacccatatcactttgtaatgttgtttacaaggttatatctaaaataattgcaaatagaatcaaaccagttctgccttctattatttgccctactcaagctgcgtttgttccgggtaggaatattcaagataataatgtgattgttcaagagattagccactcgttcaaacgaaagaaaggtagagaaggtttttttgcaattaagattgatcttgttaaagcttatgacaggcttagctggaggtttattgaccat

SEQ ID NO: 124445 - DNA, 1912 bp, Cannabis sativa
ttagtatcgcggtgcgggtgcggtttagaaaattggaaaaaccgcatgtgcgggttggtttaaagaaataattaaaaactgcaccacctgcactgcgaacacccctactaagtaggtctactagctggatttataatttttcgagaaggtacgagagctgaagggttctaaggatcacctacttttgctttttccttgttctgtacaggagcagaggttccaacattagcatggttttccctattatttcctctgacacattccgttgaggagttatcatctgagtctcccttgtctagatctctaaatttgtctcagaagcaggccatcattctctccattttctgagaaaacttctcttggcgggctagcttctgtttagtctcaagcaactctttggacactcaaatcacttcagggtcctgctcatagtgatagacatctttgtaatacacatctttgacatattctccatcatagtcttcctcctcattttcaacatctcggtcttcgtcaatgtggttgtgctggttgttcaggttagcctctcgtttgtcggcattggatgcatcccctcctctcgatttgctcggctgggtgtgctctggtgagagagggtttacatctttcatgacggcatcgaggtctcctggaggagtcctgttggtaaattatttttgagtaaacaccatggttatagtggaactatgggtttaggtctttcttcaactctcaatgaaagcaccaaaatagttactaagatttttaaaaactaaatatttaagagcttaagaaataataaaatgcagcaataaatgagatggagttttttacatggttcacggtgttaattaatcttattccacgagtcagtctattagccttagaaggcatatatgatgtttttacagtgttttgcaggaaatcctaactctgtattctatgtttctcttgaagaagaggaaatcttagaataatattaccagagcttcagctgtctaggttgtgatcccccctttgtatagaaatagaagagtatttataggctgtaaggcgaatatggacatgctcatgactagcctagggtttctgcaaaaagtccactgatggggtaaaatacatgcaaaaagagctcactgttgggccccttagaaggatttgtgctcgtgcattgcaacaactggacaaaaggggaccaatgtacgtagtggacgcgttttgccaaaaggtttaaccttgaaaagtaaatgtctagaataacagtgtggcaaaaaggtgtatgaggtgggcacactaccatgtccgaacacagctaacaagatctaatcctgtgttagaaaaaacataattgtcgttgggcgattcaggtttgtatccaaggtagacgtttgcgatccttttgggcggtcagtgtccacgataggcccttcgaggacccattcgggtatcacttgggcagcgtttgatcttggaccactcgagtcttggagtggtaacgagtcttccacctccaggttgagataaggtaaggtggatctccgcatacttttttagtcttgaccttttcccgaatcagtgaagcttcttcgtgacttggtttaactgaggagttttaattagtgagatcgtgagattatttcttccttatacatcacgtgtcaactgtttaaaaatacaaataacactagtattcacaaaaaaaaaaaaaaaaattattatttattttagtaattatttaaaataaaaagtttttaataagagacaaaaaagtaattgaaaccctcaattacctttaattacacaatacataagggtgtgtttggaagtaactgtgaaattactatatagggtaattactagggtggtaattacacagtctagtaattatactatatattttaaaatacaaggt

SEQ ID NO: 124446 - DNA, 1684 bp, Cannabis sativa
tttcttgtccgtctccagtatatcgaacacggacttaaaaaattgacaatcgtaattataagtacaaatcataatcaatagtaaaaaaacatgagtactaaaattaatattacctttatgtcattccacaattagttttttaatgtcttcactcactttaggccacgatatatcttgaagtggaacattaactcgcactcattctccaatttagataacttgcacccatgatatatcttgaaatggaacattaactcgatagaaggatgtcctatttttatacaaatatgtagcaaatggattctacatacatatattcgtgaagttaataacaatatatgaaagataatttgtgtgaataggtgcttattgtgaatagttgtatctatatgtgagaggatgcaattgttaagatatgctattagtaatgtatacttatgttacaattaactttttattggggaatattttattaaaaagcataacaatttattaaatgtacaacaagagtgtcccgaaagtaagtgtaatttaagtatttaaaagagtgtcctaagagtatgagttatatacaagagtattgtaaaggtgtctagtattaaataagagtgtgagtgtttagtgtattatacatattgtggtttagtaaaatgtattcaagtcttagtataattatttttgcaataataaaagtaattacgtttttcctatgttgtgttgtccgacaatttatagttttaacgtatatatattatgagaaaatattgattgttgtgtattgattctactgactattcatcttcttttatttcgttataaaatgttctttaataatagtaccgttcatcttgaaagttgaagcctgtatcttttatcttttatgaattataaagtataattaatatttgtttaatttaaaattaaaatttttattttgccatttattttttatttttttttcttcatcttgccataatgggtactcgacgagcttttcataactgataggtatttccctacctaaatttgttgggttttaaacaaggatggggcaagtatgggggtcgtaaatgggtagcgggaatggaagtggagaatgcgttcctcacatattacctgctctatttccatccctactctcatcgaacaatatcaaatattaatgaaataaaataataaataaaattatatacaactcttctattgtaataaaagtgcaccatgcttttctaaattatcactggtttagtttgttataccaaagggataaaacaacagcccctacattaaattttccctatatattgtttgtttatataggtaattgatgttataaattaattttttttgaaaggtattataaattaattatgataatatgattattttttgttcaatcattatatcttttactatttatttatagtatgttgtaattccagccaccataacaccaagaattcaatcataaaacctacaataaactcaaaatttggacagaaataatgaacataaaccaattaacaacacaatgaatcgaaaccagaaatcaatcaaagaacaacacaagaatttatcctgattccaatatcctagagatcaacatgatccctggccatactccagctgagaaacatcaccaattcttcattaatatgtggaataagagagtatcaatataatt

SEQ ID NO: 124447 - DNA, 1508 bp, Cannabis sativa
tattggtgactattatgtgacaacttagcatctttggtttttgttagtttttcattagctattagtcatgctcttttatgttgttggttgcataaatcataatttttcaagggagagaatgtaggaaccatatttttctgtgtgccaaattatgtgtgtgtctcattggttggctatatggtcatactatggtcattctcagtgtatgttgttttttgttggtccagtttctgttagttatctttcatgtactatagtttattcattgaccataattttccaaaggagaaattgtaagtgtcatattttttcagtgtggcaaattatgtgggtgaatcatctgaccaattggtagattcatctaggtttatattttctgagtttttattttaattcttgacaagtcagcattatttgaaaaaagatcttggacagttgtcattagctagctgatgagctgtcaaggtcggtttaaaagagttgtacatatataatattgtttctaacagattctaatgaactctcttcatctttgatagaatcttcttgtgattcttgctctgcttgggaaaacctttttcttgttcttgtttgtgttgcaggtgcttgatcattggatcttcaggagctgaagaagggatgatgaactacattatctgaagggatttcagctaagaagaggcaaagggatcttgactttggaaatataaagggacttagatcttgaaacttgatttgaaaagaagtgttagggtaacttttgaatggattcatttctgcttacttgtaatgtgttgtaattaatactggatattatatcgttgatttcatagtgaaagttatcttactttggttcaagggaattaagcactagtcacctagaatgtgtttctagggttttataaatttagtgttctttgatttactttgtgttttaatacttaagatattaatctaagaatcaatcaagtagcaaacggataaaatagacctttcatggacaaaaccatgtcattcgacaaaggacaatgcctcacttaacctccttgaagtttgagctaattttctttctagtcttgaaccattcattttaatgtcaatagatgtatctattatacacatcctatagaatatttgttaatggagattagttacacatatgaatgagatcactaccatcccaactatcaagccctccttgaaagttctctaaaatattctactcacttttgataacttaattcatgccaagcaacttattcaaaggcctttctcaagcacgaaagacattcctaaaggttttgtggcagttattattggtaatgagagcaggataaagagatttatgatcctgttagaatttgggataaggttaatgaggttctatctcaaaaccaatttgttatgggaggagtagtcattcctcttatatattttattatttttccacacattagcaatgtgagactctctaacatcccctcaagatggtgactattttatatgct

SEQ ID NO: 124448 - DNA, 522 bp, Cannabis sativa
atatagttttatataaaaatattatataaaatacaattcaatataataaaatacaatacaatacgacttaatacggcgttccaaacgagaccttagtctattatctaacctacagtaactatttctttatttctctctcctaatttaatataataataagcctaaatcaatacaaagataatgatgctttaaaacgaagtagaaaaatgcaaaaatgtatgacttgtttagttttacctttttaaattaacaatatttttttttcatggactaattaagagttggaaaaaatggatgcttctatctatggtatagtatagtatagtatagtgtaatgtagttttttctctactgattccttaattttaatctttgttttcttgaaattttgtagttttaatgatgttttttttttttgaaatagcatatcctctttgtttgacaagaagattgaaggagggtgacattctcctgccaaactttaaaatttaaaaatttaactcttaataataataataataa

SEQ ID NO: 124449 - DNA, 2293 bp, Cannabis sativa
  modified_base (2225)..(2229): a, c, t, g, unknown or other
aagagctcttccatttatgtctattaggcaaagctctaagaaaattatcgtttcacttctaattagctatagaagctatatattttatatctatgatttcctactcaattgcactactgtgttctcaagatataagtattgggccgatctaagtggtcagctttaatgaacaagtcagagaacatatataatacatgtaagccagaacctgaccatctcaagattaagatcttttgatctaagatcaactaaacgacattgacttagaaaagatattacggtaagtttatgatatattttctactatcaatatcggtccagtccgatgtagccaatatatccaatactactatactttgttaataccctggaaagaacatccacatatcagtgtgtaagtaaattttatcattgattatcaggccagttaaatccaatgtactaataaatcataggactaaatagtttgaagcatataatcatgattattttctactgtgtagacaacactataatcatgaacgataatatgttcgagatttaatagagtttgtataataaaaccataatcatgaaaattatatgtaaacataaatgatttctaatcctttattgatactaaataagattatattataatgagtttatttagggcataaaatccaacaggtttctaaggtgcttttgacatgaatttatggtgataaattcatgaatgataggcttgagtttttgtgctgtttgaggtttgtagaacctagatttttaggtcaatttattttgctaagaagtgtttgaattttgagcatcttttgaggctaggctgtgcttagttttctaagctttgattaagtgtattttgtgaatatttgatcttgaatgtgtgtgtgtgtgtgtgtgtattacacatgtgttattttttgttttgaacttgcatacaatcttaattggtgttagaaaccaatagcatgtcatgtttgaagtttggtttgagtttgtgtatgtttggagttgtacaatctaggttttctggggtttcaggcctagtcgccgcaactagatttatggtggtcacagcgaggctttacccaaaataggggatagcccatacccaatttggtcacggcaaccacgtggttggtcgtaatgaccctgaggcgacaatttaattttttttcccattttgtttttgtcataacttttgactccaaactctatttcagacgttcttttatcattgaaaagcttgtttcgagctctattacttggtccatagttaaggtcctatatgtgaatattattaaatgtgattttgagattaaccttattgtctataaacccaagatttgtgactaggaacaacgacacttacttgagattacctatggattggaaattttcctcttacattagattttaagtaagaaagaaatccttgcacatagagtatagcgtaatggcgcatttataaattatatgaacaatttgatagaaacgtgagttagggttgttattctaagcttcctatgtctatgcatacattaaatgaattaattgagtatatgtcaagatttatgcgacaaggcataactattttagacttggtgaccaaaactgagaggaaccctgataaggccttatgtaataaataggcgtgtgagtgtaacatgtagtgtctatataatatagacttaagatgcggtggcattattataagcacagtagcatgttatcttagtgtggtggcacgattttatgcagtgacgtattatgtgtgatatgtatgttatatattatatttgattgattatgctttcttgttgggccttggctcatgggtgctctattgtgtaggcaagggtaaagaagtgctaggacaaccatgagttcgagagctttgaaaatgaattgtacatattgcaaccaagctagaccacgagggttgggtccaacagggggattgtataaaaatcctattttgccgcttaggtcggcttgtatgtaaatgacttatattttgcaaaagattttacgggatcccaaatatgtatttatattattttgaatttaagttaaagataaattttattattacaagttattttatttaattaagttattttgttttaatcacttggcttattgaacccgattaaacgagattagtgttatgtaatcttgacactcagcatcccttgttggatttattttaccaggatctagannnnntaacatgtatgtttcattaacaccctaaatatgagttctcaaaataatgaaattaaatacataa

SEQ ID NO: 124450 - DNA, 2035 bp, Cannabis sativa
  modified_base (890)..(892): a, c, t, g, unknown or other
tacttgatacgtacacttgcgtaataaacataattttcgtaacaatagcacgcatgcaagaaagatcatctcgacaccagaaactatagttatcagaattagaacaatttcaacctcgagaagttatatgacgaacacgagttcaccatcaaagttaactcggttccattctcagcgaggcatccccataagataacgtttaccttatatcttaaatatgcattcatcttggtctaataaaagcgagatactcacagctgtgtgaattataaataaaaactgcatttacttagcgtgatttgtaatcaaatcccatgatttgaaggaataattgctgtaaagattacaatcaacttttgtaatttactgcccactatgtaattataaatagtggcaaataagatgaaaaaggggatgaaaaaactcatacaagggaggccctaagaaataatcaaaaatctgaataagattgactcgtggactatgtagaatttttactgcaaaaaccacgtaaaaaaccctgtgttcatatttttatatttatagcttttatattttttgtgtgaaatcaccactgtgaggctcaaattagttaatgaaaatctgcattaacagtttgggtgctttcattgagagcgtattgtgaaaaagctcaaaaaaagcctcctgacataaaaataatggatgatgctgaagataatacttctcatgaaggaatcagtcatcgccctggataagagccattgagtcctcagggatctattgagtcatcacatgaatagactgcaagccctgggaaaaccatgtattggggtccctggcttgatggaccttgggtaaacaacaactggtcacttcctaaccaggttgatgaggatggcgcctacgannnaaccaggtacataccaatcgtggaattagaaaatttccatcttaggcatcgattggaggaagcaaaccaagaaaatgccaaattagagtctgaaatagccgcagtaagggtagcgcgggagagtagtacccaaaatcaacctgaccttgggagaagagactcacgaggcaaacctcacaactcgaaaactatggggcaggagacaaccgagagatatactcagaactctcaggagatgaaacttgaggaaactgaggaaaatctggggacacagcctgggatatgtggaacatcaaacgataatcaccaaccctctcttcaagttcgtcaaaaagaaactcgcacaaaatattatagggagagcaaagtgaatcaaaccttaaggggaaaagcaaagttcgaccgcagtcacgacaggagtgacctgagagagcatcaaaacttgaagaagttatatcttcgtcaacaactcggtccaaaacaaaaggattccctccatttacgaatggacgagttggaaaataagttcaaaaagcatcaagtcatgaaatctagaagacaatcgagatatgattctgttggagaatttgaatcgaaagcttcaggatcaaagaaaaaaaaaagattccaaaaggctacccaaggataagaaacacaacaaatatatccctctttatgctaaatataccgagctcaatgaaactcgggaaaatatctacctcgcacatgcacaagaagtcatttttagtgagccaaaaccaatgaaacatgcgagccgtaaaagggatccaactaaacggtgtgaatatcatggggatattgttcataccgctaaagagtgtcgtcagctgaaagatgagatagaaggtctcatatcacaaggacactttcaaagatatgtaaaggggttggacgatgtccatgatcagctcaatctacccaataactcgagcgactagggattataaccctcctctgtggaggaagggacacctcggttatctctagagggtgcgagtcacaagaatacaaggggcagttaatacggtaaagaaattttgtaaaagaattgtgacgtgagtagatatcggcccactatggttgccatatcaaactgccacgtggaaagctggtcgtcaacca

SEQ ID NO: 124451 - DNA, 842 bp, Cannabis sativa
tttttttaattcattttttatttttaaaattttaaaatattttaaattatttttttaatatttatattattaatattaagtggaccaataaaaatttgtcatgtgtagacgtgtataccgtagcagtccacttttgtacttgatcaaaatgaaccaaacgctggagagcaaaacaattatgaagattaggaaatttagccataatgtttctagtgtagtggtttaaccatgccaaactttaaagttcaaaaattttagccgtcagatatggaaagcatgtctcagtttaggtgtggttgtgttcctttttacaaaaaaataattattttggaatatatatcacaataatgatgatgagaaacaacgttctgtgatgaacatgtatggatatactattgtgtatgggtgtaggggtgtttattagatcacatttaatggatttggaccaaactgatccaattcaattatttattggatattgaattttgtcatctaatccaatcgaattcactcatccgatcagatccaatggatgtattggattggatcggttccaaccattggatgcattgactggttttttattggattggattgaatccatcaaatccattttagttaccatttaagttgatttcattaaatatatatataatataatttaaaaccactaaaaaattttattaaatacactttgataattttattagcacttaggaagatgataattaatatattagatctaaggtatttttttaatctaatgtgttaaatgtatattaagtccattaatatatattttaaataaaatatataaaattatgaaatttttacatgaaaaa

SEQ ID NO: 124452 - DNA, 696 bp, Cannabis sativa
aaatattgctatttatcactaaacttcattcctaacctcatatttgatttatcattacaaatacatcgctaaatattattaaatataaaaaaaatatcgcaagaaactaggaaaccagaagaagaaaatgtaaaaaatgagaaaattcgtgagtgaagacgacaacgggggcttacaacccaagttctgggtctgtgtgttcgacgacagagatcctaggtcggggttcaacactagagagtgaaagagttagagagagaagtttttttaaatgtaaggggatttttgaaagaaaaatatattagaagtatagatatactatttttaatagggtgtggtacattaaaacaccatgttttatatttaagcatactaagccaaattttccttcttgaattgattttaattaattgatgcctctattttgttttggttaaatggaaggaaaaacacaatttgaaagaatttgcaaaaagaaaaaaaaataaaaaaaacaagtagatgagaagacaataaaactaaattgttgtgaattaacggtactaaaaaataaagaagtaactaaaagagtaaatggtaattttaccaaaactaatgatgaaccgacacaaggaaggttaattactgaaattgattatatcaatagatattacaataaaactcagtaaatatataattctataactactaagagtt

SEQ ID NO: 124453 - DNA, 1804 bp, Cannabis sativa
ttaattcatgtttataattcatatcttgaaatcaatcaatctaaagatagacaacttggtaatttgaatcattaaaatctacaagttgcactttcaggttgttttgggcctagcgcccaggttgacatcccaacacccaggttgacatgtgatgtcaacttggatgctaggtgagtggaaaaacatgtcagagatgtattttttgatgcctaagtgatattttgacatcacttagtccaattctgcattctggtaaagctggtcaccaattcatggagatgttgtttttctgtagaaacggtaaactcaaaattactcggtgttagacattttatatgaataacatgaaacatatgaatgtgtatataaagtgcaaaagaaaataaatatatacacaatataactattgaattataatacctctagccattgaatctttgagcatcaatctcacataagctctgatctgcaaagaaaactaattagcatgggtattcaggcttccaagctctctttactctctttagatagatttactgtatttacaaaatgagtagtaagctcagagattgagatcctatatttatataggtgtaacattccatcaatgtccctaccctaattaattgtcaaaatattttgtaccagtgtggccaacttgtagtagtatggtttgtaccctcctgctcctggactcatgggagcccaaaggccatctgtagagggactttatcttggagatggacaagttcttgacttggatgacgacatgcctttgtcacgtatagctcagaatctggagaggagagagagagagccctccaccaatgcttagccagcaagggttaaattggtgatgcttctctctagatcaggcctggacgccagacttttgagggacctgctcgccccttgcctacatctagaggcaaggccaaggcagttgttgaggattctaacagtttctcttctgaggatgatatatttgatgattgatggcaccatcttttacattcttttcttgcattgagtattcgtgacttgctttctgacttcgttactttctttttaaatatgtcttctaggttgagatgcctcactaggggaccttctgacgagccttcaggttgactaagggccaaggtgcctcagacctttcgtggtagagatcctgttggatcatctctgcctcctcctacaccagggcctgcaccagctgggcagcctatgatagatgatcctcctgctaggagggaagggtcttgtggccagggtgctgcaaggcccagctgaggctcagtcacaaggaagagagccatggacgtggcccacaggcgcatagagagagcccttccttttatggatgaggagcttaaggagcatggtgatgacgagctagataggctctactccactggcctttgtgatctatctgtggtaagttgtacatttgatttttttcatctttctagatcttctgtaagctggccagccaagggatttacagcatggggcttgacgaccaaggttgtatctttgaggggctgaccggccatggcaaccttaaagagaggctggctggccagtgttgtactttgacactaactttgtgttgttttgctttcaggccttgatgaaattgagcttttcacgcaatagctcctgaggatcctcaaatgccctttaggagtagatgaagactatggaggctttgttgggttttctgccctaaataaaacccatttcaatataatcggatttactaattaataaaaatcagaaataacattttatgttgaatggt

SEQ ID NO: 124454 - DNA, 2182 bp, Cannabis sativa
  modified_base (2112)..(2114): a, c, t, g, unknown or other
aaaatgtataattttaaaagaggaaaaaaaaaatttgggcccctggactgggtgggccctaggcacaagcctagcccgcctatgcccagggccgggcctgactcatggagatacttaattgttataactattaataatttaaaatgataactgtgaaaaaaattgtactctaaaagggactccctagagaagttagacataacatatttcatcataattgaacccttgaaatggttctatataggtacctataaattttcaaatatgtaatttaaagagatctctataagttatatcaatatgggaggaattatcatataatgaaattcatgtcgacaatagagtttaaatgtttgcatatgcaatctattgacatgagatagcaatgatgatagtattagattgtcgagaatcattgatatacattttatttttggctaaaataatatgacgtaatccaagcaagtttacccgcataaagtgaagtaagacttgtagagtgtacaaataaatatctttgatgagaaatttgtatatatgtatttatacacaaaataaattgttgtacaaaatttgcatagacataatagattgattggagtaaggcttaaatattgaaaaaatataatcatgatttgattatagcttagaatagattttatgaggatttataaacgtcatataaatattgcaataaaaattatttatttggagctcttaatatattgaaaatttgaaatatgtcttatctaaatatttatgattgtcaaaggaaagtacccttagaaggaatacaagagaaaccagaattcaaatgagtacaaaggaaatcaatataagcaaaacaccaagaactctacatggggttcaaattctaaaggaaactcaaggaaacagtgctttactgcaagaaaggagggcacttcagagatgaatgtttgacattgaaggctaagttgagaagagacaactattaaggaaagaatgaaaaccaaggtgaggctgatgttgtaaatggttatgaatctgcatgagttcttgttgcatccagctcaaacttaggtggagaatggatcatagattcagggtgctcatttcatatgacactaaataagaatttgttgagtactcttacaaaagaacacaatggtactgtgttactaggcaacaacaaagcttttagcatcacaagaatttgtacagtgaggattaaggctcatgatgggcaaatcggaaccctgcaccaagtcaaaattttcccaaaactaaaaaaaattgttatccataggcatatttgacaaacttggatacaaaatagatgtgagtgatggtgtgatgataatcagacaagggtcacatgtgtagatgtaaggaaagttgaataatgatttgtacttcttggatggagacacagtagctcgatctgttgcaccaactattaactcagtataggtgcaaatcatacaagactgtaacacttaagactaggtcatgtaagccaaagagggcttgaagaacttgacaagcaaaggctattcaaggataagttgaaagaaaagttagaaattttgtgaagaatgtgtcttggagaaggcctgcaagattaaattcaataaatgagaaaatactaccactgaaagattggcctatgttcactagatctgtggggttcatatagaaattccactatgtgtggatcctatttcatgagcataatggatgatttcagtttaaatatatgggtgcatctattgaaaaataagaaccaatctgttggcacttttgtagaatggaggaagttattggagaatcaaatagtgtaataactagtataaatatattattatttgacatattattgtgtgttataatattttatatattgcattaaaggggatattattgtgatattttgcacacgcatgtgtacgtatcgttacaagtagtaaactcaccaggagttaagtcgatccccagggattttagttaagtacgttgaaattaaacttttacttctaggttaaataaaaattaagaaagaattaaaaataagaaaactagtaagaagaaaatatttaggaaaattgatagttaataaaaactagggcttcnnnttcaattgtttctattgattatggcctaatatgattattttcctaatgttaatctctatgcaatagca

SEQ ID NO: 124455 - DNA, 669 bp, Cannabis sativa
tggtaaaataattccaacacagagtgttcagaaacaatcacaagaaaatgacaatgggaggtccaaatttgagagtgatttttgatcaaagaggaatgactaaaatgtttgacagtaaaaagttttagaagaagattaatgccattaggagtttctttaggtatatcattgagagtatatactgtattttcattagaggttaagatcatgggttgaggggagtgaaaacctagatcttccatttcaaaactatagcaaatatcaaactgagcaaataaggaagaacatagataaataggtgcatgaaaatgaaatcttaatcgagctttataaagaaaaaaatacaagactttgaaggatgtctattggtttgcttttgaccatagctcctgctctagaatccataggtatcatgacgatttcattctcctaagctccatcatcaccatcatttcgactcgccgccagttttaagaagagaaaaggatctttgggttggcttctgatatgatagttagatttagtgaaggaaaaaattaaattgcctcgaggaagacacaactcaaagagagaaaaaaaggcaacctagtccatttaattaataaaaaaaatttccaacttaaaataattttctatttaataaaatgattaataaaataaaaagaaaat

SEQ ID NO: 124456 - DNA, 1542 bp, Cannabis sativa
  modified_base (1493)..(1515): a, c, t, g, unknown or other
aaagacactactctattgagagtaattagagttgagcacatcataaatattatgagattgaaaattattcatccaaattaatttactatccattttaagtacatgcataactaatttatgagcagctagtcataagttgaacataaacagtgatagacccaaaaattttattttgtagaagcttatttatcataaaaaaatatttgtagctacattataatcactcttactaaatttatctaattttgtggagaattttctactattttgatctataattattaaattaaaaaatttacatttaattttttaagaggcagtatttttattagtaggagctatagctaccacatttatgttaatgggtccgtccctgaacatgaatggattaggaactcttaaaaatattctcattacaagaaaaaaaataagaagattgcaattaaaatacttaaaatacaagtaaaattattacatcaagatgaacacttagaaaaattctagaaatactcttaaggattttcaagcctcatatgctcagcctagtgtctaaaaatgatcatattctcacaagggttttaacaacaataaaatgtattcaacaacatttttcaagtgaacaatatgacctctatttatagagttttcactctcaattaaacataaatgatcaccgtaaagctcttggtagttaacaatattaaattggacatttatggacttaaattggtgatttgaaagttatgggagttgttagaacagagcacaacgttcaaaaaatgttataaaatacatgcagaaaataaaaaaatttggcaaactaactatttcaaatattaaaatttacaaaataacctcaattaatttactttatgctaccatgatagtagcacaatgtaaatctatcgtcgttttgcgaccataatagtcgtttatggtcacacagtgcagttcatggttattttagtgaccataaaaagttatttcgctaataaaattttttataaaattattttacttataaaaagtttcataaagactatttttacaaaacactcctgaaaaatagtcacacaaaatgtcgcctatagtgtaaaatctcaaaatttggtaactaataaccagttaccaattttttcaacatttagcaaaataactcaaaacggttcaaaacttcccacgttgattttatatgatttatataccttataaatgatagaaataggtcctcaacaactgtatttccatacctaccatttaattacattcaaatataattagtaactcaatttacttattaagagtggtaatatggagaggagttacaaaatttgttattatcatctttcaaggatttgcaactcttttttttaatttatgctcaaactatgtaacttcttattgtatatgttactatttgataaaatcaatatcttgtcacacttaattatgtaatccaaacattatattatatataaggctaattagtaatnnnnnnnnnnnnnnnnnnnnnnntactaaatcgtgcccctgaactttttt

SEQ ID NO: 124457 - DNA, 839 bp, Cannabis sativa
aattatagttaagtactttaaaatcaaattcttctatttggttaaataaaattaagagagaaaattaaaataagaaaactagtggaagtaggaagcaaataaataaataaaagaaattaacagttaataaaaattagagttttgatttcaattgtatctattgattatgacttaatatgattatcttcttattatcaatttctatacaataacagatttactaaggtaatttatagtcttctcaaatgtataaatctcaattacatgcaaattctctactctcgtgataaattaaacatgtaacaggaattaaacacagaaatcctataagctatctaaaccatataggttctctcgtcttatatcaaagtttaattctacttcactatagaataatcgagattcacttctcagatctcgtattgaaatcataaaataattaattgatggccaggcaattaaaagtaattaagtacgaatgaaataaaacacatagaaattgggggaaaataaatcatattaaaaccataaaataatgtcaaacaatatccatctaaaccctaatcaagtgtttagctactcatgttcatggaagcaaaatcacacatattaacttaagagaaaagagaagaaaatagagaagaaaaaatggtaaataccctctgaagaatgcctccagtattgacttcgatatctgaaattcgtactccttttttgactatttatttccttttgaattgttttccgaaatcaactaaaatgcactccttttatagtcattgagggactaaaaagatagaaaaatgcacatactgaaaatcctattcagctttgaatta

SEQ ID NO: 124458 - DNA, 1793 bp, Cannabis sativa
aagagttttattgattgaggcatataaaacaaagtaacaagccacatttattcttgattgtatatagtttcttctcctcaactagttgaacttaattatgatcattgtttcttccatcttcattcttcttcatctcatctttatcaaacgacttgtcgttagaggaattagtattactaccactagttgacttcttagtgttagttaggtgaccaaaggaattaagaatttttcccaaatcacacttttctatattagctttacattccactagcatttgcgcgcttatttgaggaggagcatagccattaccgccttctatggtggcaccaccctgaggagaggcataacccttatcgccttcagtgggagccctatcctctgtggtggtaccaccgaaaccgaccctggtctcaataactggtggttgtgtcaacgacatcatcggaggcattggtggcattggaggcattggaggcataggtggcaaaggtggcgtaggtggcataggtggttgaagtggcattagtggcagtattgttgagatttctcctatgatgcttacatcattcggcttcatcagagccgtttgatcaccgtcatcatcactactaccgatgtggtaatgatgagtcgggatagtaatagtagtagttgcagggttggttattagccgacccgagcaaagaataggtaattgaaaggctattgtgattgtgatgagtaataaggcaaagaaggctaaagaagaagtagtaccacattttggtgttgccatagttttatgtactatgttttttagtttatgaaatgtgtatgtaatgattgagtatatttcttagtatagatatgtatatataatacatatgtgtgtttatagagtgatgatgatcatgaatatgagaaggaggagtttgttttggaaggttaaaacaagaagagagtttcatgcattttttcatatcatcctatttatgtgatattatcaaacaatccgtatttaattactcttttattaatattatcaaaaaaaaattactcttttattaataataaaatattaataccgattatgtactttgaaaagatttagaaatttattttagggagaaagaaaatcaaataattttatttggaatattctaacaaaaaaaaatgtacaaatgttaaatataaatactattttggattctgtatttattgattgggctctctgttttgttaaataataaattagactatgtatattttaaaatagtacaaaataatactttgaacttaatttttatcaaaataaaacttaataataatctgacattgaaatgtctgtgactatactaattatattttcttttgcatcgtttcgtgttagaaattagttttagattggttatgttaaaaaaattgacgaaaattgtttagggtataattttgtactattttaaaaaatacaaggtctaatttatcatttaacaaaatagaatgtcgaatcagtaatttttatgataatttacccaaattttaacattaatatgaaaaatacatagtgttgccaaaccttgaatttccttaataaaaatacaaataaaaaacaaaccatcatcaaaatatatttacaaaatttgtatattttttggtagaaaggatacgatacaaaaatgctgtcacacgatttttttttttaaaatattgtgtttttataaaacaccagtagaacacaaaacaacacaactgacaactcaaaacaacagtagaacaactaaaaaatatcagtgaaaacataacacagtata

SEQ ID NO: 124459 - DNA, 1230 bp, Cannabis sativa
cttacaatcaatactagcagcatactcatataggaaatccatttcgattaatatctcaaactctgctatacctaaagttacgagattagtgttcaacttctatcctcaactctattcaacatatatagacctaaaccaccttttagagataactaattctccgccaaataacaggattccaaaccctgtttcatatatatctcaaggcctacccaatttatcaattatctagattaccacaaattaatgtgtagctctaaaatcaattaacatagagtaaatagagtagttgactagaaactgacctcacaccactgaaggactatcttcattatttgtttgggtagtgaaaaatatccaaacatagagtgggttttgccaattattttggtcccgtcttctgtagtttccgacagtctctctcatagtgccccaccaaatcgaattgtgaacatgtcttactattacactctcctagatgatgcttcttacatcgggggcattctggataagtatagtgacctccatggccaccctaacctagttttctacgaaacctcttcttctagctcaagcccactgatgtagatagagctttcctcttctgattgtgcaaggaactagcaccacctctggcaagattggaagcaagaggagtagtatctctaccaacaatcaaagttccccaggattcctgagcaagctctttagtgctcgtggctcgagggggattcatcatatcttgatattccaaaatgatcgacggttcttgcatctaatatttctcatacaatgatcccatttgggtaccagccataaactattctattggcaactctggaactaaagtaactggtacctgaggtgaaggcacaataggagatccatgttgcctcaatctcttaatctcctcctctaactattgaatcttagcttccatctctgtgaatcattgctcgaattctagtagagcctacagtggtggaatttttcataaccacctccataagtcctttctcatcctgaaactcgaccttaggaactagggggatcccattctctctatctgccaccagtgtcaactaaatcatcctaactccttgtgtttttttaggctcccatttataggacaagcctataaattcatgagtcagcttgattagtgtaaagtccgcttagtttaatttggaaattagcagttaatcttgattatttatgaaattatttata

SEQ ID NO: 124460 - DNA, 973 bp, Cannabis sativa
tagggatagttcattgcagccagcaactacacaagctgaggtacattttaaaaacttgtaacttgtcaaattaatcatggcagcaactactctgacgactacaattcttactgatcactaatattgattactaatcatggcagcaaacaacatttacaccatcttcagagttcatgctaccccctcggtaatggaatagaaggaccatcattttgttgctgttatatatttttggcagttttttgagtttaaacagctacactttggatagctgttgatacctaacaactgcttttgacaaaccagattgttttagtgttaagttatggtattttgaaactgaatttggacacttttactaatagctgctgctggtggtatttgggattgctttttcttttttggctatagctatcaacagttgtaatgcattttgctagtaatggcttttggtattttgaagttagaaactgattttggagaatatgtactgatctctgctggtagttgggagtgttttttattttttgggtatagctatcaagagttgtaatgtattttcaagtgatagcttctggttttttgaagttagaaactaaatttgtaatgaattcagcatgctatttgtcatgtatttggaaactattttcagtattagatttatatattgtcttgattttggtgtgttactaacaatttcactaaacatttgcttgaatgatgtcttgattaatgtcaaatacaattcaccatttcaataagtgtaataataaggtcaaacacaattaagcaatttcatgaatgagttttacatacccaaattcttgaatgagtttttacatatccaaattcaccatttcattaatgagtttttacataccccaaatcatgaatcaaatgtgtctatcactgagtttttacattcccaaattcataacaacattttcattcatattcaatattgaatttacac

SEQ ID NO: 124461 - DNA, 1171 bp, Cannabis sativa
  modified_base (1100)..(1116): a, c, t, g, unknown or other
ttagaagctcataactagattgaaataaaaattacaaaatgacatgcttgacatgctcttgaaaatataaaaatggtggaaaaaaatggtaagaaggaaacggtagaaatatgaggagtgtgaaatgaagaggtgtttagggttgaagagaagaagggatgttttggtagtgaggaggtgtgtttgaaatggtcttccaacaccatatttataggcaaaattggagtattaaattaatcaaaatataataaataaattgattaatttaattagtgttgggaagataatgaataaatagagtatgtgtaagaatattggaaaaaataaatgtttgcttggatgaaaaagtgttgaaaaagatagggtaaaaataaaataagaatgtttatttaggtgaaataaattgagaagagtaaaatggatatttaagtgtaaagtgtgggagaaaataaagatttttttggtatttttatgcaattttcggctgatatgaattgggttttgtttgcatattttttcctttaattttcttctcagcagggacacatggcgtgttgcggttggtgggctggagctgacgggctaggaggtggcactctctggtaggtgggagctgattcggctgggtcccacggggaagagaggcagcaggcgggtttggcgcaccacttgcgcctgtctggagtgtggctcacgcacgttgctcggtcgttcgatcaggacatggacgacttcgattggtcaaagagttgaccgagagtgggagttgcttgaggccatatcagaatttttctttaaaattgtgctttggaccccatttcttcaatttaatcttaactttcactacattacacctaaaaatacataaaaacaaattagaaaattaaaataagattaaaaataaataacacataacatattaaaacacaataattataaaaatacacaaaaacatataaaattaaagcttataaattcaaaaataattaaaaattcaataaattaatgaaaaacttaaaactaaacaaattttagttaaaaaatgtgaaaaataactctcatttctagagctatcactccttccgttcaagatctctagnnnnnnnnnnnnnnnnntagcagagcattatcaagatcttaacctggatctctttctctccttcgggtttgg

SEQ ID NO: 124462 - DNA, 953 bp, Cannabis sativa
ctacggaccttttagtcacaacttgagaataataatttataattagttacaattttttttttttacttttggtcacgagttaatatttataccatgtcttctatgattctaccatgtcttctaatattcttttaagccatatagcttgggttgtagtcattgctgctgtaatatattctgcttccgctgatgattgtgcaacgattgcttgtttctttgatgcccaagaaaatatttaaaatccaattgcaaaggcatatctagacgtgttcttcatgtcgtcaactgatcctatacccagtcgctatctgtgtagccaatcagtttagactcatttgtaacttcgtaccatattctgtagagttttgttccttgtaagtatcgaaggattcgcttgtctactccatagtgaacttgacttggatcatacatgaatcttaatatgagaataattgcatacattatatatggtgttgtagcagttagatagagtaagttgccaattaaactttgaaactttgattcatttgctttcggtgagtcatctttcttcttgagagatttgttgttgtctaatggagttgatacagtcttgcatccctccattttgaatttctttaatagtgtctccatataattcttttgtaagataaagatccatcttctttttgagttattttgatcccgagaaagtagtgcattaagccaaagtcggtcatctcaaactcttcatcatgtcttctttaaacttctttatcatcttctcactattttccagtgtagatgagaccatcaatatataaagagacaataagtgtttcatttgtaccttaagtcttgatgtagagtgttagctcactcttgctcttcctgaacccttgcttagtaaagtaactttcaattctactgtaccaggctcgcggagcttgctttaggccatataaagccttctt

SEQ ID NO: 124463 - DNA, 1623 bp, Cannabis sativa
ggcccaaaattttatatcgtcttacgcccatattttttcagggccggccctgtttataggtgaccataataatagagaatcaattagttacttgaagatgaaaattattattgtatttttctttattaattggatttaattttttattcttttagtcttattattatataaataggagttcacatcattgaaataaaatagtagaaattttcatttactttatcattttcttattttccttatcttctcttatttctttctctattctatattattttataacacgttatcaccacgaatctctgtcgaagataaatattgtttgttaaagtttttgaattgtttcgaagtcataatacattaaatatatatttgtctatatacttatcttaatttcaagaactcattttagtttttttgttctttgttatatatacatcatatatgtgtatatattcttattctgatatatttatttgtaaattcatatatatgtataaatatgtattatgtgttcttattatttataatatttacaatatatttgatataatttgtctctatgacatgatagagaatatatataaattatgcatatatcctgaatattatgcaaacatgtcatattattgactgaaatataataaaagagttagaatacatattcatatttatatatattcttgttgtcctcagatttagtcaactgacagcagagtcttatttatgattaacaattaccactataaatataacaatttatagaggttcggtccctttgtttagctagtaatgacttactccccttgtaattgttgttatccttaattttgcccacctaacgtgacatatccatgtggccaacatcaatgacacgttagagtacaactcaccaacaagaaagccaagctatctactcagcacttcaatcaacgaagggtccgagtacttaggagggacgacgagatgatgaaccaaccacctcaagggggctagccgaccactcctggccaacccaccaacttccaagtactgtgtggtcggccagcatgcaccctggcaggtgcatggccggccagcttttaccttataggattttggtctgcaactttcattcgtggatagctagtcaaatagcgaaatgggccttgacagcccataaaaatagaaagaaaatatcagtaacttccctatttttgagggacatgctatcccattttttgcactatgacgtggtagcatgtacgagtgacacatatccaaccattccttgcacctgagtggaaagatattctgaacaggttttaggtaacataacttcacgcacaacgtatgcttatttgagcgaggtaaagggcagactatccgagtagagaatgagtctggttttttgagttgtataccaagacttgactacttcagaattgatatcgtggagtccaagtacgaaagcaagcccttgttatatatttgttatttaacaaatatataatgaacattaaaatgtggcatattatatactaatatgagattgatatatattatgtgttgaaggttatattatatcattatagtataataatacacataaattgtaacaaatgaggagttacaaatctgaaa

SEQ ID NO: 124464 - DNA, 594 bp, Cannabis sativa
cccaactttactatgagaaatggtgaaataaaattcagaaattcaaaatacaaaatactaacacttaagcacagctacacctaggcaattagtttagtcataatagcctaacattaatcttcactcagatcactaacatgtcacattcacatgcatttaggagaacttttttgtcaattttttattttttcatttttgtttatgatcacgtaattatttggaagtacatttaaaataaaaaaaaaattaataatttaaagtgtcaaaacttaaattcaaaattattacgtttataagaaaaaataatcatacatacagtaaaatataataaaatattttaactttatttttattacggtaaactatttaaaatttagagttactctttatttaaatattgtttgtttaatacatttagatttttaatatagataaatgattatgaatgataaaatattataatataaattaatataagtcatttattattcgttaaataatacaattcacattgtattaaaattaataatcttaataattaatataatgcattgctttatccaaacataattttatttattatttgatacaata

SEQ ID NO: 124465 - DNA, 793 bp, Cannabis sativa
  modified_base (134)..(139): a, c, t, g, unknown or other
tttttaaatttttttttacaaaattctacatagaaacctctattgcaactaacgttgcaatctaaatcgcaacaaaaaatcgtatagaaattcctcctgctactagcgttgtaaccactttagaaactcaaacnnnnnntttgaaaaaaaaattaaaaaaacagtatatagggtaactttacttttatttttattaattatattttaataaagacagataaaatatctaattacattagtcgattagatgtaaaaaaaaaaatctaatcaaagctactaaaaatatgtatatattaattagtaaaatatgtacatattaataataaaaatattaaggtagcatattgttgttggtgcatttcaaaatcagttcgtattgagcatcttaaggtatcacattacaataatagtacaaaaaattatttactaaaaaaatagtacaaagatttttcataaaaagtaaaatttaaaaaaaaaaatgacaaaaaaattattaaccaattattaggtacccatatagcattaagtacattaagagtaccaatggcaagtagaaaaaattattttaaaaaaaataaaattaaaatatatataaaataaaaataatattaaataatacaaatatcattcataaaaaattagtaattaattaataattatttatcaaatataatagtaaatagcacaaatatcatccatacaaaagaaaaatatacaaaatacacaaagaaaaaaaaaaaaaaaaatcaaaaactggttacccaccacaaagataaaaactaaaaactgaaaa

SEQ ID NO: 124466 - DNA, 2850 bp, Cannabis sativa
agtagttgatatacttgttgaatttacttcttttgattatgtttgactttaccgggcaaatattgatactttgtgaatttacttgcaaaatgatcaagaaaagatgagtaataatcaaatatttatttatcatcaaaataagtgagtggttgacttttggtcaacattctccccctttttgatgatatcaaaatatttgattattttaaaggagagaaaaagtaaattgaaacatgttgagtttagctcccccctaatatatgcatatatattgatttataccgtttacctttgcatatttattgttaccttttcttgacatgacgaagttccaccttaatcatataatcaataaatttgttaatatttgaaagcataataagattaatgccaaaataattaattccaatattttctcccttttttttttgaataaaggaatttatcatagataatcaacttgcatccacaattacaatatctcgtaaagaggaaggagcattatgctcatagtacgtacgatctgacgaaaaacaagaccccttagcaacacaatgggcggccctattagcagaacgattaacaaaagaaatttggacattatttaaagtagataaaattaaacgacagtcctccaccaacaatccgaattgagatggaatatgaattgaactttttattatttggacaacaactaaagcatccgattaaacaaccaccttatcccaacctttactctttatccaacttaacgcttccttgataccaattatctcaacgattttaggaagaacacagcccaacctactccccgaaatagcttcaataagagtaccataactatcccgagccacccaaccaaatccaaaattttgctacgctttaaagatggctccatcgacgttcaccttgacagtaaaatgatctggtttaacccaaagattgctattagtaacatcacccgtagcaaaataagcatgtggcgactcaaaattcgcaatcttccaatttacaaggactgatgtagccgacttcacaacatccaaaccaacccaatttttcttctgccatagcaactcattgcaagttttccatatactccacctgatcatagcagcatccaccactacgtccacttgattcccttttaacaggccaaaaaactaggtggcaaaatcttccatcgcaccagcagcaggcacgattgttggagaaaaaaccagtaggagctagaaaaatggcagcccaacagcacatggtagatagtctcatagtctctgttacagaatgtgcaaagaagatccacattgatatgcttcgtttgaagctgaaccttagttggaagacttccagaacacacttgccacaagaaatgacaaaccttaggagggactgccacaactttttccagcagttattatcttccaaataaagccaacttcctctactcgattgaagatgcttataagcacttttaaccgagtaaaaatccgacgtttccatgttccaaaaccatgtatccctttccatagaagaactcaactgaatgttcaaaataaaccaacatctctctccaaaaacatatcagaaatgagctcaatatcccaagatctttcccctacaattatgagactatcaacatacttattttgaagcccttgattctcagttatgacataaggattagagtcacggggtagccacggatccttaagaacattaactaaagaaccatttgtaattgaaagtctcgcacccgctttaactagcatctgagctgcccaaatactcgtccaaataaagctgggattttgtcccaattcagcagaaataaaagagccattcaagtagtaacgtgctttataaatcttaccaacaagcgaattctccattgtgagcaatctccaaccttgttttcctaaaaaagagaggttataatcctgaagatcacgaaatcctaacccccccgacattcttatgttggcaaagacacttccaactaacccaacttacacctttgcttgtgttcttagattgagacttccaccaaaacttcgccatcattccttcaagactagaacaaatctcttgatatttccccctcttgatttcatcaaaaagggtggcataggaagcaaggtcaaactaaatatatttctcccccttaatcatacaagatatgacttatatcaatgtagcacaatagatatagagaaatttcaaaatgcataaaaagataaaaggccatatagtcaaaacaagttaaacattcaatctacgaaaaatcatgtcaaaattcttgaaaacaagagagacaagtaaagagtgacatagttatgatttcaaaccttttgtcatacctcaagtatgatgaaataaatatgttcatgaacttaaatcaattagatgacaagaattgagactttttggtaagttttttaaaaatttaagtaaaaataacatatgtacgaaaactgagttttatgcatcctttttgaaaatttctttttgcattagcttaatacatgattaatatgaagtgtgcaagctggaaaaacagaaaagcttaaaaaatgagagattttcgcaagttttactcgttttggccatagagggtcattttactcttcaaacagctgatatttgataaaacaagcatgctcaaacaagaaaattagaaaaatgtcaaaaatcctaacttttcggtatgccttttgatttgcttaaaatctagaaatctaccgtaaatgagtttcatgcaaccaaattgaaaaattctttttctagtagttcaagaatgttaaatgtgaggtgtacaaacttatggaattgaaaaatattgaaaattga

SEQ ID NO: 124467 - DNA, 828 bp, Cannabis sativa
tatttaattgggcatatttattttattaaatatgtaattattttagtaatgaagtaagattatgatcttactatgttaattagtgtgagtttaataaatgattaaataaaacgtgatttattaattacgtagattttattggaatatgtgggtatcgtgtataccattttcggaataaaatgtttttgggctcggcgactgtgggaactcgacggagtggttgatgatgtcacgacaatatcaaatggattgaattgggtattttctagactagtttagaattgtaagttattgatttggtgggattagctagaattaccaaactaccatttggtgtgatttaggtttaatggttacttaaggggtaaaatggtcgtttgaggaaattagatgtttttttttgtcttatgtgtattagtggtggatctttattaacattattaagttaaaaaataataatagatagtagtatagtgaagttggaaatggttagaaaagataagaactttgcactcatcttctccctttctccttcaagcagctaagaaccagccaagaaccagagaatttttcaccaaattctctttgatttctagcacatcttcatccaaaactcggcctagaagctttagggtaagtttcttgcttcatggacttaagtttttctagttgttaggttggttttaggctagggttttatgactttgtgactgtaggattaaaatgaattaaggttaagtttataggtctgaattagagtaagttggtgttgggattaggtgatttttgtaacgtccccgcttcaagcctccattgggtccttacacc

SEQ ID NO: 124468 - DNA, 891 bp, Cannabis sativa
gctttccttgagatatattgcttctatattggtttacggtatagcgttcgtaaattactaccgctttcatttgggagaatcagttgttgaaatttttttttggaggaatgtctgactgtgggaggatttggttgaagaatcaggtgaaaaatccggcaaggcaatgtaaaatgaatccaaacaaatagaggagagtttcattgcttgggagaaatgattgaagaaattagttggaaaaaaatgaatgagagaataaatttttgttgttgtttgggaatcgttgtattttggaggaatcgttgaagcaaataggaaaaaaaattgaaaaaaaatggaggtgagcttcataatcaaggacattttaagtattaaatttataaaaggacatttaactatttttgaaaaaaatagacattaaccttaatcagtgaaatttaagttcatttgttataattttcctgtagtgttagtgatgagcccacttgttactaatagttcgaaggccctagttggaattaaaagaaattttttgttgaaaaatgtccgctgatattatgggattttgttggatattgttggccatagtactacataggtgtagtactcacaggctagcctgaatgtagaagctttttagtgaagcttcaaatttcctttttctaatcctatttactcacacacaattatgtattaccaataaatttaatgaaattaagagatgaatgaaaaacgaaccatataatggaaactattagagaaactcttcaaaatacactctaaaacaacacaacaatggtgaaattagtgtcctctaataggggtatttataaaatagtggattcaattcaatctgcacgatccaattcaatccaattcgcaaagtgcggatat

SEQ ID NO: 124469 - DNA, 1675 bp, Cannabis sativa
  modified_base (949)..(957): a, c, t, g, unknown or other
ataaaggagaagtacgaggcggtgttgtggcactctaaaatagttttattctactctagaatttttctccttttttcatattttttaatcacattaaatattaattaattcaattattaataaaaaaatttatcaaataattttctaaatttatcaattatctttttctatatagatctctattttgtgtgatgattttttaatttttaatactttcttcactataacatttgataaataacttaatatctaaaacatactattagaatttaaatttaattagtcacaattctttatttttttctcattattaattaatagattttatttggtaaattttttctataaaaatttttaaattaatttatgtataaaagtgagtaggtaattcattgtttgatttattttgtatacacaaaaaatatgttgggaatgatagctaactacaagagagatatgaagatatataacaatatccttgaatgttatatgttgactagaagtgagatacggtgataagaacgattttaaaatagtgcgatgagctttctataaattttgtattcttacgacaatttacccacaaaataagagtcaagcctagcatattattataattaataggattaaaatttgatacaatttattagttagttattaaataaaatttatgatttattttataatataatttaaaaaaatttaaatatccgctgcgaagcgcgggttgtttactagttatatagtatgcttgtgttgtcttttcaggtgtattctgataggttgatgcggtatagtcacaaccgtgtatttcgggccgaaccaggttcgggcccgaaatgcaaattgaatttgcttatttggcatttaaattgatatgtgataatctgaaatttaattgggatttatttatgcttggaatgacaaaaatacccttgtgagggtgaannnnnnnnntttgggccctaagggcattttggtcttttggcctttatttactaagtttaataaaagttgatttctgagggaaacagattaattttctgggttgctctctcccaaacccgaacccctctttctcaaaccctctcttaaaaatttcatttttgagtttgataattgattgatttgaagcttggaaacgggagatttttgagcttggatatgaagggagtacaagctttgttttaggtagcttttgcagacttttatccttgttttcctactgaattttatgatggtaaaagcatagaaaagtatgttttgaattattgagtttgtgatgttgcatgttcatagctttgaatgttaattttggtgatctttggtacgaattgcatgacttgagttgttgtgcatagattatgattatagggtatttttctagtggaaaatatattttaattggtgtgtttgcagctggaagtttgggaatgtttaggttgaagttcatgtgtttgagcttgaactttgttgagttagatgcatgaattttatgtttttatgcaatctaaaattatgagattattattggatattgatgcttgaattgcgtattttaataccctagctttgaccttgataaattgtgaacttgttttgagtgtttgcttgtgatttggggtgaaaagattggaatggttgctgaattttcgtgtttcaggctgctggtttc

SEQ ID NO: 124470 - DNA, 1009 bp, Cannabis sativa
ggtgtattgtattagaatagaattaagtcccaacattgctaatgtatggaaataaattgtcatatataagatgaatggactactcactctattccaaattaatttttacataaaaccctattcaccttatcttaaattctaacactattaaacgtatgactgaaatcgataagcaagatggtcctgattacacattacctaacaagagcaccaaatatattgcatgtgatgcttattgataggtcaacatctgcactaaatttattttatataccgtgtgattgatatctgatatttgtttcactgacattacaaatgtcaatattttgctacacgtttatatatgtacatatgcttctcctttcataagatttatttttcctattcattcaaataacaaagaatataaacttaggggctaaattttgatggttgtagatgtaaatatataattacctgtggagggacgacattgaatattgctatatatatatatagatagattattccttaaacaactcattacaacgtgatcgtaaaatataaggaggttcaagtgaggaaagcaaaaaaaaaatatataaccatgtccaaggaccctgacactataatttggtgctggttaagcatttgagaaagtggccaaacttcataagcaactagccaatgcaaatatttatgttagagataatcattgtattcaaacgctgcctaaaatcatgccttcaaccaattaaatacagccacaatagcaagattagtcaactactgttattaccatatatttattcaatgtaaatatttttctcacttaaataggctagatattctcctcatatattgctagaatagaatattaattatgatttatgattttatgaagatttatttcaattcagggtgtattatttatggagacatatgtgaaattttatatttttatatgttttataaccgacaacattggaacgcggcgtttggccaatagaatcacattttagtatgttag

SEQ ID NO: 124471 - DNA, 1925 bp, Cannabis sativa
attttgtcacctaacttgccaaaaaaggactttacaaattcttttagttttcgtttataattatgcttatgattatgtttgagattatggaataatcctcatttaggttaagggttatttcaaaatccaagatatgatatattgaatgtgatgattaatattatatttttactccttcatatttaattgtttatattcttccatgtttaattttataattaatgttttgatcttgtttaaatggccgctaaattaggtttttgttggaaaaaacgataaacttcaagtatagcaaaataataaagaaataaagcagaacaatttactgtttggcaaaactaccaaacccacaaagagagatatattttactgattactttaaaatcgacatatgctctctttctcaatctctccacccaaaccccaatacactctttgcttcttcctcactcacaccacacaacaaactcacacacacttctcttttcacaactcactatttttctccacacacatgcctctctctcacacacacaaaacacatatttataaagttacaaaacttgagcatcaagacaacttgtggaccaagatatttcaaagcttccttaagaagactcttcaaaacttggacaccaagacttttcttttcacacaattaataattatccaaaaaaataaaaattacaactttacaaatatagatcaataacgaaataaataaataatttgagtcaaactccaacaatcttcaccttgactcaaattctctaaattcacaactcaaaccatcaataagagtatatatatgcatcgagttcacactcccattgcacttcacttgagcacttgacttcacattctttaatcgttcacagatgctttttttttaaacaacttctatataaaattggagttttctccatcttgtcccattctttcactctaattgaatccaccttcacagctccacctaaaatagtcttcttgactaatttatacacattttgctctttcttacccttcacaactaccaaatcacctttcttgatagttatttcaccatcttttgtagaatagccataaccacgagtatccaaaactcccaaagagaattaagctcctccttaatgttggaacatgtctcacatcagttagtgttctcacaacaccatcaaatattttcaccataacagttcttattctaacaactttaaagctagaatcattgtccatcaaaatagtgcagtcatcatatgtcttataagtgtcaaagtattccttatatgggcacaggtagaacgaacaaccagtatccaaaattcaagagtcaaaattttttcatcagctatgaccgagagaacatcagaatcactttcaaagccttcaccagcaacatttgtggaatctgatgtgtctttgtattcttgttttctcattgattcaagatgtttggtcaactcttcacaattctgcctaacatgtctcttctatcatcatatattcctctcgatgtactcctaccacgacttgattctgaccttgtcacaagagcttgatcagtatgagacatataacttggttgcttaatactatctgtctctaaaagagttgttgaaatagtctttccaaccaaaagtgtagtcactagtgtctcatatgattttggtaaagaagccaagagaataatagcttgatcctcttcatcaattttgacctctacacttaacaattaaattatatgtttattaaatctatttatatgatccttaacatcacctccttcaatcatcttcaactcatataattgtttcttgaaatataatctatttgttaaggattttgacatataaagtttttctaattttttccataactcagccgaacatgtttcattcaatacattatactttaattcaggagcc

SEQ ID NO: 124472 - DNA, 1493 bp, Cannabis sativa
agagcaagaacccacagaaaaactggtgctaattcccaattaagtattattaaaaaaatacaagatatcaaatatatttttcataaaaatataaagtactaaataagtatattaccttatataatttaatatatggggttcttttaacatgcatacatctaaaaaggatgaactggtgcatcccttatctattttggcatcagaaaaaaattaatctaattttttttatagttgcgtatgctatatttatttaagacatcatgtaaaattgtaagaaatttggaataatttacaatataaaaagtagtgtttaaacagactatttcacacgcgtataaaatacatgagtcacacgtgcaatagattgtttgaactttatttttggtgtattaaatttctacaaaggtcacaaaattttacaagatatcttaaataattacaacatacatgactataaaaaaatagattaaaaaaaatttatgaatgtcgaaatagatagaggtacatcggtgcattgttaaataaatttaaataatttaaatgttaatttttaaaaaattctacaatgcactcccttaaatggatacaataatgcacccctatctattttttggtattttagttttttcttcatggtcatgtacgatttagttattttagatatcttataaaattttaagaaattcagaaaaatttaacacgccgaaaatagagttcaaatagtatgtggcacacgtgactattttattttatacgcgtgtgaaatagactgattgaacactacaatctatattctaaactatttaaaattttataaaattttataagatattttaaataactataacgtatgctgaaaaaaatagttgatcattttacaaaatgaatagacacatttctcaataaacttaacaaagctttataatcattaactacttgaccaaacatggaaatcataactgttgtaaattcagcaacaataacaccaagaattcaatctaaaacctgcattaaatcaacaacttgaacagcaataacacacaaatgaaccagttaacaacacaaagtaacaaaactgaattgagctaaaaagagacaacaagatttatcctggttccggtcctagagatcaattcgatccctcgccatactccagctgagaaaacatcaccaattctttcattaacatggagaacaagagagtagaaatacaagtaccaattcaagagcaacacagctctgtaacactcgagaaacacaccaaagaaacagtctcagtttctcaactcctacccgagtacaccctctgttattgaccccttcaagaacatggtttcacagcttagaaaactaagcactcactctctaaactctctcttaattctcaccttacagaagtgaaaagagtagcctatttataggtacaactcacagctagaaaataggtgcaaaactggcaccaactaactaactaacataaccaaaagttagtt

SEQ ID NO: 124473 - DNA, 2333 bp, Cannabis sativa
ggtaaaatatttccaacattttctcttcttcttcttcttgctcggagcctcctattcgaacacagtctcctatggtgcctcagcctttggtacaacatcagctggatagagtttgtacttgataaagttagcgtcagtagccaggggagagatattccattcggtaagggagagttagagaatttttgtagccctctccctgagttccagtgtgaacgggggcggcaataggacgacatctgctgaaaactggtgtacgtggtatccatcccttgacaaagtagtattcgtcaatgaagcctcctatctttgtcacctcggtggctgtcgtgccccatcaaccatgacttctcaatttgagagaaatagaagtatcccgacctgttctgcttggggcttgactttagatcaaaaaccagttggtatcatgggggcacgactcacccatccttgtgaggcatagagtacaaacagggaagacaaatacttaaggcccttggggggtgaactgggtcggacttatgtggtagtagttggctattttcttaaagtatgggagcaagggcaacattgcgccttgtttggtgtgagcttccgatcaggcacaataatcttatcttgagtcagtggctagttggtcgggggagggaaggaagcattctacattccctagaagacaacgatcgagcagatttgtcatcctcttcatggttaccacagatggtggggaaatctatcgatctcctggtgaacttctcctcctcaaagggatagcctcggtgtattccttgatgatgtagtcctccctggcctccagaacatcgcctccttcagaaattggctctccttcatcattgtagccaccaaatggcaacacctgagctactcccacttactcatctcctttagcatcagaaggagtagcaggatggacctcgctctggtcctccacttcttggacttcaatgtcccccgcagtatcctcctctttagtggtaggacgagtctattctgccctaggcagggtggcgagacgggaaacatgcgggtcagtcaatgaagatttatgtacagtttttttggtccacgttatcatcctacttctgggcagaatcttatctgaagtatgcctggcaatggtcacaacaaaatcaacaacaggtttgcccacaatagtagggtttggacggccctcgggcagagtgtcaaccacgttcaaatggactatgtacgtctagttagtgagaaggtaacacatccaccctttcttgagttcctagatgaaatgaccgtgtccctcaccttgaatctggtcgggatagaaatgatgttgcacctcgggtttcggggaaggcatatgttcgctacttatttcccaatcttcaaagctagaatttaaaaggttgtcactagatgaagacgggctagcacagagacgaggatgatcctcgtatagaagttgaagcagatcttgatcgatatgatgattgcctccccaaaattcaccagggtttatttataaaaggtaggagacaagaaagtgagagttgatcggagcaacgaatgaaaaacaggttggatgtaccgaccaggttcgattgagtaatcaaaagtagaaatttcacccaaaaataaaattttcaacccaaaagttcaaaaatttgaattggaatctgattttaactaaaacccctaatggatgagtgaaaatgaatgttgtaaggttacaattcaaagtgcagttagacaatcagacatcgtggttgaatacaatgaagatttctagacttttaacctaagaattctatggttaacctagaacgattcaagaataggcacgattcatagcaagaaacccggaaaattaagcatgcattttcattgcaaatatgtaaaaggaagaaatgatgaacttactcactggtttgaagcttcttattctgctcggatgatgtcgtcaagagtttttctatgaatccttcgaagaatttaagagaaacaattgtttggaaattttctgctctggtttttcaagagtgagaatggctaaaaggatcaccaaaggttcttgatcctatttataagcagtccaaaaaagggaattaatcatttcaaaaattcaaattactcgaattccccataaaagtattcgttatgttctcattactagagagtaactgtcaacacgcgcagacatctaattgtgattcaaggcagaattgtcaattagcattaaatgagccgaaattgaagagacccctagtcaggatcacgtcggttcgtcattcgacacctaggacacgctgttggatatattttaccaagatctagat

SEQ ID NO: 124474 - DNA, 816 bp, Cannabis sativa
aaactttgacctctttgccagtgcagtttgcgaaatgtgttggtaaaagttacttttaccagcgcaatagcgaactgtgctggtaaaagtgacatttcttgtagtgtatacagtacagttaagatctaatacgacctacaaaatgaattctaaattttatataatatctagaacacaataatgtgtacctgatttatagtaattaccgcaatttgatagtggaatagatctctaaattagaaacattttatttatatgattatcaaaagtatacaattgtgatgaaacaatatgtatttttagagttagggagggaatttagctacataactgtagttggattcgacctgctcatcaaagacttcagttaactagaaaaatccacacttctgcttcaactagattttatagacaagtgctaagctcattaactattgatcactaacaatatgagctaatacaacaaaaaactatctaatcaacctaaattttaataaaactaataaaaattaatataatctcaaataaaaagtcttaacaaatctcaccaagtactgaagataatattatacattaattttaggttgtgtgatttattaattttatattaatttcagatatacatgtaccatcagctggtgattatgtttgtgttgacataaaaaatgatgtcaatagcaatgatgtcacaactactatttcaggtatatatatatagggaaatttgaaaaactatccataaaaatctctaaaattatttccctaaatctatacctattaaaattgcccatatatgactccatttgatttttcccc

SEQ ID NO: 124475 - DNA, 741 bp, Cannabis sativa
  modified_base (26)..(53): a, c, t, g, unknown or other
ctctttctctcttcatcttcttcttnnnnnnnnnnnnnnnnnnnnnnnnnnnntatattattttataacaatagatacaatattgagaataataattctcaatatttcactaaggacaaaaaaagagtaaattacctatttgccgttttttcaccaaaaagtaatcttgttaataaagggtttttttgtcaaatctaataccccgactattttcgatattcccaatgtctatctaaattaccctgctatttctacaattttaaaccatactaaaaaatgactctatcaaccaaatgttgtgttccattgttaccgagcataaaatatgaaaaacatgaaatttcataaataacacacccaaaattcaaatatatctccataaattcataaatcatgattaaaagtctgattctaaattaaaccctaattatctgctaattctcgtattaaaattaagcgaccattacccaaggagtcacaggtagcgagaccctaccttttgcaggtctagccagccatggaagcattaccggtggccagaccctgtccttcgtaggtctggccagccatgaaggagttatgggtgaccagacactacccaatgcaggtctggctggtaggggtgagcaaaaaatccaaaaaactgaccaaaccgaatacaccgaccgtccgaacaccgaaaaaacgacaatcgaaaaaactgccttcggttaaaactgccttaacacggtcggttttagt

SEQ ID NO: 124476 - DNA, 670 bp, Cannabis sativa
atatttgttaatcatcaaaacaaggagatataaaagtttgagttaacagttaacacgaggagacctccggttgccccatctgcatcatcgggtctacctcaagaccctctaactacaaattttgatgtccatgttctagccacaactggaattcccatgaacacttcatacatggtcaatcctgctgccaggacaagcactttgaatttggtcgctaaagttggccaaagtgacacgaatatctcggtagatctaagtagcaggcccttacctccgagggaggaccctccactggcacctcccactgaaggaaggacccttagggaacaacccctaagaacaacaaccggatctcgtctttagtactatgctggagagacagtaccaggaatcgatgagcctgctattggtgagccccttgtggacttgggagaagatctcgagttagccagactaagagaggccacctgtcaagctagcataactgaagaaccacgtgctgctgattgtgatgtatttgctcgcaaagatgtgaattctagagatggatggatgaccaggagtacatccttcgacctcaccagatggagctcgatcaccgcaacagagaagtcagcgatctgataaggaggttcaatcaaataaccaatggaagaggccaggatctcat

SEQ ID NO: 124477 - DNA, 2040 bp, Cannabis sativa
cacatagttaatgattgtgattatggtattatattagtccacaaataaataattctaacacataattgtaaatagtagactaaatatagcataaatttatattttgtgccatattttacataaaattcacatattgcattggagatggtgtaagaagtggctaatgtttaatttaaaattaatttaaattggtaagaaaaaatgaagatgtattttatagataaaaaagttcaaatagtaaaaatgaaaaaattcgtgttgtcattgttgaccaagattttcggtaactattaattagagtcgtttgtaatgattggaagaaattatagatgggaatttttatgtggttggggcagtaatgagccataatccacgagtcattattattaacgagtgtttctttacagagaatttcccagtctcccctcttctatacatcattaaggtatttataggctcataattgtggtaaaagtctaccattatcgtgtttgtatgggtcatgctttgcacaattttctagatttgatcatagagcatgatcacctactttttatggtgtgcataggtttgctataggcgtttggtgagactagacttgtcttttgcttatgatttgatagctcataatgtagccatcaaatgatgtatcgtgaaatcatggaattataggtttaaacccttgaacacgtctttttcaaagtaatgtgtaggatgttctttcccatgccgcattaaatgtgtatacaatgacttaacctcgagtaatgcgccatgcttcgcctgtcccttcatctcttcccagggtcgagtccactcgcagagagaaatagacaattccatctaccatctaggtggaccctctctgaccaatccttcgtaactctcgcaaattaacagaatttggaagcagtttaatatggcacgtcctgtagtgtgggtctcattaccatctgacttgctcctgaattgccacatattttatgtagaaattctaggcaacaaccgtatttttgtattatatttttaaaattttttgctctattatgaaaattttcatcttaacccatacaaatataaagtaaagggaaaattaaataaaccgctatttttgatgaaaattttttttacactttcacgtttatttattttttatttttattttatggtattctataaaacacaagaaaatcacatgaaagcaacatcaaaataacttaaaaaaataatatacaactaataaaaaattagcaataaaataagaaaagtataatataaaaatacatcaaaagactatattttctgtaaataaaatcttaaaaaccataaaattatttaaaattccatacaatcatatttttacatatatatattttgtttttatgtatttatgatattatcctgtaagtaaaagatggcattgaaaaagaaaaaaaaatctacatttatcgaagtctttcaaaataccttatctagtggtaaagattttatgttatttttctactaacgccattttttcactattttgagatgggtatgttgtatttattaaggaaaatttacatgatatactgaattttcttattttattacattaatactgctaggcggtaatttttttttttatttttactgtatatattgtttgagtttatactgctgcttttttttaaacatttttatgtataaattgttgatagtgacatgagttgttacttttaatgtatttcaaaaaaaaaaaaaaaaaaattaaatgtttttttaatattattattattttttttattttacttaaaattaataatgataaaagaagttttgatttgattgatgttgtcactttgtgacaagtttttttttattattatttatttttatttttttttactttaaaattaatgatgataaaaataagacccaaaacgtgttttcatttcactttttgatcatatttccttttctttctcgcttcatgctcatcatcatcttcttcttcttcatgaatttctctctctctttttttttttcagtttagatcag

SEQ ID NO: 124478 - DNA, 1116 bp, Cannabis sativa
tgccaaagaacttaatatgcaatctttttatgcttccaaaggcattatccattatcactcatgtgttgaaagacctcaacaaaattcggttgtggaatgaaaacatcaacatattttaaatattgctcgggctttatgctttcaatccaacatacctctagcctattggtcatatctcattcacacggctacatacttaatgaatagaactccctctaatctacttcatggcgatacctcctatgagatacttcataataaacctcccctatatgatcatcttcgatcatttggattcctagcatatgcttctaccttaccttcaagtagacacaagttttcccctcgaagccgtgcctctatttttattggatatccccaaggcatgaaagcctatacattacttgacattgaaaccaagcaaatttttcaatcccgggatgttgtcttttatgagaacatttttccattaactggtcagcattcaaaccagtccataaaccagtttttttctctcccaacaccccattcttagcccttaaatcaggctcaacctatcatacaacaatctggtgtatctaccacaccagatgcctctctcgataccacgcatataagccacactatccctggaacttccccacaaatcgtggctacaccagatgacattcccttatctgatataaaccagcacatattacctgatcctggttataaaacaacagcaacaacaccctctgttgtgcccaaaaccagcagcaacaacacttgtctcacttcagagaccattgcaagagataatatcacatctctagctgccaattcacaagatacacaacctataacttcgactttagatgccaaatctcccatccacacacgggttggtagacaaatcacacaaccaaaacatttcgcagactatgtttgtcatgcaacctctacagcatttcctattgaaaaattcatatcatatgccaaactaagtcctccatttagagctgctgtattggcgtcttattcccaagttgaacctcgctcttattctgaagcttcacaattcacacattggcttaaagccatggattgtgaaactgaagctcttgaaaaaaataa

SEQ ID NO: 124479 - DNA, 810 bp, Cannabis sativa
tttatgttgtttaaattcatcatcatattattattgttgatgatgaaatcttgttgttgttgttgatgatgatcaaaattattattagggatgatcatgcgatgatgatgatgatcgatattaatattgtctccaaactcattgatattattgttgtaatttagtatcgagtttgtatcatcacatggtgactcaatcgatagctcgtgtgatgattgtgtttgttgtggttttttcacaccattgctcttttggaaaaccctacataccacccactcttcctgcaaaatattaataataaataataatataaataaatattaagattatatataattagtattaattagcaataattgattacaaaagctagcttagctagttctacgttgcatgatcttaattattatcaaatccatgcaaaaacaccatatatataattatactcatcaataaatatataataaataaagaaaagggtacaaattaaaaaaaaaaaaaataccctttagtggtaatcttttagtcataatataaaatttttataactaattaaatgtgagttttagtcataacaaattgtaattttttagtcataatgtacaaataataatttataattagtcacaattttttcatttttaatcacaaattttgttgtgactaaaagtaatttagttttgtaatgacagtaattaaagtttacatttacatatataattttttgtgatgttagttaccttaaattgcttaattaatcgcgtaataatatataataattaaaattaaaaattggtctaacaattatca

SEQ ID NO: 124480 - DNA, 554 bp, Cannabis sativa
aaatctaacatccaatatatgattggatcggatctggataggcctaaaaacattggatgtgatccaatgaacacccctaaccttagcccacttttcgtggaaacttgttctgaccactgtttgtgtgttattcattcagcggtgacaaagaacattggaaacaaacctttccggttttataatttttgggctgaacatttggattacaagaagattgttttggatagctggaacaaacctctgagaagcggtgggttgaaggggatttatctcaagactatgacactcaaacataagcttaaagttttcaattgacactctattggaaatattggtgaagcttatgagaaagctaaggaggagtacaaagaagctcagttgctcagccaagctaatcctccagacaagagctttattgataaggaaaaacaggcagccaatctttttctaatccaggagaatgtgtatgaaaagactcggtttgaccgagtcaaatgtacttttatatatatataaaataattataaaataatatatatatgtatgtaaaaaaa

SEQ ID NO: 124481 - DNA, 776 bp, Cannabis sativa
attgatatgattacagtttgttttatgcatttcatatcgtttgtatatgctatattacatacactacattatagtctaacaaaaacaactcctgacaactcgacacgcaagccgatgggtcaatatgtacattgctaaagaagaatgtcaccgcatgactgctctaacttttccttgcccttacttgcaccacagagcacccgtgagttgcacaaactcggcaagaaaagtattaaagaatgatatattaaataactaattatatatttcattattataaaatgattaaatcataacattcaatagtaaataatataatcaggcatatgcataaaaagagattcgctcatatattacattgcctagttaggcaagctcatgtcataatgtgacatcatatatataatatcactgcaccacctaatcaggtgagccgtgccacaatctggcaccaatatgttacatcgcgtaatcaaataagcctgtaccatagcctgatactcacatatcactcctgcatgtacctaataaggtacgccgccaagaagaaatccaacaatattttcaatctatgccatagcctaacattctcatatcactgccgcccgtacctaataaggtacgccgccaagtgtaacgcatcacctaataaggtgagctcgtatatcatatccatgtgtcatcacattgccattgcctaatcagacaatcaacaattacagaacctatcatgccatgtggtacattatacttttttttacctcaagtttcagttc

SEQ ID NO: 124482 - DNA, 1814 bp, Cannabis sativa
agttagattaattacctcaaacctaatctcaaacgtggaaacttcatagaagaagaagacgagctcatcatcaatcttgtacaatttttgctttacaattgtacccttctcattgacgattttttttcacacctgaaattgtaccttggttgagaacaaaaatggaggagatggggaagttctggtgcggctagaaacgaaggagaaagaggaagaaggggactgttttgctcagtccgtattttcgaaaaaaaaaaagttttttttttccttttttgtttattttttcatactaagataaaaatgtaaattatggatctaaaaaccctattaaggaaaaaatctcataataaattataactgtacaatttatcatataatttgtcgagaaaattctttcttagatcggtcatctcaaatttggaaaaagtgtatttttggaggaacaatttaggagggctattgccatcaagaatccgtcccccatttaaatgttagggtcctctatttataagtgagaatcaatgtagtacattctctattcattttctcttccaattcatttgtgtagcattgtcctcttattctctccctcgctttcttctctgtgccttcaaagctatgctcttctagctacgctgaattcaactctgatcttcttgaaatcctctcattccttcttatctctaagtgaaaaggagtgtttcatttcttttttcttggaacatcattaatctattttcgcattttatatgttgaaattatttttatgctctcaaattatttttattccttacaatttccctatcggttctacaatttttgaactttggactgttaactccgatctcaaatgttgcgaaattagttacccaaaattattttatgcgtatcttttaaagctgtacatatttaattcaacaattatttcaaatttcataaaagtagccctgccttttcaacttacgttatttatctttttaaattcaaatttaaacttacagttgttgacacagattttcatcaacaaaataattaacttttttgtaataaataaatatctcaattaattatatgataataaattataagaatgacaataaatgacaagaagatttttacgtaattttgaagttaaatcttcatagtccacgagtccatcttatttatgtttgagagattgaatacataataaaataacattatttttcaggtgttatcatgttttgtcccacctgtggtggcagattcacgtggccaatatcgatgacacatgagagtacagctcgccaacaaggaagccaagccatctacttaacacttcaaccaacgagaggtctgagtacatagaagggacgaaaaaatgacgaaccaaccacctctggccggccctatggccagcataggccagccaacttccaagcactgtttggctagccagcctacacttggcaggggcatggccagctagcttttgcttggcaggcctttggtgtgcaaccttcatccgtggacagtaagtcaagcagcaatttgggccttgacaacccacgaatatagggaaaaaaaatcagcaacttccctattttcaagagataattaagtcaattaaagtttattatttaattatataaatatagctttatttacctattttgaagggatattagtgatgtaagttctaatatataaagagaattagttaaaccctaattcactcagtattaagctattagttctaactctcaagctttaagtttgaaactcaactctcctctctctctctctctctctctctctagatcggaagagcg

SEQ ID NO: 124483 - DNA, 611 bp, Cannabis sativa
ttttttttttaatttcgaacaattaatagtttttatcttattactttgaaatcgatcggtatgtataatatataatattggtttgtattggttgacacgtaaaacttcatctacatttatacgcacggaaaagtaaattaaaggttaaaataaaaaattataagtcaaaacatatatcatgtcaataatttttacgtacccacatacgtaataataataagttgtgttttatcttattgatgaccaaattaagttgaccaaatgaccattttattattgggaaacattccaataatactatttcatgggttattaagaggttacaacctcaaaattaaatcaattaaacatttatttactactgtaacaccgtttgaaattgtaataaaacatacagcttatagttatggacaaaagtacaaaatcttctgtaacttaattaatattccgtacaagtattgtctgcagaagcttaatttggcctttgaacttgtgcttttgcaaacatactcaaattaaatatacatgatctgatctttactctatgtatgtaaaacatgtatatagtattgaacagaatctctattttaataacattttttttttttttt

SEQ ID NO: 124484 - DNA, 2032 bp, Cannabis sativa
  modified_base (149)..(151): a, c, t, g, unknown or other
ttttaccaccaaaattttagaattgggggttagttgcaataaactaaatacttatggaggttatgccgcaaattactcattaggaaattactctttgttatttctcttatttttatcttagttctacttattttagtgacaaaaatgannnaactattttagaaatattggtgaggttagagtgtagctattgtactttttattctcaatattgatattggttcttttgtgcttcatcttcatatctcatttattaaattgttcttcatcttctaattcttcttccaaacttaattgtatcttttataagtttagtcatattttttttatgtaagttaggctattaattattttggtacatttattatatcatatatcgtttactgcattctgtcaatagtggtattttgtcgatttatgatatataatatgatatactgttaaattagaagtgagatttaatgtattcaacattaattaatttgtgattttaacatatatatatatatatcttccaattgtaattaatggtgtagaattgcaactgtgttttaaattaatattagtattagaatagaatttgcataactacatctctactttaccaagttctttatctgagcactccctttcattcattcattattttattatttttatttcattcatatttctatcattgtctatttatactaatttttagtggtaatttgcctccctgtgaatacaacatagtctatttactaacgcgatcgtagtgtaactaattggacgacatcaagatctacaaagatccataatcattgagccatacaaccatcctataagcaactggtcacaaacgatccattgctcatacttaggatttactttgacaccaaaaacaggcaatccatcacctgtagctacacttgcaggaacaaactctactggagcttgcttcaacccattgatgaaaacatcaaatctatgacctcttatgattgttgaaactatagtttttcataacacataattattttgatccagctttaaggaaagagattgtgagagtgtgttactaaatggtgagctagtgaatcctccagatccattatgaaatccaattagtggggagctggtttgagcttgaccctgctcttttggtagggcagtagaatggtagctagaccccgtagacattgttgcatgagcactgtggttctgataccaagtaaagaaagttatagggaagcaaaatgaataaaactcagctcaagggtagagactgaggagaccatttcatttatagcaaaagatggtacaagcaaagagaggagatgacacttgtcactctcttacatgtgaggaccataaggctaataaaaagaaataacataagggaaatttgaaattccatccttacaagaccttaaaatttttcccctaaatgcatacttaataatattggtcatatatgaccacatttctaatatctcacaaatacccctcccatttaaaaaaataaaaaactcaaaacttctctctccctcttgctaaacacgacgcgcgcacaacctacacccatatcccaccaccacccgttcacctccgacgaccactgacgaccacccgccaccacctttagcaccgaacgaccacgcacgaccaccatcagcaccggtattgaccaccgacagtgggaaatatgtccaaggtttgttttttctcactacccacataccccatcggacccccacccatcggatcatcggaccccccacataacccatcgaaccctacccacataccccatcggaccccaaccccacgagaatgaccatcggaccccaaccccacgagaatgaccatcggaccccaacccacaaccccatcggacccaacccacaacccatcggacccaacccacaacaaccccatcagaccatcggacgacatcggaccaataggaggtccgatgtctttaacctcagatctgaaaaagcccaaaatcgactgaggaaaaactaaccttcgacatattcgcgactgc

SEQ ID NO: 124485 - DNA, 949 bp, Cannabis sativa
ataggaagaagaaaagagaaatattaaatctaaatttatttgtttttgttatagatgatgttaagtcagatcccatatgataaacgaaacaataaatgggacatggatttatgttcttagacttaaagggaagagtattttgtaaatgtgtagaatctgtctttcatgataaacattggacctaaatggtaacctagctaagtttaaacattgcatgaagggattgacaaaggaaactgatcttagtggtcattcaagcttaaactctcagaatatcatcaactatcatcgattatagaggtggaattcgttaagtcgatcatagaactaggtttgtgtggctgtgtttttgagatgagagtaaacccctaaaacctaaaatccttgtaagaaggaagaagaacttgaaaatattaaaaccctaaccatggtttaagtggttttattttgagatttttacaaaaatactactagattttggatcaaagtttacaattttactactacacagatttttttgtgtgtaaccattttatattagggttttatttagtgtagggtttcattgcatttgggctggtctttgttaggtcgaacacttaggttcctttgagtgtagttggcttgcttgttgggctcggttttgaaacaagttgggcctatttgaatgtatgagttttaataacatcaacatctttttatcgaggcataatctgatgtaaaattttgaaaataccacaatttctttgtattaatctttgcatcctagttgtgttggaaagctgtagatttttaacagatgaaaaatcaattttatctgaatgctaattgattggatctagatttgtaacttgaatataaaaccaaaggaataattacattagacacaattttttgtaaaatatttatatttttacgttcaaagaatattttattttacatttttacg

SEQ ID NO: 124486 - DNA, 1404 bp, Cannabis sativa
aaaaagttcaaggggcacgatttactacatgccaaagttcagggagaaaaattactaattagccttttatttataataaatcataatattattagtatttaaaatatatttattaattcaaacatattattcaaattaatataatggaaatgaataattaatcctactctattttttttttaacgtatcaacattattcttctcaaatgtatttatattactaaagaaatgacatttcaagattaaaccctctaaacaaacaaggtaatatttaacattaccttctcttgctaacattaacgtattccaaacacccttttaaagatttagctgcatatctcactaaaattatttgttataatttatattgtcctaatttaactaatatatcatatgtttcttcttactatcaaaaaatttcttgcaataactgagctaattttttcttaaaaaatatactaattattggaaaaatatgtaccctctttaaaaaaaaaaaggtatttttgtaaaactcatatctatgtcattcaatagagcttcttattcaattatttttcttcaatcatacacaatgtacttatttaattaggttcatttttagaaaattctaaatagtatataaaaaaggttcaaataattgattactacgaataggagaaaaagaattatgcatgcaacaaaatactctaattttatttttgacactgtaaaattatttatttttttttaaaaaaaaaaaagtattacaagtgaccctaaataaatacaaaatacaaggaaacaaaaatagaccaaaactacccttaagatgtactatagacttatcctaaattatttattttattttttatttgttttatttcatttgatttcaaggtttttatatagatatataaaggagtttttttatttttacaatttaaaaacactttttttttttttttgtatttttacagaattttgtacaaaaactcctatagcaactaacagagtaacctaaatcgtaactaaaattcgtatagcaacccacatagaaactaccggagcaactcaaatagtaatttttttaaaaaaaaaagttaaaaaaatagtatatgaggtaattctcctataatatatataaataattggggagctagttgtcacttttgtatttttaatctagtttattttcaaaaatacaataatattaaaaacaaagtacatgtttggcaccataactaaaatattattttttgtttttaaaaatagaaaattattttgaaaataatttggcttgttctgccttgttttttgaagacagtttttagaaaacaaagtcacaaaaaacaagaattttgaaaataacaaaatgttgttttctgtcttaaaaaccaattcacttttggtcaatattgtttt

SEQ ID NO: 124487 - DNA, 1221 bp, Cannabis sativa
cctgtctctccagtgtagaaccagacttgaggtctagttgttattccaggaggctgctgcccccgggtccttccttcagtgggcggcgccaatggtggatctgcttctagaggtgtgggccagccacttggatccaccgggatgctcgtgtcaggttggccagttgtggtggccagacttgttgcgcctattggggtgacgagattcatcacatctgtagtattcatggggattccaattatggctagaatctgagtgcctggatctacgatctgtaggtcttgagggagacctaaagatgcagatggtgctatagtagttgttcttgtgttcaccatggtttttgatcaaatcacgatatccacgctctcaataaaagtaccaaactattgaccttgaaaaatgatcaacctacagggaggtcatgcatatctgatgcttgccacgtgtgtgcacaaataagaatgaaaatcaatagatagtaggatttattatagaggttcggcccccttgtgatagcatgtaatgacctactctccttttagttgtattatactgagggaattactgtctatatcgttataagtgggctatgctatcgtacccttaggattacaatcaattctggaaaaactcaagtgttggacaaccaagggtgttagacaacctttagtgtcggacaacccaaggcaggcatgtgaaagagaatgaagaagagagagagtttatttgacatttgagatcaagtttctagcttagaggcaacttgagcaacttaggttttcagtcagaggttaatgcctttatataggaagtcttaaaccctatgtttacaattcaaatcccttggaaatcatatagttagttagatatttacaaaagaccaaaatgcccttgtaactaaatgttattcagctattctgttgggcttttggggcccaatttgcagcccatctttgttgtccacatgcaggagtgtcctgtggggcctgcagagcatcctttggccatccaggcccttgtgctggccagtctagctggcgatggtgctgtccacctgggctggccggctagctcctgagagtgagctggtctgtcacttgatccccatttgtatgccagggccttcgtttgttcgggtgctgactcgaccttccttttagtgagctgtactgccacgtgacactagttctgtctacgtaagcatgccacgtcatgaga

SEQ ID NO: 124488 - DNA, 3052 bp, Cannabis sativa
acggttcagtaagcctttacttgtttagtaatttatgtaattagtaaagcatgctaggacgcatagtagtttataattttttattttaatgcattgccttcaaatttataagtgcagtggtaaaattgcaaattgagtcattgcctgaccagattgacttacgaattgacaggttaatcctatagaatggacacctggtgcaatatggagagttagaacaacatggtcagggctagtaacagttggagagaatggaatctaagttgtctctgtaatcaaggtaaaagccattggagggctttcgatgggagtgatgattatctaccacaggctccattagattctgagcaaaggtcgcggagatggaagctataattcagcggcatgaagaggaaattctttttctgaaacaataaaggtctcctgtagtacctttacctcatatgccaatcattttcaatccagaattaccagcggaccagtatatgccggtaaccaagtggaaccattacatgggggaaatcgaatgcaagagtcatcagctttttggggagattcagatgtgaaggacgttttttggactagaaccgtaaagaatttattctaaaacctcatgaggacatgacaaaaggtcgggttaccactcctcttactcttatttatgggggaggtggtagaggttccttgattgaatagaagagggaacctgcatcgatattggtgggttcaagacaaaacaagtgactctaaaggaaccaaggtagaggtgaatgccaggattattcttatcctgggtgctcacgttgtaagaaacatcatcttggacaatgcaaccgaaaagcatgcttctaatgtggcatggttgggcatttcaagaaaactgccctcagcaaagaaagataagtagaagctggaagcaaagcctgtacctgctcaggtatttgttatcactcaagctgacctgcagtcagtccttccatggtgacaggtcagcttcttgtcaacaactcttattttactgtgttatttgagtcgggggctatacactcatatgtggcaacatgggtattaaatcacttgggtagaccttgtaactttattgaaagagggtttggaaccctaaagcctagcgaggaaatggttgtctccaaaaggagaattaggtctatgtcagctagagtggaagatacggaattgagtactgacttagtaaagctgaaattagcagaaaatggtaacttttcagtaggagggaaaggatccatttgtttatgtgggatctgtccagggtcttggatcccgattattttagtcttaagggctaaagatttactacatagtggatgtgtgggatttttagtggttgtaattgactacagcagacttgaaacatttgggccttaggtagtcaaggttgtaaaagaatttctcgatgtatttcctgaggagttgcctggattactccctcaacaagaaatagattttgaaattagtttggcaccaggtgtgggacttatttcaaaagcgctatataggatggtttcagcagaactcaaggagttaaaaatacaacctcagggaatgctcaatcaatttaaggtgtactattcgacccacccagtgtatcgccttggagagctctagttttgttgtgaaagagaaggatggttcccttgggatgtgtatggacaatcgggaactaaataagttaacaatgaggattatgtatcgattgcccatgatggatgatttgttcaactagctttatggaaagactgtattttcaagaatcgactcgcaacctggtcatcattagctcagaattcgagaagaagacaatcttgagattacattttggaccaagtttagtcattataagtttttgataatatcattcggattgataaatgctctagtggtctctacagatctcatgaacaaggtaatcaaggattttctcgataatcttgttatggtggttatcgatgacatccttgagtactctcagacagatgaggagtaggagcaacatctctgaatcgcaagttgtatgtcatatataaaatgagggaattctggttatcggagatgtcttctctagggcacatttttggaaaaaaaagaatgggaaatcatagttgacacggggaagatcgagttagtgaaaagtttgcctaggccaaaacagtaacgaaagtgtgaaattttttcggtttagtaagatattatcggcatcttgttgaaggattttctaagacctttatgccattaactgggttaactaaagagaatcaacagtttgtatggtttgataagtgtgaagcaagtttttacgagttgaaacaataattgataacaacaccggtgttagctttgccatcagatcgagaaaagtttgttgtttattgtgaagcatccagacagggtctgggatgcatcctgatataagctgacagagttatagcttatgccttctgtcaactgaaggaatgtgagcggcgttacccaacgcatgatttagagcttgcccctgtagtttctactctaaaatatagcgtcactacctttatagtaaaagtgtaaaatttatacagattagaagaaccttaagtatttcatcacccgaaaagatttaatatgacgtagaaccgatggctgaaattagttaaggattaagatggtgagattctgtatcacctcgggaaggctaatgttgtagcagatgctttgtgtagaaaaggtcctgagcaagttttcaacactataatgatagctccttaactgactttagaaatggttaaggttggaattgaatttgtagttggaaagctacagaacattacactttaatcaaatttgttagaaagaattagaagggtgtagttggaagatcctgagctagtcaaaaattcaagatgaggtatgggcaggtcgacctaaggacctttcaatctcgaataatggagtgttactatataaagctcgagtttgtatttcagataatggttaaaaagaaaatccttgatgaagcccacactacaccttattcgtt

SEQ ID NO: 124489 - DNA, 1084 bp, Cannabis sativa
gctactttttttatgtaaaaaaaaataaaaaaaaaatccataaacctatagtattatttatttatgccataaaaaagtaaattatacccttaattctcatatttatgaaaattccccattatattacttagattttactctattattttacagttatcttcacgaatcaatcgtggacgttctaaattatatgcaaatttttatcctggtattctataaattgctcacaattttctctggacaaaatctattatattttgcatagttcccacccagttgtcatatttagaggatttttattcttcatatattatgtaaacaacatcaaaaaaaaaaaaaaaaaaatccataaacatgaagtaatgaatgaaaaagaaaaaacttatataggcttaactcgagtcatttcgttatattttgtaaaaatctacatttagctaagtccaataataagagctatattgctccaaagcaaaacaataatatagaaggaaagagaatgatgctgataaacaataatatgaaaatagcaaactttatggtgaaaagatgatgctgataaacaagatatttttctataaataagatatataaacatttcaattgagaaaacaatcaaattatgatttgcagctcagattttatacaaatttgggtcagcctcaagtaaacaacattgtgctatttgtgttgaacgaacaggtttgcttgtcattctcaggatcccctagttcctcgttgcttcttttcttctaacgtagtcgcttcattcaacatgtcagccgcatctttgtgcatgtccagcttcgccagagctactgattgcatatagaaagctgttggccaatctggaaagacacattgggcttgcattgcatctcggagagcagggtctggctgatcgcatagcagatagcaaagacttcgtctagcaaaaacagttggagacaccattgttccaacatttatgaactgcaacaacatcacaaagaccacatcatgatccaatttctattcttagttcaaggctgggtctttctaacacaagcatatgaatttctttattaatgtacctgggaataac

SEQ ID NO: 124490 - DNA, 2366 bp, Cannabis sativa
tgctctgaagcatagatttctttcttcttctattgaggttagttgacagttttagactttttatgttgcttggttgaaggagtcctctttgcattttcaacaactattccttttcctttgtctttgtgaatgcctgaaattctaggatcttttagatctactctcttaggagcattagtcgttggagaagcttgaacatgaggagtccctttggtcagtgcggtcgtcatggcctctattctggtcatctatgtgagaaataactcattaaattgatcctaatgagttaatttgctttcaactagttgaagttgtttagccataatgaccacgaagtctggatcatcaagttgattctcttctccaacattatcatcagtggctttgttctaaagatcatcttcttgtatgtgcttaggagtatcctgagaattgtctttaacgttgtcaaaaatactctctccagattttgcatcctcatttatagcttcgtctcaattataatcttcatcatggtgacctttttggggactggttgcctcgtgtgggtcattggtgttccctgcttggtgttaggactagtaaaatgaagaccaaagtttgttcgggtgagtacaagaattaattaaacgcaatcttcagatggtatcactactttcttcaactctcaatgaaagtaccaaaatgtttaccaagattttcgaaaaactaattgtaaataatcagaactgaagaaataaataattaaaagataaaaaacaggaaacacaaacaactttttacgcagttggggcattaactagccttagtccacgagtcgatgttattatgtaactctttagcatgaaaagcctttaggggaatacaatgaatgtaagttctcaagttttcttgagcaagtattacaagagaattcaacccttaatccataggattgattgggtatttatagtattttaaaaattacacttagtttctcttatttctctattggggagtgtacaatgaattacatatttgggttgtctcgtgaagtccagcccatgaaggagaagatatgctgactcaatagatgggattcagttggatatagtcaaaattgtttaccatgattgtggaaaattaattatgaattaattgtctgatatctgttttaggaagttttcccttttagcttgatccgatcccctatcgagatctagcaaacgaatatttccttatttgtgcttaagaataaaaaaggaaatcagactagtcttccaggaatacatttgtaaagaccgcttagctttaatttacaaattagcagataaataggacttaattatgaaaattatttattagtattgaattatttatttatgatgatatatttgaattcagaatgcatttcacatgtcatatatagaaatttcataattttgcatgttttgtgtccgataacattggaacgcggtatttggctattagaatcacatcctagtaattttagtatagtgggacaataaaattagacattgggaatgtcgagaatagtcgagattttagagttgataaaaatacccgtaagtgaccttttatgattttttaatgtgagaagcgcaaaatggtcttttgcctaattttgtttgtcttatgtggatttgaatttagttaataaatcagatttttaaatacattataagctgatattttatttaataaacccttttatcatttcatttttattgaaaatcaaagatatcatttagaaggaaaaggttctctctctctctctctctctttgccctctctctttcgaaaccctccagaccagctagggtttgctgtgcttttcttcatttcaagcttggtgctataagaattaagtgttcataagctctaggtaagcttttaacttgatcctctttagtttcttgagttataagaaaatagattttgcttgaaattgagattttggttgttgttcttgctgtggttgtttgaaattattttcagaggttaatttatgttagattatgttgatttgagcatgaattaagggttgctagtagatttaaccaagctttaatggtgattttggattttgagcttgggtaactgttttattgcttggaaaatgtttattggggtataatatgcaggtttggaaagtttggttgggtttggaaacgatttggttagggtttgaagttttttggattttttgggtaaaaccggctaagcggttttataatgcttgtaaaactggttacccagattttgcagtaggattccccgaaaaatgcagcttgttgtttcgcattagttttaggtttatggttggttaattccctactagtttagggtattgccatattaagttg

SEQ ID NO: 124491 - DNA, 945 bp, Cannabis sativa
ttttgatacttccaaggttcttgagcttggggacgaggtctccaatcccatttttgactattttggattcattggttgaatcatatttgtcatttgagcaattgaaggtagagtcccacgttgatgcggttgacttaacactaggttaacctgaacgctgggccccgttactaggggcttgggtttgtggttttctcctcaagttttcttatatcttaattatttctgatgacgaaataaatacccgaaacactttttggttaacataattggaaatagcccaggttgacaatatgtcaatctaggcgttgggcccacccccaagtgtcaacctcggcgttaggtgccagttctggccttccaaaaattccgtttggtcgtcgaaaaatagttgaatctttatattttttgaaaacaaagaagattctttgagagttcttggaaaaattcattgaaagtggccaaagctgataaaatttcaacttgggcgctgggccagccccaagtgtcaacctgggcgctgtgccttgcttctagcatccatgaagtgttgtttcttctctaaaaggacctatttccctattttttttatgaagacgaagaagatgcaaaagttggatctctgatttgatacttggaaggtgcccagattgatagattatcaacctgggcactgggtgctcaaggcgccccgaggcccgggtgctcaaaaataaacttgcttcgattttgattctgatgcctcaaataggttcgtggtatgtctagttgatgtgtcaatgcaagttttgaccctttttcgctaagacggtccgaaaaactgaaaccgtagatgggaatatcaacttgggcgctaggtgaaaccttaggtgcccaggttgccttctgggttgcaggttcgtgtaatttcaactctcggggcttggattaagttgctccatgtct

SEQ ID NO: 124492 - DNA, 856 bp, Cannabis sativa
catgaatagttctttctttattttcttttttattatattattacgaaatttatatattaagtttaataaaattataatacatccttttgataaactttttggtcatggatgtagtctttagtattgcaattttagttaaaactttacaaaatatatgaaaagtgaaatatgtaatagttcaattaaaggttacctaattttatgtacatgggtgaggactcacacataagaccgtcacatgcatagttgccgtctgtccaatcatgccaagctagcaagtagtttggttgtgatgtcactttgttttctatcaaaaaattatttaattaaataaatatttatttatttattacttaattaattctacaacattaattaattgaagcaataaaagtaatcagtcaatgatctacttttcactgccatgaaccaacgattcctctcacgatcatatttattgttttcttaccgttttattgtgatcggcaatctctatataagtcgtatcagaacaataggagaacacatcttttaaaacacaaataaatgtctcttctttcttacaatttttctcagagcaatttgtgggtgtaatcgagagatatcattcaatgcagagaaacttgtatacagatgctattttatcctgggaacgtcgtggttgatagactaccgtacacacttcggacagaactgtaaaatgtcttaaagagtgcgacatagtctacgattcagccaaaaaatatcatttggtaactctttctaattatttaaattttagaataacaatattaagacatgttgttctgtgatggctactacttataatgatttttctggttctgcttctaacgat

SEQ ID NO: 124493 - DNA, 1261 bp, Cannabis sativa
gattgcacctgagttaaataagatcaaagttaatgttgatgggactttatttgaacaagaggggcactttggcatgggttgtgtagatcggaatcatcatggtaatatagtagaagcatttaagaaaggaaagattggttgtgttcaatccgaaattgttgagataataggcattaaagaagctttaagttggattgcaactcattcgtgggatagagtcatgttgaaaacagatagcttggtgtgtgtccaagcgattcagagcggtatttttatgccttcacagtttgatcttattgttcaagatgttcgaaatttacttttggctttatcttttgttgatttgtgttttgtaaaacgatcagcaaataagttggctcattgcttggtaagagactcttgtttctctacaagtcatgtgcttcagctggaggactgtccctcttaagtacgttctattattttgaatgaatttattaattaataaatcttaaaattttaattaaaataaaagaaaataatttacatgagataaatgaaaataatattaattcaatttgaatgagagcaatgaaagactatagaaagaaagtaaattgaccatccttatttttaataatactagttggttaacacgtgctttgcacgtgtgttaaatcttttataattttatcaagtttgtaatgtacagttaaaattaaaaaaaaattaatattaaaattataaaagaattaatttgattaaaattaaaattcattttgaaattaaaattaagattaaaagaggttaatttagttaaaattctttttgaaaaacaaacccgaccgtaacagtttataagcaatgagttttatttttcaatacaatttcatttaaaatattactttattattataaattaatttataaaagtacatatggcatcactacgggttaggatgttacaattataacatacatttaatgtattgaattttataatgtaaaattatatgtttttctagtatactaaataacatacattttatttattgaatttataaaagtacatatatggcatccctgtgttacaataatatacattttatttattaaattttataatataaaattatatatttttctagtatactaaggaaaataaagatttgatattctaaaataagcattttattttataattaaaattttcaagacttttgaatctttaaatttaatatcataaaaacaaataattataattaaaaactttaaggggata

SEQ ID NO: 124494 - DNA, 1304 bp, Cannabis sativa
acaataaaaatgtatctatttatacataagtatcctcataaaaagatacatacattcacatgtataaagagtagtagagttataagactaatactataaaccaaaagcatacaaaactcaaacataaaggctttcaattatgataaaaactatatgtatatatatatataaataaatattagacaaccattgtcgacctctattgggaaagtgagaaattgagaaactggtttgagtctatgccgtgcaaccatcgggataaattgttcacacgatcactgaagtttctagctttaatagctacccaagatgggttaataaatgcataatccttgtccaatccactacgtttgagtaatcggctctgcaaatggcaagtaaacaatatataagtaataacaaactctatttatacatattaagttaatttttaatcattatacctgcaccaaatgaagccttgctcgtcttcaggtcgcaaaagtcaatgatgtctgacttcattatccaagtctcataatttttaactccaaacacattttttgaaattttgattttttcgtgatttctatttagccatccaaccgccatctatttaagtttccttaattttggtgcatgatagccttcttgttcaagtgggtgtattagtagagcattatgattgttgactttctcggtaaagacacaacaattggtgttttcataatcctctccatgtactatcaacctcttgagttttggttgtactagcacgtgcctcgttgcaactaaaggatgttttttcatggagcgatcttccacgtacatcttgcaatttattttttacaagaaaaaaatcaaaatattaattaaatacattgtagttattaataaataataaattaaattattaagtgaaatgctggtattggtggagtagattccctaacaggatgcgatgggggtggagcagatgcccccacagaagtcattgcgagtggagcagatgccccgacaaatagtgttggggtggtggtggagaataggccttaactattgttggttcgttggatgctcccccaacatctataccaagtgcatgagaagtaccaccggtggttctctgttgagaccttattgcttggaggacttcatttatctcttcttgttgttttttattttgtccttccactataagaaatggaacatttgctagcacatttttcgtgctggcaaaagtttggtattgcacttgtaaaatagattttacttctgatgtgttggcaaaaggggttgggaaatcaacgttggtattagaactt

SEQ ID NO: 124495 - DNA, 2116 bp, Cannabis sativa
ttacaagactttgaaattgacttgtatgctcaaccatactaccatcatccttgtactttaaatttacaagtcttctaagtagattaattttattgccacctgttcttttggcaaagagattttctagcttttttcaaacaacattagctctggtttaattagagatatgctctaacatttatatccatccatcgtcttatataggcaatgacttttttatgttgaaattttcatccctcatcatctaacttagacaacttctcactacttttaataggtttatacaaatcttccattaattgcttcgaagtaaaataatttgataagttcaatttcatcatttcatctgattcattcatttttttcaatacacaagaatacaacaccaatcatccttggctctgataccacttgttgagaaaacttattacaattaatcacaatattttccctttttatatgtcaaaaataggatacttatgaaacacaataataaacaatatcaaatatcaaccaaagcaccacaagaaattaaaaaacacacaaatcaagcataaaagagagacactaagatttttacttagaaacctaatgtgggaaaaaactacaggaccatagtccgctcaaatcatccactattacaagtttaataatgggattacaaagtttttctctagtaagactaaaggctcacagcaacataaagattaaacaatcttaaatcactaatacaaccattatcatcatctcaaaagatggatacacaaatagaaaaaatttggccgggtctcaccaagtgagtattgtagaatagcaccttatagaggacaatcactaaatcagaactgttcgattggtagagcatcttgcaaggattcaccacccaaaatttgagctaaaatagatgagaatcaaccacttgatcttcaaagtaaagtggcaaaacctctctctctagctttctttttctttctttctcattctgctggttgagcttgttctttacgacacaaccatcaactcccttgttttttttttctcttaattgtttcatttaaatgggctttaacccttattgatccaagcccaacaacaagggacagacccaaaaaaacgaacaaacagatggagacgataatttgatgtctacataaaactattgagataggaggagaatgacttaaatatcaaatgctaaaatataatataatattgtataactgataaagtagagtaagcatagattttaattattattataaatatactttaaaaaacaatggacaaatataaatactataaaaatatgaaattttattttaaattaaatatcttttataaatttggttatttaaagatttaagggtttaatagtttatttttttcattttgaggaatatactaatattccttgtttaactaaataaaaatatttttgtattgtattattcataaactttgatttagaattcaaattttaatgtgctataaaaaaagtaataaaaaagatctataattttttttgttgaataatattttttagattcgaattattgaaggtcataaaatataaatttagcttttaaaattccacaattttgtcttagtaattttaatcctaactattaatcaacaagcccaattttaatgaatttgttaattctatttttgacatctttaaattgaaaaaaatattttataatttaattgtttatttttggctgagttattttggttgtttccttacttgtgtttctatagtaattgaattatataaggtagtaaatatgactagtttttctatttatggaaagtgagtcataaagggtaagtttgatgattcaaccaatatctatctatccagttgtgtatatctgatcttttgtgaatttcttaaaatgttagattagatttcttttgaagaaaactgaagcaagaatttatttttctataaaaagaaagtcgcacacactgctcacgattctatgagtacagaacaagaaatttctgggctgattaaagaattattttagggaagtttctaagtgagttgtggtcttgttcaaactgtgtatgagctgtcaataaggtatatattaattataaatacacctta

SEQ ID NO: 124496 - DNA, 661 bp, Cannabis sativa
ttattacattaattttgtttactaaaattttagaggttaaactttccctatgctcttgttctgttttggtctctactttttctatactgatatgacgagtgggtaattttttaattttaaagtttattacattaattttgtttactataattttagaggttaaattttccctatactcttgttcagttttggtctctacttttctattgataagtgtgatctgtcacatgttcattcaggatgaaaatctagtattttttacattattttgatgtttcgcaacttgtagattatggatcatttagtttaatatattgttagggtgtttgtcctttttattgtaaacgacttggttagcctatttttattgattccgcttgatgagcaatatctgtatgtaatggactatgttcgatttacctatattaattaaaattttatttaccctttaaaaaagttattttcaagtggtcatataaagacatagtttaataatttcacacttcaactcacaaagaagaagtctcaagttcgaagccccgtctcacaatattaaaagagaaatttgactaattatgcatttattgaaccaatttttttttaaacctaaactattcaatattggtaaaatatgtcattttttcttaaaatcccattctac

SEQ ID NO: 124497 - DNA, 1259 bp, Cannabis sativa
aatgagttggtgagatacaaggacaactgataatctcaataacatcttgtggtctgataatctcaataatatcttactcacagctaatcctgttcttcacgcatgaaccacacatagagcttgatctttattttgtgcatgaaatgttctccaaaaactggttcatgtcaaacatgttccagcaattaaccaacttgcagatggtctcacaaaagtaatctgtagtcaacattttctcctatttcgatccaagcttacaattcaagatctcactactacaacaaatgactcgaattgtaaccttgacgggccgtgttaagggtatgtggttttgttatgtctattagtgatagttgtaacatttattctatcacaagactttcttaggattagtttgtttctatttgtaactaattctcttccaactctctctagcttgctttgtattcagtcactatataaaccatgcacgattaacacttaatcaacgatattgctctttgttttaacaatcttcttttactttctttctgtttttctttcttcctctcttgcctttcttcttgctctgttttccctgttactgtattcaaacatggccaagagcttcaacatggtattagagccttttcctccattgtcagcaaatatggcaagcacaagaattagcaaaaatggcaatcagaccaattccaacaccagcaaacctcagaatcaacagaatggagcctttactttcaatcaaccaagaaataactcagatgagcccagtctaatgtatttcaatcataacatgttgattaaggttcaaatttgtacatttttagcctttatttatgaatatataattaatataaatcaagtattccatggttttaataataaatttatgttagttggaaatatttactttattttaatttttgtgttatttttcagatttgagcaaaatgatataaatgaaatattggcattcttgaaaagtggtattcttgcaaaaagaaaaagaaaatatccaaatttagtggcccaagcaatagtcaaatggtgattgctttttcatcaataaaggaaggagtgtggtcgtataagcagtgcaagtgaagcatttcctttaatatatcgtgtcccactcacaagttcccaataaatattcatttcacaccatcccgtactcagccgagaaccatcaaaagcacgccacatgtctcccaattttctactatgcatatggtacaagaagtgtcccattttcctca

SEQ ID NO: 124498 - DNA, 1419 bp, Cannabis sativa
agtagaatgagtcatatcacttctgctgtgccacgtaagattttctataactttatatgtgtttagctcactactttaggaaattcatgtttaggtgttagattatagaatataatcgacatacttgttagtaaatctagatcctggtaaaataacttctaacaagaatatattgtggttacaaaattatagtaatgcatccaattgaatctaattgcctactctatttctaagtcagtaagattcttagattggatgttcgataataatacgaaaagatagcgagagtcccctaataggctacaagaggtattgtctatcttttcattagtctagatttaatatatatatatatatattatgttgagatccttgggatatggttcatattatattaaattatttttaatcaaatttactttcgttattctaactctgatatggaccataaaatcaaacgcaagaaaccgcctccttcctcctcctcctctctctctttctctctctctctctcatctctcatgctgtgagtgactcttggtattgggtagaggaacatcatggccagtattctgttaaaagtacttgtagtctagtctagaggattgatggccatgtaattggtgatggtgatactaggtttggaagggtctttggaacatgagagttcctccaaaagtgaaggattttttatgggaagtcgtttctaattgtcttcctaccaagaagaacttatgtgataggcgggttgggttggatgtggtttgtcaaatgtctggtatttttagtgaaacaacctctcactgcttgttatcttgtgactttgcttggggttggcaataggttgacatttgttactttgttagggaggtaagatcttttagagcatggtttagaaagattatggggaaattttttggggagtctttggctagagtagctatgatttgttagggtatatagcggcctcaaaatgatatggtttagaaacagaaggggtagtcgtttaatgaagtggtgtcgattgcatccagtctctagactagtggagtaaagctcccatcatggaaagtctttctcattgaattcattgcatggatatgatggtgttgagcgttggatcaagcctatagataattgtgtcaagattaatgttgacaaaaccattttctcggaaactggtaattatgggattggttttgtggttcgtgactcatccaggtagcttttggttgctgctacttgtcatcatttgggcgttgttgaatgtgactatcagtagtcccatgatctataagggaaaataccgaataagttgtgcaatctcacatcgcttaaggaaggtcaagttcgatgattctgagactatgtaggaatgggacacaaagttgaagaggacttaaatggattaattggtac

SEQ ID NO: 124499 - DNA, 827 bp, Cannabis sativa
ttggtttaagaataaaatattagggtttttaaagtatagtttttcaaatttccctttgtagaataaatgtcgattattggatttgatgttattggtataattgtcagtttaaaaccaacacaaatgtatcttttttatagtaatgaataaagaatacaatgatatgatggatgcgtcacacagaaatattgtagttttttttttttccctaaaaatatctaatttcattttcgttccaatccacgcatattatgttaaaacaacaatgttgattatgattaactcttgtgacaatcgaaaattataaacacaatatatacttctttttttaattgaacgcgagggagaggaaacctagctagctatgaatataattgtacaatcaaactaacttattttggacaaaaatgatctcatttcctttctataaatgtacatatttgtccctatagatacaaatatagcatatttattggctgatcaggctacaaaaggaatctgttctatataataagatcctaacttatgtataataattaataagaagatataaaggctgctataattgacccataataccctttcatttttatatgactagacatatatttcacgagttctataactatgtctatatgagatttattttactttcagaaaaaggaaaaactatacgtggttgcaaggccgtcttaaatattttggaggctctgttataattttgaaaattgggctagagatggaaatcgggcggttaatgtacggggaatgcaatccccgcccccatccccgctacctatttatacccccatccccaccccatcccc

SEQ ID NO: 124500 - DNA, 757 bp, Cannabis sativa
gactttaatgaaatatctcacctaactattcagtactaaaatacaataaatctatcaaaattgagagagcttgaaagtacgattacacactgtaatccgttttcttttaatttcttttgcaaatccaaagttcgtgtaggatataaaagctcaaagaatcaatggcgcctagaagtatttcgattcttaatttaattatatcgtgtatacgttcatttaatttcgtattttcatacacgattatgcatggttcatattatattcatataaatttttaacaaattatgtccttgaaatgggtagatttgaaaaaaaaaaatgattgtaaaatattaatgacattaatccatatggataaaaaaaagttgacatgcatcataagaaattgtggtgcctaatatgcctatgagtaatactctaaaaacttgagcaaattgttctaataaattaatttttactctatttattttttaaaaaaaaaaagtaatagtaacttagaataatagataattttaatttatagtttaatttatatttttttaagcaattaacagtttccttattatataacatgtatagtaacatggatagtgatttaaaaaaatcccatccaaacaatttttcaatatataaatatatatagtttgacaatagtattcccttgaaattagtagataagcatagataacccgttttagattttaaaacatttacttaattatatgtattattcctcccataaatatatatatatata

SEQ ID NO: 124501 - DNA, 2971 bp, Cannabis sativa
  modified_base (1135)..(1137): a, c, t, g, unknown or other
  modified_base (2945)..(2945): a, c, t, g, unknown or other
taaagaatacaaatgtttatttatgcttgtaactgtataaatgttaatttaaagtaatataaatctaaaatagaaaaaatccctatttttggtcgatgcaaatttgtcccacaaaattaggaatgtgatcgagatttaaatgttcaatatttatggaaagtatctctaaagaaattttaactgcatttaccctagatggtgtatgcaagttggctacaagattaatgttggtcagacagtgtaatatgccttattcggatatcccagcttattcttcgaatgagttgtttatgaatgacaaatcagcttggcacaatgacaattattgagtactgtgtgcctcacatgtgtactctccaatatgtgatgattacacttttttgggggggaatcgaaattcaaataccaagttaccaaaccacccttctaaccacctatataacggggttaaaaattctcttacactcttttagccatttttattctcaaagaaaccagagcacaaaaatctcttctctccataaaaatctccaaagaattcttgcttggagcttgatttacaaaagtcgcccaagaacattcaagaccttctgaagtgtgagtaattcctcttctttttttatttgcttaaaatacatgcattatgtttaaatttcttccatgaaatctaagtttttgaagtggttcttcgatgattgagattaggagaaactaggtgttgaccctaaaaagtgatcaactgatagtagggtcgtatggatttgatgatttccacgtgttacacaaattgaatagaaaagtaataaacccacagatgtgttatagaggtttggcccctttacttagcgagtaataacctacgccactttttattgtactgatactaagagataatactattcaaatcactataggtgggatctgatatagctctctataaggataaaaaatatggattaagtaggcagatctctaataagagagatgactatccttagaagtgtgtgagagggaagagagagagagagccctagggggcgtgtagcagagagagagaaagagagagtagagtttctgacataaagcaatttagaagctcaggattaggcttagtgacttagcttttctaggttannntttaggcctttatataggaagcctaaaaccctaatttatgatgaaacctttagatatttacatattaaactgattaaatacaaaatactaaactacccctcaaaagtagatattttccattagtttattgggctattaaggggctaatttgcaggtagcttgctgtccatgttttgggttgtacacagagtcctgccaggttaatcctagccaccaaaagaccttcaggggaggtctggctgcccaaggactgcaggatgaggtctggccacctaaggcctgcaagatgaggcctggctggccatactcctgccaagacctggtaggtcatgtgtcttccatgatcctgcaggtcaccatagctttaccaagaggaggtcagcctttggatgtagaggccagccttttgcaagttgaggatagctttttacaccgtttcttgtagaggccaggatcccttggtcgaacggaacttcccttggtttagaagtcacttcttggccaaccagcttgtgcacagatcctggccgacctataggctcatcctggtgagcctataggcttctcttggccgaccaaggatataggtatagctctttgagatctcgcttcactcctttcggttgttactttatggttttgtcgtaccttgtatagagaccttatcttgctaccgacaaggttgtattccacctatactctgtctttagcttacgtggacatgccaagttaggtggacaaaatttgggataacatcttcccctcgagaccctgttcgaacatctggtcagatagggattttctagctcttgtcttgtttgtagtagtctccgttaagcagccttgtccagccaagttttggttatttgcatggcatgcttttggatctttgctcttatctctctatatacgtctcatcttcttttcttggatatctcttctttgtacctaccgttaataaatttcaagctttttaagctttaggaaacgtttttattctcatgttagtttgtaatctcttttgcatattgatcctcatgacagttttggaatgtataacgtgtgagtttttaatggaaaagattcgattttggtcgttgggattcttcactctttgagtcgtaaaggatacaaagcacatattcaagttttaaaagaaaaacacacattgggattcaaaacttacattggccgacctgggaggtcttgcttgagaactggctgaccctaaggcttaattatgggagttagtcagctttagggttttagcctataaatctagcctattcatatgattgggtttggtgaccctagccagttcttgattgagtcataggaccctggctaacccttttaaggcatgagaaccttggacgtcatgggccttggttccaagtgggtagctagttttctgtccccttttgacttcaacatgaatctagctctataggcatatatagccatagtctcatacatggtttccttggaaaatctgtatgaaacttagtggtgagtctattatagtcaaatgttcaacttaagactcaacatggcttggaacttgtaaggaactctactgtagtcgtagctcgatacgtggcccttataggagctctttttggttcttttctggctgtattgttcttgtagggccttggcctcatgcgtgtgaaccgatttcatatctggcctcaaggctctcatgttcttgcttaggcctataggccctttatttttgaacactactattattaagccttaaagccatctatgatggaaatatcatcatgttaggttttatgccctanataaaactctttacaatctgattagt

SEQ ID NO: 124502 - DNA, 1968 bp, Cannabis sativa
  modified_base (1934)..(1942): a, c, t, g, unknown or other
cttagaatcatcccacttgacctttcccaggcgatgtgggattgtacagcttacccggtatttctccttacggatcacgggactactgactgtcacaattggcttagaattttgaaaatgattttaggtttttgaaaacttaaaaggtagagctccacattagaatacttgattggtcgggtatttttgaaaactaaatagtagtgcttataaacagtgcttgatgatgtggtaggatgcttaaaagattctaactattggtaatgtctggatgtcacgttaaaaaataatattgatgtgaaaacttggcatgcaatgatgtcatacattttttttaataaaactaaaacaaataatattaaataataatgtgcggcatcatagtggtaaatttgaagagtgtttatcatgcattaaagtagttttgaaaataagagtgctaaaaataatgtgaaaaaaagataaaataaaatattatttttgtacaaccaataattattatagggtaagtttacaatatgtacccctcaaaggatgtttcgctagatctgttttagcatatatgagggatttttagtttattttttttcatgatcgtgtacgttacatatagttatttaggaccactagtaaatttttaaaaaattttgagtagtttacaatgtcaaaataagatttacatattttattgcacaaatgacttttttttcttatatgtgtggtaagtgactgtttaaatttaattttctgtactgtaaactattcaaaattttataaaaatttacaaatgattttcaatagctataacatatgcgatcatgaaaataaaataaactaaaaaaatttcttaaatgccaaaacagataaaaaaaatctatcgagcgaccctttaaattgtttactacaaaaatttctatatatttaaaaaataataattacataaaacatcaatttttgtaaaatttttatatttttatgtttaaagttttttattttatatttttacggtattctataaaaatacaaaaaaacaacaaaataacataaaaaaataatatacaaataaaaaataaataataaaataataagagtacaacgtaaaaatatatcaaaaaaccgtattttatgtaaataaaatttaaaaaatcataaaaatattaaaaattttatacaaactgtatttttataatttttttttttattattttggtttttttttttttttaaattatcccattgaaaaaaccatccgtgggtccatcaattattatcctttttcagtttggtcagatttttgtagtgtttaatgaatcccaacacattaaaaatattgaatggttctgtattatatataaatatataattactgaataattcatcctctatgtgacaatatacctaccacatttaataataaatattgttaatgatcaagtcataaccttattataaaaattttgattattggattgagaaatataaaaggcactaatatggtaggtgtattgtttattgatacaattaatatttaatcttaattaaatttatttgtaactaaaatatagtattgaaatacaaattgttattaatttatttttaattataataagtattgtgactaaaaatatatttagccataataaattatattttttgtgactaatacatttagtacgaattttttagtcacaatataaaaatagtaatttataattaattacaattttttacttttagttacaacactatcaaaaatttgacttttaatcataataaaaattgtaactaaaaaatatatcgtgacaaaaaattttagtcataattatttttttataatgacgttgtaactaaaaaatttataactaaaaattttagtgaccataaaaatattatttttaattatgtatatataagagatttatatatatatatannnnnnnnnggtttcaatggttacatttttattgt

SEQ ID NO: 124503 - DNA, 1991 bp, Cannabis sativa
actgccactagatactttttgcccgttcacagatgtaatgatgtcacccaatatgagtcttccataggtatcccttttagttggttttagtccctgcagaacacacttcatcagctccactgacatcgtcaatttaatacaacttttaaccaaaggactctcaagaagaaaatccaatgttcccaaaacagaaaaaaaaaaaaaaaaaagatttaccgctttgccagcaggaccactggcaggagcgtccagaacgagcaccccactaacccccaactgctccacagattgatctggtgcaaacttaatccccaaaataggtcttgtaactttaccaaacctcacaagttggtcaactataccatttacctatatttgtagccaaaataagcatgagtttctctgaagcataaatcagtatatcataagtttaaaatgtagaggctactcacagtgtcaactggaattgaaaacccgacaccagaagatgcaccggatggagaatatatagctgtattaatcccgataagacttccagaactgtctaaaagtggccctccactattaccggggttaattgcagcatcagtctgtatgacatcttgaataggacggcctgttgccgcagagctgatttctcgacgaagcccactaataaaagcattttaagaatccatcaggatcataattctttacaaggaaaaaaataaaacatccatacagaatacatctgtaatacgtattaggaataactttgctgtattccctccattattctcctaagattttgtgttataataaattacttgcatttcattaaaggacaaatccggagtaatcaatttagctctttcactttataaagaaattagttttaatagaaagtcaccatgattcatatgaaacctacatctttttcttcttctacttcagagtacgtctagagagtgttaaattccaatcagcaaatttcaaattgactatcttaaatattaaaattaccaaagtgagcttcttttatctttgcactaagcttctttcaaattgtattggtcaatgtagaaactaaaaggtagattgctctgaagttattttgcctataacatttttttttattagtcatcttggactgggcaagatgtagtatggcgtacaccaaaagaagaaggcaaggtttcactaaaaagacttaacaacaggccaaatgaggtcagccgttgcaattacagttcagttgagtgaattaaaaaaaaaaacatgaaacagaggtccatgaatcttttacctaataacaccagtagtaagagtatggtcaagtccaaactgccaaaacacataacagaataaacaagggttggttaacttggacaatccatgtaaaataacaaaatcattggtcgtactcatgcagattgatccaacaagtaatgtatttaaggaacgtaagacatagccacttgggattagaaagtaaaaccatttacttacaggattgccaatggcaaagactttctgaccgacaagcaaatctgcagacatgccaaccggaataggtctcaatttttctctaggtgcatcaacgtgtatcacagcaacatctttgtcttgatcaaatccaacaactttagcatcgtatgttgtctggtcagcaagagtgaccctgcaaaaatatcagtccttacttatgagaggagagaacaaacgaagaatagtagctcaccaactcaacccaacaggaaatcatttcaattttcaaccataacaaattcaaacccaactcacttgagatcagaagcacctcggatcacatggtagttggtcacaatgtgaccatctttatcccaaacaaagcccgacccagaaccctgcggaacctccaaaacgtcgagtgtaaacacgtcctgcctaaatcgatatcaaacgacaaccatctcaggcacacgaataatacaaagaaaaataagctctaacccacaaaaaaaaaaaaaaaa

SEQ ID NO: 124504 - DNA, 641 bp, Cannabis sativa
  modified_base (69)..(72): a, c, t, g, unknown or other
tccgatcacaattggatatccaatgtttggcggtcggttgtaattggatcggtcggttctcattggatnnnntcgatttatgcacacccctagttcccaaccatatatactacaaagtctccaaaataatttttcgatcaacttgacaaaccctaacacacgaatcaaaggattgtgtagcatatataaaaattcatagtaatctcaagcttaaaactatcgtgtatatatgatcatttaataatacatttaaatgatgttcaacaattattatcttttttccaattttacatattttctagtatgtataatactttcactaaagtgtcctactacactagtgacttggatctaagtcacatgtattcataatactagtggactatagtagtaagtaatctgaagagagtccatataacttcattttattacagacgatcttccaattgcaatgatattgagaactacatagatgaacttgaattttttttttgatatttacttaatgttatcttcataatatcaacatatatatatttaatatcattcaattatttattttatttaaagctttgaaaaactatccataaaaatctctaaaattattttcctaaatttatacctattaaaattgcccatat

SEQ ID NO: 124505 - DNA, 557 bp, Cannabis sativa
  modified_base (486)..(489): a, c, t, g, unknown or other
cccaaacaactaactgtttttagaaaatgggattacccattgggtcaaatagttaaccatttccacagtaccatttagaaacagttaactgtttcctactatagaaacgggtaacttctgatttttataccaaaaccaacccaaaacttctccaaacctattgaaaccttccaaaacattttaacaccctaaaattaacataaccaaatattcaaaacatagaaatacaccaatattgcaaactcgtcattggtgagtgagtttttgagttcttgaactcaactcaccctactcaaagcttaacaaccatggaaacataaaaatcacacttaaacaaccttgaaacaaacttaaaatcatactctgaacttaaccaaatatacagacccaaaattactaaaatcccccaaaaatgttcaactcaaaatcctacaaatcattaagatcaagtagagaagttgtggggttttgtgccctaaataaaannnntttcaatataatcagattaactaattaatataagatcagaaattacttttatgttacatggttcacat

SEQ ID NO: 124506 - DNA, 570 bp, Cannabis sativa
aattttctaagtgttggcgtgctgcgcggattgctcactacccgggtaagaggacttcgtctgagcgaatgtatgtggtgtcctgttcggcatatttctggcgaacaggtacatagagttgattccccgtgtcaccatcgtgcgatgccacgtcaaagtgcaaaaattgggataacagataataatttgcatcactcaatagtactatttttctcttctcacttcattaattattaggcttatttatactacagattcttacgttatatcaattttagcacccaattttttaacaaattagtccctaaatatataaatttttacaagttagtcctttacgtttattttttagcatactagtcccatatctttagagttttggtaactataattccccagtattaaataattgttcttttgtttttcttttttgaataaaataaatttttacttattaattttttaatgtttaatttatttttttgctcaaatatatatatatatattttatttttaaaattaatatcttttttttttaaatatatattgttaatatatctttattatttt

SEQ ID NO: 124507 - DNA, 634 bp, Cannabis sativa
  modified_base (566)..(570): a, c, t, g, unknown or other
tttaatttctaaattaattacaaccatttaatagtaatccaatggcttaaaaaaatataaccatgatggttacaaaaaaaatataaccattaaaacctcctcctttggttaaattatatatttatcctactgtaggtagctatgaaaacaatgattgtttcttaaaaaaagagagagaaaaaaaaaaaaaaaacaatgcttgaattttaatagaagagtttaacggctaaaattatttaagtggaacaacttccgctttcgttcgttgcgggactaaatccaggtcctcctatatatacagtaaaacttttattcaagaatacatttgggacaaaacaaattatattctaattaagaagttaataactaaatagagatacactagaaaaaaaaaatcaaaatactaaaaaaaaatatcaatgtaacaataatagcaataaacaagcattaatactatatcataatagaattatttttgagtaaatatgatgtttatacatgtattacaattttttttgttggggtataaccgataaaggttaaaataacaagggtaacaaaagttnnnnnaaaggtggggaggtttctttcatccaagaaagttcattgtctatcctaaaggcatgcttagcca

SEQ ID NO: 124508 - DNA, 1288 bp, Cannabis sativa
actgtagcgtgccttagcattagggcgttacatattattactctctaatcagacagacggtgatcacaaaacctgtcatactatgtggttcattatacttttcttacctcaagttctggttcaggtatgttggccgacctgcttggaatacgatcgatgatcccaagtcctatgtcataacaataataaactaataagtttttatgtcaaagcactacttaacagttgtaaaggacaacttaaggttttctaccgaatccgtagctcaaatatactaaaataaaacttatgtttgagctctaaaacatacagcatatggtagagctcgtttcaagcttcaaaacagtatataaaacgtctaaattggacaaccgagtgcaaagttatggcaaaaatacgattccctagttctcatgactgtccagaaccagttaaccactgttaccagaaccgttgaccggttggtcaggggaaaaaagtgtaattttttaagtttatgcactcactaaaatgctaccaaaatttgttcaaaccacctcaaactttattgggcatatatgtaccatacatactaccatacttacgaaatagaattaaaaatcgagcccttaattggcaaacgccactagtattcgaacttaagatataaaaagttccaaactcaatttctaacctaaaatcacctcaatttcagcaagaaaatatcgaaactagtcccatgactacccgagaacaatcctataaggtcagaaacttcataactatcctaattcacaaaatccctatacaaaaccaatagtttataacttaaaacgaaattaaatcttatcttaagctttcccgctctatgaagttgttgtatcgctactaccggaacttagattactaggtttcaggttaaaaattgaagaaaatatataaagggagggtttcgtcgaaagaggtggaaggtttcgttttgttttcattttactattgataacgtataacatataatatatattaaacttatcgattgataagtgtataaaaataatattataataataatataataattaataatatattaataaaaatttcatattattcataattatcttatcatttcttagctattaagaaatctttacttctaaggcgctaagtcaaatcccacatactcataattatcccaatgcatatattatcaacttatcataatattctcatgaattctatcaattaaacctgttatgacatttctagccctcgatcgagtcttcaaggtcaccaaacctgaaaaata

SEQ ID NO: 124509 - DNA, 1720 bp, Cannabis sativa
tttatgcatatattttccaataaattaagtattaaaagacaagaataacaagattaaccataacttacgatttatattagttaaaaaaataatgcaactcgtagatatactaaatcacaaaagtagtttatgttataacactatacttatgaaaattactattaatatttgttttaaattttcatctttctcattaatttcttttagtatcaataattatttgcttcaactatattacaaccctccttaattcatttatttaataagtaaaaaaaaccctttaattaatagttttttttccctctttctttattgaaaagagttttaaaaacttttaattttaaattagacaagcaacatatcttaaatagggtaattttgataagtatagggtaaataaaaattaagtagacaacgtactttgttatgtaaattatgtgccttaaatagggtaaataaaaattactactctaaaataaagtaaacgagatatattattaggtaaacaacgtgagtaaacaacatatcttattaggtaaacaacatgccttaaattaggtaaacttcgtaccttaactaaagaacaaaaacaactattttaaaataaagtaaacggcatacattattatgtaagcaatatatcttatattaggtaagcaacatattttatattaagtaaacaatatgttttaaattaggtaaacttattacgtaaacaacgtgctttaaatggcacaccttattaaaataaacgacaccctttaaatttttcattgcccaattcttgttcaatcagtgtatagtgaactatgtgccttataagtaaacaaaaatatttcttataaaatgttatcattaaaaggtaaagcactaaccttgtaaatgcaaaacaggccttaaaagtaacctttattcattgggattgcaattgtattatttggtgtaataccacctaataagtctttcaacttttttttttcgttttctatgtttgcattggtgtcgtggcatgtatcatagttgtgtttggttcctcgactcttggagagcttcgtgtgtgtctttttttttttttttttttgctttggctttggggttgtggcacctaagagaggagcctcagctaagggggggccatcttattattattttttttttattattttaggaatagatttttgtggtttgtatttattaagacaaataatttgaaagagaatttggggtttacaatagtatacttttttattttgttaataacttgaacatgtaaatttattattgtttcacaaaccaaaaaaattaataatagagtagcatatttgcgacgtaaatatttaagtttaattttcaatagtattaatacataagttatatttctgaaacttctataaatacttgactgttaagtgtcaagtcattatccacgtgtatatatgaattaattttaaaataaaaaataaaaatttaatgacttagaccaatcagtgattgacacattgccataaacttgacacctaatgtctaggtacctatgaaagttttagaattataacttatatatttttactgtcaaaaattaaatttaggtatttatctgcaactatacttgagtatctgtaactgtacttaagtatcaatataaaatctaattactcatccaaactaaatgaaaatactaattagtttaattggatgtattggatttttagacacccca

SEQ ID NO: 124510 - DNA, 2297 bp, Cannabis sativa
  modified_base (223)..(227): a, c, t, g, unknown or other
  modified_base (2270)..(2272): a, c, t, g, unknown or other
gtgaggttgtacatgtcgataggtctggagcgtacgatcctccggacatcagggcttctgttttttagtcgctgggcgacaaatcttttgtaaatgaatagcaaacttttgtaattgtattttgtaaacgggatcccgaaatattataagtatgatatgttatgttttaattaaaaagcaaaattttaattattcacgtttttcaataacctcgttgattagnnnnnagctgcacagtacgttaaaaatcatgttaacacgcctatgctagttagggtgttacaagaagaaagatgatacactttttcttgctcggctgatgctggcccttccactgtaactggccagctttctgttgctggtactttattgattaattgattctggtgtgacgcattctaatatttccaatagagtaattgagaatttggataggcctagtgatatcttattgagtggcttcggtactctactgcctattggagatttggttatctttagcaggtgggttaggtctcttgcagtatttatggaaggaagggagttgtcggttgatctgatagagttaaatctggacaattttaatgttattctgggtatggattggcttgcaaaatataacgcaaccgttgattgtaaaaggaagatggtaacttttcaagcagaaggtgaggaatcgttcgtatctatgggtaaagtgcaaggatcttagattcccttaatctcagcgtttaaggcaagagatttattgtgtgaagggtgtatcagtttcctagcaagtgtagtggataccacaaagaaaccactagtgggaccgaaacatggtttagtggttcgagaatttctggatgtctttacagagaagctaccagggttaaccccaaagcgggaaattgattttgaaattgatttaatacaaggggcgaagcctgtatcaaaagctccttataggatgcacctgcatagctaaaagtactgaaatttcagttacaagggatgttgaggattcgggaagaagatattcctaaaatttttagtaatgtccttttgattaacaacgctgcggtggcatttatggacttgatgaaccgagtgttcaaagactttctggataattttgttattctcttcattgatgatattttaatttattctaacatagaggatacacacaaaagacatcttggatggtgttccaacgcctcagagatcataagttgtatgctaagtccatgaagtgtgaattccggttacctcaggtgagtttcttagggcatgtggtaaataaaaaatggtatcctagtggatccggtgaaaattgaagcagtatgagactgacctcgacctaagtcaacaactgaggttagaagtttcatgggattagcaaggtaatatagaaggctttttgagggagttgctaagatttctatgcccttaacagaattcacttgaaagaactataagtttgtttggactgataaatgtgagtatagtttctaggaattgaagcaaagattaattaccgctcctgtgctaactttaccggttagtgatgaaaagtttgtgatttattacgatgtgtccaaagagggattaggttttgttctcatgcagtctaggaaagtgattgcttatgcatccaagcaacttaaagagtatgagcaatggtatcctactcataatatggaactggcagcatcgtttctgcactgaaagtttggcatcattatctgtatggtgaaaagtgcgaaatctacaccgataacaagagcctcaaatactttttttcactcagaaggatttaaatatgaggcaacgacgatagttagaactggtcaaagattgtgactgtgagattctctactgtcttggaaaagcaaatgtggtagcgaatgctctaagtcgaaaaggcctagcgcaagtctatgaattaaggaatatttcacctagtgtcaataatgtatacatgtacactgatttttgttaactgtatttgagcctaaacagtgatagatttgcacagaaaataaaagcagaaaaagaaagatatgaacacaaaggtttttatgtggttttgcagttaaaattatgcattgtcgacgagtcaatcttattagatttctgatactacactcaagttgtttttttctctaatgattttccatcccttttttagtataacctgcccctatttataaatacataagagggcggttaagtatagtgtttgactgataattcacaacaattatgtgacagtcagtagtccnnngatccgtaaggggaaacaccgggta

SEQ ID NO: 124511 - DNA, 1365 bp, Cannabis sativa
  modified_base (1338)..(1339): a, c, t, g, unknown or other
aggaaataaacttgttattataaattaattggtgaagtcatttacaataacagagcttgtaggcggaggtatacaatccgaccaataacaagtctcatccacccctaaagcaaattttgccaagccatccgcagccatgttagccgaatgtttgacatgagaaacttttacattagggaaaaaagacaatagactagaaacatcaacaattatatcctgaaaagaagaaattgctgatggagatttacataaagcatttgaaacccgaagagcgttcgtttcaatttgagagataggcaattgtagctgtagcatccaatttaagctatgaaacaaagcaattgcctccatttcatgcgaagcaaagcaacccacaactggtttcgatactgcagcagctacctgaccattagaacaacgaattaaagctccaatacccgtgattttcctggagttatcaatcgcggcatagacgtttagcttaaaagttccagctgcaggagaagtccaaggaatctgctggtttatatgtgaagccggctgtacagttgcagcagtaaccggctgagttgtgtctgaagtaagagagcagtatttggtttgagcatttttatattgctcccagtagttactggcaaaaatagcaagatcccttgattttttggccttttttccacgaattaccagattcctctgtccatattgaccatagtatacaacagatctgttccattaccaccttggtgtaaacagcaaccaaatgtatcaaataatccccctttcgcatcgacatggtattattccagtcaagtgtaatgtttgagtggcgccaaacggaacgagcatacttacaaccaaagagagcatgacctatagtttcccaagcttgatggcaaattgattaagtggagtctgtaattactttccgtctaaccagagcagtagcaacaggaagagcatcattatagacacgccaaacaaagatcttaattttctgtggcaatttcagagaccataaaaagttccaccaatcaaccatgggtttggaacaggagctatgatccatttcttctagtgaggcagctaaatgatatcctgtttgaactgtgtatgtacctgaagagctaggatgccatatgagtgtgtcgtctttcctaaaaaagctgagtgggatcgttaaaatgcggtcgacatctgctgaagaaaaccagtggtatagcagagtcaagtcccattgccgctcttcagtaataagattcgaaacacatgcatcttgtggtccagaaaagagatatggccgaaaggttgaatgccctggatgttgggttttatgccctnnataaaactctttacaatctgattagt

SEQ ID NO: 124512 - DNA, 2138 bp, Cannabis sativa
aaaaaaaaaaaaaactagaataaaatcagatggaagcagttcttagcacacattaataaacaggcataccatctagcaaaactgaagattgcaaggcaccatggataattgaaactaggtggcaaaagacttttggaagtgctcacgggcagccaaacagggaaagggaagtcccttaagagagagagacctcggtggcattgtgtcctcaacaggattcaaatccgagtaaagcaaatacaagatgacagatatgtcttgtaaaagaaaataggataaaaacttgctgagaaataaaattcctcagctactgaagggttgggcaaggcacccaccaataaggattatatcattattaattattggtttgatacctcaaactcaagctaattttcgaactactttattaccaaattgctgacacctaaaacggtttaagaattagctttaacctcttttcaatagaaagaagtgcaccatagctctacaatcagtaatgaacaaaatacacatactaatagagtcatgagatgaaccctaaatctgaaaaagtttatgcattttcatgtcaaggacaaataaatatatagaagtagggagatgagcttggctaattttgaagataaatgaggaaagaaataagcttacatgacagaagaaagagaatcatttgaaaattgagatttttccttgaagtaatagtagtgagcagcagcaaaaaatggaatccgagtaagcccataagccaaggttcctgaagtaaaagggaaaagttatcaaacagttttgttagatcttctcgttcatgttcatggattccaaacgagtaaagagaaagagagtgagaatggaccttccaatcgatggcgtggaagaaaccgatgaaattatcgtaagcaggtcgaagaccggtacggagttcggcggacagtttttgaacaagatcggccatttgatccatgtggtcctccatagcggatctcaggtcatccatggtttggttattgttggtattggtgattcagatccaaactgccaatgcaaagttgaatttttttgagcagatctccctctttctaagccagctgcttttctgagatttgctctcaccgtctcttcttcgcaatattgaggctgaaatggaagaatgttgaagtaccaattaaccgttttataatgctttcacaaaatttttaaaaaaaaaatcttagcaatatataatttggttgtgtttttagtttttaatttttaaaattgtgtttttatagatgagaatagaaaataatattttgtcattttacaaatttaataatgtttggcatatatttttttaaaattaattttagattttttcttacgaaaaaaattcaatattctacaccaaccatcctaccccgaatccgacccgaacctggaccacagcccgaacccaaacccaaccctagacctgaatctggacctgtatccagacctagacctcggacccgagacccaaacccgacccagacccgaccaagacactagactccggactcggaccccgaccccagaccccaaactcggaccaggaccctggacccagaccccggaccttaaccccgaacctagacccaaactcaaaacctagggctaggtccaaggtccttggccatgtctggattcgagaattaggtcgggttcggggtccggcttgggtcgggtccgggatccctcgggggtctcaggtctgggtttgagtcagggtctcgggtctcaggtctgggtccgagtcagggttcggggtctgggctttggttccgagttagggtccagggtccgggtcggaattcagggtcgggggtccgggtctggggtccagggtctaagtttgggtccgggtccgggtccgagtccggtgtctgagtccgggtctgggtccaggtccggttcgagttcgggattcgggttcgggtttgggtttggggttcggggttcagggtttgggtctaggtccggtccgggtctggtttcgggtctaaggttcaagtatgtgaacaaaaatataaaatataatatgttagagaaaaaaatatttttgaaaattgaaaacaacattttgatgttttctgtttttcagttttttaaaacttagtttttaa

SEQ ID NO: 124513 - DNA, 1814 bp, Cannabis sativa
aaccaagaaaaatcataacagactacaaagatgtacaacaaacatctacttgtgtatattaaaaaaaagtgttcaatagataaaaggcaaaactaacaaacttgtaacaagacaatggaaagactcaataagaatgtcaaacctgcatccttccggcatcagatccttccctatcaggtctaataatcctgtcttgtgtgttgttttcatacttttgattgacagcagataatctgttcataaaaaaatcccttcatataatcaactatgataatcttatgacatgtacagcaacaaagagcatgaaagcttagggatcaccaaagttgatgaagatagaaaccttttcatgacaatacaacggccaaaaccacgatctagagcagccttgttcatgactattgcatcctctatgtcatagccactgtaactcattacagcaacagttgcattctgccctgccccaagtttatcgtagccaacctggaagcacaatggttacgaactgacagcagacaatcaaacaacatccaagaaaacataccaaccagttcaattgtccttgtcgtcaataatggtctttgaggatacactaataggtaaagtaatgtgtccatccggcgtagctacaaaattaagataatagatttgtattagtcaaacataagaaggattctataaagggtaattatttgcaaaagcgaaaacggcaaagtgaacactgaacagtggcaagaatatgaccacaaccaagtcgaaaataaatgacctaaaaacaacatatccaatgaatagattgctgataatacataagaaaacaaagcatgacttttgggggctttaaaatggatataattttatttggatatcattatttcctaacaaaatcaaagtttattgatggtgattcacagagagtctaacacgagcattgatacaaatgaaaagatgacatttgtgctgtgtaagagaaacgatgaaactatagattatttgttctgtagatcaatgtgcaattgctccttgaaacatattgcatggccttttacaaacaacatgtgagtagataacatttccaaaaccaacaggcaatagtaaaaatgagatgacatctagaaggtgctagatttgctatttctatagagaataaaagctttcgctacgcactaggctacagtgggaaaacaatgtaaggactttccactctatttaattacacttatatgaaaaatcaccattaagtgaatttagtttgctttctaattctgttttgattcttttttgttttgctttgattttgaggatatctcatcccctctatttttactcctatttctatctttccacccttaaatatacaaattcttggtacataatatacttgagagattatcgtatgggggagttgttttaagttttgtattgatagattatcctatgggttttgtattgatatgttactgtaccacaaatgctagttagtaaattaattggcagcaaacgtagaagaaagctatgcagaacggcgattttagcaacaatttgggctgtgtggttggagagaaatgctagaaattttgaaggggttgaaagttcagaagcggatatgtgggagaaagttaagttttgggcagctacttgggtatttaagaccagattttttaaggatttgtcttttctagatctatgtagagaatggaaatcattgatgtattagaagtacctgtcttttctagatttatgcagagaatggaaaacaattttataaaggcagtaggtggcttttgatagtttttttagtcctcttctggggc

SEQ ID NO: 124514 - DNA, 3297 bp, Cannabis sativa
  modified_base (218)..(221): a, c, t, g, unknown or other
  modified_base (1150)..(1152): a, c, t, g, unknown or other
ttacttgctgacaaactatacacttaactacaaagctagccacatctcttttcataccttcccaccaatattgtctcttaaaatcttggtacatctttgaacttcgaggatgtacaggaaatttggatctatgggcctcaatcaaaatggactccttaagatcaaggatatctgtaacaacttgccttcccatatggtataggtacccttcaccattnnnngtccacccatctagtttctcaccatcctagattcgattccaaataaatcttagcttttatcttgccactgacgttgcttaacttgttgaagtagcattggtgtagccactatgttagagatacaagctacttcttccacttcatagtattgcaagtagcactggtgtaacattctttcaaaactcgaatatgtgcctcgtattctttatgactcaactagttaagaatcatagagaaggccaaaatcgaatcctttctatcaaaagtcacacattacatattcaaaaactatcatgaggatcaatataccaaagagattacaaactaacatgagaatcaaaaagtttccaaaagtttaaaaagcttgaaacttgttaatggcaggtacaaataagagatacccaagaagagaagatgagacgtatatagtgagaaaaggttaaagatccaaaagcatgccatgcaaaaagccaacacttggctagataaggctgctcaacagagactactacagacaagatgagagctagaaagtccctaaccgaccacatgttcgatcagggacttggggggcaaatgttaacccaaattttatcaacctgacgtggcatgtctgtgtaagccaaagatagagtacaagtggaatacatccttgctagagcaagacaaaggctctataaaaggtacgacaaaattatcaagcatcaaccaaaaggggtgaagtgagctctcaaggggttgtacctacatccctggctaaccaagagaagcctataggccggccagggtgagcctataggccggccaggatctgtgtgtaagctggccggccaaaaagtgacttccagaccaagggagcttttgttcgaccaagggaacctaacctgtatgaggaaatagtgtacaaagttgtcctcaacttgcaaaannntggcctccacatccaaaggctggccttctcttcgaagggctatagtgacctgcaggatcctgatagacacataacctattaggtcctggcaggagcatggtcagccagacctcatcgtacaggccttgggtggccagacctcccctgtaggtctatgggcagccaagataaacatggcaggactctatgtacaacccaaagcatggacaacaagttacatgcgaattgggccctttaatagcctaacaaattgatgtaaaatatctactttcaaggggtagtttagtcttttgtatttgattaatttaatatgtaaatatctaagggttttattgtaaattagggttttaggctttctatatataggcattaactctaacctagaaaactgaagtcactaagcctaatccttagcctccaaatcgctctaagtcagaaaccctagtatctctttctctctctttgcgacacgcccccaagggctctctctctcttcatctctcacacgcctctaaggcaatatcactctctcattagagatctacttactgattcatattttgtatacttatagagagctatatcaaatcccacctatagcgatctgaatagtatatctctagtatcaatacaaccaaaaggggaggaggtcattacctgctatcacaagggggtcgaacttctataaaaaatcaatgtgttttatactttttcattctgtttgtgtaacatgtggcaagcatcaaatctatacgatctcgttgtcagttgatcactttttgaggtcaacacaaataaactaaacaataaatgtacaaaaaaaatatataaaaataactatagaacatctaaataacaacataaaaacaagggtaaataccattttggaccatctgttttgcaaaagttacagattggggtctctgttttgttaaatgtaaaatggaccttgtattttttaaaaagataaaaatagaactttgagctcaatttttgacaattttttttaatataaccaacttgaagataattcttaacacgaacagatatagaaaatataactagttttgtcataacatctctagatcatattattattaaattttatttcaataaaaaattagttcaggatcctatctataccattttggaaaagatagggtctattttatcatctaacaaaacagaagtctaattgataatttttgtgaaatacaggaactaaaatagtacttaccttaaaaaactataaaataactatagaaaaacaagaagacaattttaaatcaacagaaaaataataagacatacttattaaaatatgtaaatcatttataaattaactctgaataaattacaaaacatccaaaaaattatactacttttattaatcgtgtaaaagataaaaaaaaaatatacgaggagtacttttaattttttttataaaagtgagaaagagtggtaaaaaagtgagatatacaaatttacacttcttatatatgtatacaaagataaaaaaaaatagtttgagaaaaaattttaaaaaaaaagagagaaatggaaaaaaaaaataaaaaagagagagaagaaaaaaaaaagttagcaataggcttaaaaaataatgaaaaaactaaaaaacatataacgaagatgaaattttttttttgaagttttaataaataaaatatagtaaaaagaattaagtagggaaagtataaatataattttttttaatcaaaatataatgtcaagttgaaaagaaaatttagtatttggtctaacatttccaataaaaaatgcatttatctaaatatctattgagccttaagtcatacctggttggactggtaagggtccacttaactaattcggcgagatttttatagaaaattacactacatacttcttttaatttaatgcttttaatttttcctctctttttcaaaatttattatgtttatatcttttttcaatcaatctactaattttacccctatcactttacgataattttcattttttttaatcaaaattttgtcttaacttttctacaaacttacacatctatctacaaagaatataaatctattatatttgaaattatgtcttaattatgtgagggtgcgaagataatttaagtacaat

SEQ ID NO: 124515 - DNA, 899 bp, Cannabis sativa
ctactaagaaattttgctactaaaatttggtagcaataagctacattttgctaccaataaaatttggtagctaaaagcatggtagctaaaagatatttttcttgtagtgattgacacttcagctcgaactcaaatttattcaattctgaaaatgaatgaagatactaagagtagcatttatcttggtcttcccaatattattgtctgtaataaaaatgtcgttctcgagtttataaagaacaaggtcgtttctctcttgtccaggaaaatggattctcctcaaaactgtcattcagtctctacctatatatgctatgagtgtatttcttcttccagttggtacttgtaatgaacttgaaaagttaatggtgagcttttggtggaagtctaacacaagcaaatgtcgtagtataatttggatgtcatgggatagtttagccactcccaaggaagagggtggtatgggctttaaacacctccatgcatgactttaatcttgccatgcttgctaaataagattggcgtttgttgtaaactcgattcccttgtggctagagtttatatagctaaatactatcccagttcaaattttcttccagctgatctcggcaacaatctgagttttgtgtggcgtagcatctggggtgctcaagatgtggtctgtttaggtgctacacgtgttattgcaatggtaccactaccaatattattgccctacaaaaaacagctatatttagtgacaactttttagtcacaacataaatttattgtggctaaatgtaactttcggtcacaacaaaaatgtacttgtgactaaaacatagtatttagatacacgttgtcacttatttacttttagtcacaacaagtgttctgactaaaagcacatttagtcacaa

SEQ ID NO: 124516 - DNA, 1833 bp, Cannabis sativa
  modified_base (474)..(482): a, c, t, g, unknown or other
aaaaaaaaaagaatatacaaacacttacaaattttgtttatattttacaaacaatgtatatatatttattaaatatatttaattagtattattaatgtttataatgttattattaatctagtatgtttattatgataataaatacaatttatttattaaaaaatcataacaatttttaaaatgaaacacttaagtttatttatttactgaataaatacttgtttttgtttattaaaaggtcataaacaattttaaaatgtaacacttatacttattagttattgaaaaatgtgtttaaaaaataaacgaaattataattaaatgtgactttatgtataaatactatgtttatattattactgataatatttattaattattaatctaatatatttgttatgataatatttgtgatgatatatttttttttttttgaccaagtttgtaatgatatgttaatataatgtgtttatnnnnnnnnnaatacaaatttataaataaaacatatatgtttattatttattttttatatatgtttactatctatttttatcatatatagtttgcatataaattaagtatgtttctcataattactaaaatgtataataaattgtaaataaatttttatgcacatataatgtaattaagtattataaagtatataaaattgtaaatttcctttaaaataaagttgttgtttggttatttatttgttcttatttagttattcaaacaaaagaaaataagtatattacacagttgtgtgttagttgttatgtagttgtttaattaagaaaaaaataagtatatacgtttagttcttcacgagtacatatattaggattatttttgtgttgttttcttatgtatttgaggttgttgacacaaaatattaatattgagtacatgcattatacgattgtttttgtgttgttttttttttatatatatttgaggttgttgacacaaaaattaatgcatattatgtgttgttgtgtagataatttatagttattttcaagttttgtttgttgttatggtgttgttttaaaaaaaaaaaatagattgacgcaatgtgttcgtgtctggttgatttgcatacttaagtaaagttgttgtttagttatttattcgttcttatttagttgttcaaacaaaataaaaataagtatattgcatattaaagtgtggttgtcgtacaattgtttgttagttgttatttagttgtttaattaagagaaaaataattatatatgtttagtccttcacaagtaaatacattaggattgtttttgtgtttttttttcttatatatattggagtttgttaacacaaaatattaatatcaagtacatgtattaggattgtttttgtgtgtgtgtgtgtgtgttttttttgtatatttgaggttttttttatataagtgtatatttgaggttgttgacacaaaaattaatgcatatttatttttattaatacaatacgttgtcgtatagataatttatagttatttttaagttttgtttgttgttatcgtgttgtttttaaactttttttagattgacgcaatgtgttcatatttggttgatttgcatattaaaataaagttgttgtttagttatttattcgtttttatttggttgttcaaacaaaagaaaaataaatatattgcatattaaaataaggttgtcatacagttatttattagttgttatttagttgtttaactaaaagaaaaataattatatatatttagtcattcacgtgtacatacattaggattgtttttgtgtgtgtgagatcggaagagcgtcgtgtagggaaagagtg

SEQ ID NO: 124517 - DNA, 1825 bp, Cannabis sativa
ttatttaataaaatagaaaattcaattcataatttttataaaatacaaagactaataattttttttgtttttttttgacaaaagtctaaaatagtatttaattaaaagctaataaaaatatttccatatatagaaattaataagtttttcaagattacatgaaacacgttatacattagatattaaaatgaaaatgaaggaatattactgtggacacatcaataataataataataaatgatgataatttttgacaagctagctaggtactagctaattaatagctacgacgtaggactttcctcttttctaaactctaatctaaattttcataactaaatgttgacatgccaccacgtccaccaccaccatttacctacactatttaaatagaattgatattgggtactaataatgtactaacttagagataatgttttaaaattagttagcgatatttttttttttaaattattatcttaaattatatgacacataatatttaattacgctaataacaatatgacagcgaaaaaaaattctaaataccactagaaccttttaagatttagtatttaaataaaagatactaaatatacatgaccaaattaaattatattctgtgttaaatgggaattattttatatattattttttatttttttttagatttatggtttaggttactccagtaatttttcttatggtttttatgtggattgctaaatagattttgattacgatttaagttgcttcattagttattataagaatttctatgtgaaattctataaaaataattaaaaaaaaaaaaactattttaaaatataaaaataaacaaacccctaaattattatttttttgagagaaaaactattaatattaatgaacaagttcatttacaacaatagctttaatagggacgggacaaacaaccctccaaacaatatcagtatccacccgtaaagtgaatctagtgagcccatgagtagcggagttagcattccgacgaacatagttaagagaaacaccaggaaaataagtgttaattacaacttttttagtcaatttttacacccgaaattgtatctcaaaatttttttatagtaatatttgttatagttacattattcttgtaaacttttaaaaaatttataatactatatttaaaaaatttcaaacttatttttcggtgctgtaactatttaaattttttaaaaattttgcatgaatggtattgtgagtataacgaataccgccgtaaaaaaaaatattccaacatatattttcgaatataaaaattaactaaaaaattgtaacaaaaagactcctcataccagcattgtctattgttgtctattgtttatacaacaaactattaactatacatatatataattatgatatcatgagttttaatttattaggagcaacttagcgaaccttcttcaacaacaatgatcagaacaactaatttcacgtttttttttaaaaaattattattttgtgtgatcaggctcgcatatatttatattaatatatttggtgcgggcaccaaattattatatgaaggagctgaaaaagatatatggaagcaatgccggttagtaacgaaagtataaagtgggtgcaccatcagtatcggttaaacaataataatatttaatacaatcaactatagtaggatttttttaggggaaatctatccaaattcagacagcataaaataaaacacactatatatgtggagtactatttctgatttagagcatgtttggtattattttctattttttgttttaaaaattgtttttagaaatgagaa

SEQ ID NO: 124518 - DNA, 1307 bp, Cannabis sativa
tttttttttttttttacatttaaatatttaatcgtcagttgataatcattgaatcacgttgctaattttagtattaaaaataatagagtttttttttttttccttttttaattccccaaggaaaaaaatctcatttttattatgttggaaaatttattttaaaagtacaatcttttttattttattcttcaaagtcaaagaatatattgattattagaggaaattttttaaattaagaaattactacataacatatttaatatatgcagcaatatttctattaaagacatacattgtaaaaaattgaaaataaaaacctaattagtctaaaaaacaatcccactaagaaaaagaaatgatcagagttcacaacaactacagaataagattaagggttttatcggtttggtatggactgcttaattctaatttgagataaataactatttttttcttgtggtatgaaaagtataagtttttttttttttttttttttttgaaacaatatgaaaagtataagttacttgttatattttctctccttttaatataaaagttcaaacataaaaatatttaattggaattagtttaagagcttttttttcaattttaaccaaaaacagataataatattacaaacaaactttcagtcgatcaaataaaaaaatatacaacttgataaaaaaaaaattacataaatacctcttacacacactttcaacccacacgatccacgctttgtgagattaaaaccttcgtgtgatgcaattaggtcggtaatgataaaaagagaaagtaccattaattctgacgacgtcacttgagaagaagaacaaactcacgcacacaaccttcaatcgaccaacccagcaacccaacataatcaaaacaaaacccaaccagaaagagaaccaccgttaatttcaacgatttcacccgagaaaacgatcgaaatcaatcaaaacagtggttgtttcgaattcatgaaaaaaaactactacgaaactaatattcaaccaaaaatccggtttaattcgaataaaactaatgtcttgacttcaatttccagatccatgaaatgcagatatcaaaaggttgaactaaagttccgaaacaatccaattaaagtataatccaaaaaaaattacaccaatactatagttaaatatttatcccgatgcatttttgttattttctagatttctaatggtgaatttatttttattaaatcacaaatagacatgtagatagagttacgtacatgtaaacactgttctaatttttaatgtttcataacagttgcatta

SEQ ID NO: 124519 - DNA, 756 bp, Cannabis sativa
aatgatgccaattttgaacttaaataattaacagtgcagttagtattctttaattttaaaattgtaatgaaaagagataaaaataattatgaaaaaaattatttgagtttaaaatttaggtattattcttaccaaaatgttagatgtgagcagaaaaaaatatatttttttagatattaacatgagtattttaaaaaaaaaaataagttattatagtattaatttttaaatcaaaactaaaataaataactatgttagtataactcttctttcaaaaaaaaaaaaaacctagagaataaaaagcactaaaagaagaaaaaaaaaaacaataaagaagtggctagttttcacataatggaaaaagaaaaaaaaaacctaagaaaaggctgataggttcaggctaacgaacaaaaaattagaatgtggatatatattatttatattaagtataaaagtatacgtaatatttatattaaaataaataacggtatcggtgttattaattttagttttgagtatcggtgttattaattttagttttgaatatataattaaaagttcccctatttatttatccaaattttgataaaagtgacgtgacaagtataataacacgtggcataattaaggatacataggattgagttagtaaggaatatgtaaagtcattatcccccaatagacattttgagcatatggggataagattgagtaactaccttaggggtatagtatttagatacaagttatcactaa

SEQ ID NO: 124520 - DNA, 1016 bp, Cannabis sativa
atcagcagattcatgaatgaggcgaccaaggttccacgagtaaccgaagacaaaaagttgtccgtgatattgggggggcattgaagtccttggtgagctttggaaggacataagaaagaacggtccagtagactcgatgagtgattttcttgaccgtgcagaaggttttatcaaacttgaaaaggccatttagcgggcagaaggtgaacaaaaacctggcaagtcaaaagctccttctattgggacatctgtccatctcccccattacccgagcaattcaagttcaaatagtaaacggtccaccaacaataatacgcaagggaatggaaaaaagggaaagttcaccagcaaaactgaacaggctcctcgggaaaatcctaccaagtatactgcatttaccatccagacggaggacatagaaagtgtttccatggccactcagtcagtagccccgtacaataagcccgcactcatgaaaattgatgttagcaagagagacatgaccaagttttgttgatttcatggagaacacggccacgacaccaaggaatgcaacaatttgaagatggaaattgaatttttgataagaaaaaaaaaatcgcacgtattgaagtatgtcaaggctgacataaattagaggggcgatatcaaccaagacttgctacctccaccagtagatggacatttgaagtcatcattggaggcccgtacatagcttgagattcaggcaatgcccgggagaggtatgcccgaacagtacagcacgagcaagaagaagtgatcttggccgtagaagagaggaagccaaaaatccaacgagtaggagagcccacaataacattcaacgattaagatgctgtcaatatcagatttttgcacaacgacccgttggtcgtggaggtccagttagctaagaagatggtcgccagaactatgatagataatggagcctcttccaacatcttattcaagacaacctatgtaaagatggggctctagctcaaagatctaacccc

SEQ ID NO: 124521 - DNA, 1154 bp, Cannabis sativa
aatcatatatgggcaattttaataggtatagatttagggaaataattttagagatttttaaggatagtttttcaaatgtgtagcaattaatatggatattatatatgcatataaatacatcattttatgaaatattattaattgttatctattatatggaaggaaaatagaatatttattagatggattactcttgtgctaaactacttgctcttaatttgcagtgctaggtcgactaaaaggcttgtcttcaatatttcacaaaattttaggtaataatatatttaactttagattgattattctctttttttggcagcaacaagattgattattctctttaattagttatattatatagagagattttagagcatcactttcgggatttttttttttttttctaatactaaaataaattataattcagtttttttttaaatggtagtgtataaaatattaataattgacattacaccaattttttaaaacaaatagaaaacgatcctgcagtaaggcaaaaatgattccctacctaaaactttccctatatatatatctttaattatatattaacacatttttttttttactatttctaatagatatgaaaggtttatatgaaacaaaggttgggtacactcgatataatgaacttcaaaatttgatgtgtatagagattaaaaagatgacaagtgaaaatgaaattagaaatgcaagagtgtgtgatgctgtagaaaaggctgcagaaaatggtaatgtagaattcataaagaaaatagcaagagcaaatccagaactgatttggagtagtaatgaggtagccacaaatgtgtttcaaaatgcaattaaacatcgtgaataaaactgaattgctaaaaagtactattggtacctaatatcctccatggtgtcatactgctattgctgtaattaagaaaataacttttaagcaatatcgttaaccaatcatcgagcgccacctatagaaagtgttatattttagtatactacacctcaccttaattattatactttttaaatcatccttctacattctcattaacgatggatatttaaaagggtaaatatcattttggaccctctgttttacgaaagctatcaattggaccctgtgttttgttaaatgacaa

SEQ ID NO: 124522 - DNA, 895 bp, Cannabis sativa
gccacgtcagagtgcaaaaattagaataacattatcattgtaatctttcttctacaaacaacttcccatggctcacaaagaattgtgttttcattaaaagtgcatgttaaaatgtgaagagttgctccagcagattaatattcttgatgatatttgttgacgctaaaaattgtcaactctgtatcctctgattagcaataatgacaaacaaaaaataataggaattaaagagagaacattacaatatatagtacttcactccatatatcacgatggtaatgaagctacgtctacttagagcttttactatcacaaaaagctaatttccttacaagataactttagaaaaaatgactaagtctagcttcacgttacaatttctagggagagaaagtgtgaagagagagaagttcttaccttgtaaagataatagaatgtatgaataatgagctaaggaagctatccttttatagggagcgatgtccaattaaattacaataaaataatagaaaattcgcacaatattcgttggaaaataatcctacactagctcgcaagtcaatttttgaggcacgaaactttggaattgcggcaagggtgcgaggcacacttagatgcgtcttaaaaatatctttcattttccactcaaatcgcgtcatttgaatacaaaaagagagagttatggccattttacagagtggtgtgctctactgaaaagtgactaagagatccgactgattttttggcgccaggttgcatgaacatcaacttaggcgcctaaaacttagtttcttgggctttaggcatattttgagatgcttgaattatttgatagctatccttagttcattctttgaccttggggaagttatcttggcaattttacttgatatgc

SEQ ID NO: 124523 - DNA, 1225 bp, Cannabis sativa
ttctgagcaatatctggttgaattaatcttcttgagatagctttgttcgatcagttttaattgtgacgccatcatgaccacggtgtctgacttgtcaagctggctctttcctccagtagcagtctcggcagcttcttcctgtgggacgccttcccgcacattttttggcgtaccatcattgttcacctcgaccccgtcaaaactactttcttctgtgtcctccacaatgggagcatcatcatcctgatattcattataacaaacctattggtgacttgtcttttctaggtgatcactcgtgtctcctattctagcaccaggggcagtgtaacgaaggtcagactaggttctagtgaaggccatgctttcgtgaacgtaattggaggatggtcctcaatacttccttcagctctcaatgaaagcaccaaaatgtttcctaagatttttgaaaacaagataaaaataataagaactgaagaaacaataatcgataaagaaagtataataaaagacaaacactttcttacgtggttggggcattaatgagccttagtccacgaattagttttattcagcaatgtgttacttttaaatattctcaaatgtatacatcatatgtgatcgtatatttgcttgagaaaaagtacaccagagagttcaacccctaatcgatgagattggtgaagtatttatagtagttggagaattacaatagggtttcccctttttttgctactggggagtttacagctaaacaatatccatgggcttacttaggttgtccagtccatgaaggatacagtctactgactaggaaaatttgggttgagttgatcaggtcaaaaccacatccgatcataatgggagaatattcagaaataacttctctgtgattgttatgggaagtttcctctttaatctcgatatgagattatgtcgtgatttgacagctggtgtttccttgtttataggaaaaaacaaatagggaacctggaaggatcttttgggaatgatacatccttcccctctgggctcatgacaccagggctgtcttttgggcttgatctgtcaaaggtggaaggtactgcgagcatagaaccaagataactcccaaaaggagatatcaagatggacttggccccttttatcattgatgagggtcccattgatgggtctggatgttagattttatgccctaaataaaactctttacaatctgattagt

SEQ ID NO: 124524 - DNA, 1335 bp, Cannabis sativa
tttttatattacaatatatattatttttaaaaaatggtgagaattcggccgacactattaattgatacactttatattgtttttttcaactcacataattacactattttaattaaaaaaaataataaaatataataaaaaagtatttttaattaatagataaaaaaaaaaatattcatcaactgatccatctaaattattctatttttcatgtagtcaagtcttcatgttttcctttttttaaattcttcacatatcatgttttcatgtattgtcaattattgaatgtattttttactgtagttaacagtatcatttcgcaatgcatatgtgtgatgtgttacccattaaaaaatttaccacattcttaaaattttcacataacaacattttgtgggttcgtcattttttttttattttctctgctctcccttcgaactaggcatactgtccattactaagtttattatttatttttattattttttctcgtataatttatttttgtttaaaaatgaaaaagaagaatgaatgtgatttagaagaagagactggatcattttttttattattattttgttacaatttaagataagatgaatgagattctatctcaacatagaagagtagtccattcattttatatatgataatttatttccacacataacaatgtgggactaaatctaatacacacaccttcctcacgtttgggcctggaaagtgtaggtataacgaacgacctttaagaaaccataggactatcatcacatttcaaagaatcccacaaggccaaatatcgagaaattttttggtgtacatgtcgagatatttgtggatttttaaaacaggtcaaagaccccaacactaaaactggcacacattggccaaaaggtcccagatagaggtttaagaagagacagcggaagtatctttatggaccaacaacactttggctcacaacggatcacaaacagttttttggactagtgacattttaggctcacaacgaatcacaagtcgttctcataccaagttagaattttcgattacatgaataggatttcatctcaaaacgaatttgtaatgagagaaatagcttattcatcttatacatgacaatttatttccacacactagcaatgtgggacgaacattaataaattttaattaaaaataagtatgattttggaaaacaagaatgtgtttaaaaataaaatgaatgggttgttagaataaattgaatctcgaggtatatatgaacaaatcatatgaatgcataataactttttttttttattgaaaaactataaaatctcataatttaatatataa

SEQ ID NO: 124525 - DNA, 757 bp, Cannabis sativa
  modified_base (700)..(702): a, c, t, g, unknown or other
ttttttttttttttttgttctattggaatcaataataatttttataaatagttggagtttttttggtgttttatatgatatataatgaataatattatttataaattacatttttttaggggcccaaattttaaattagaacagggcctccaaaatatttaagacggccctgccgataaccaaatacattttactacattttacattgagacaataattaatatatactattaaaagagttttaaacatgaaaatatcattaaacaaaatataaactaacttaacattatttagtgatcataattattaattatagttgaaattaattatttattggactagaaactaaaaaataagcatttagatctaaagacaaatttatgcttgatatgctaatcatttactacacttattttcgagcactgttattaagtattagtagtgcttaacacttttagaggtggcacaccctacgataggtgagcgaaattctctaaagattataatatacaattatagaggactcgatacttaattgcaccaacaacgatataacacctaaaatatacttgctaagcaccagcaatatcttctaacagttttattgtttttcttatgagttatctaaattgccaatagaaatcataatgttatagtatatatatgatatatattattaatgggtaaatagcggcataannncccaaagttttaagtttgtaagtagcataatcctaatgtttatttttagcggcat

SEQ ID NO: 124526 - DNA, 600 bp, Cannabis sativa
aattgtaatgaggattcaacttacacattaattacaccttagttgtaaagtactaactaatgaggtgtaaaaaactaagtaattaagagtgtaaatggattaggttggatctgattcggttatgatctggtttaattcgaattatgtaatgatatgtcctgtcctgccccgttagatccagctacctggatcggattagatctgacttatcttttttggattgaactaattcgacctgatttattattttttttttaagaattttaattttatatcgaaacataattttgttttcctaaatctattttttaaaaactaataatgcattatttttttcttttatttgccaaaatcaatgaaaaggaaagagaatatcaaatttttaccacattaaaaatgtaattttactctaaaattaaaaaaaaattactaaaattttaaaatctattactaatattatcattaataatattaattaactattgaggttgtgaggactctgtcaaaattgagaaaaagaaaataaataaataaataataattaaggatgtggcacccacaatttttttattctttattaaattctctctctctctctct

SEQ ID NO: 124527 - DNA, 766 bp, Cannabis sativa
ttaattaatgttgagcaatgaaggccattaaaggttcaaacacagcttgtctggtattgttacccataacaaaatccatatgagcataattctccagatactgtactgccaacttgtccttgtcatgatctttaatagtctcaagtaaaacctccacatcttttacatctgaaagataatcattctttccatagctcatgaaaagaggaaaatcctttggaattttactcatgtcgtatgcaggaggagttgcctgattatattgcttcatattttccgaagtgttataatcgtactttcttattgttccagttctgatcactacgtaaataaataaataaaatatatatatatatgtatatataatgattaactagtagtgatggttttgatcgtacttactctgagaaagatgaaccaaattcttcatggaggttggctgaagttgatgttcaacataacgttctattgtcggtttatctatacagcaatttgggcctatttttattacaatttaattgggagaacaaaaatcattagtttattatttaataaataggggcaatatagaaaattattttaattaaaaaggagaaacttgaaattaacatttttaaaattaattaacctgataaagcagtctcataggagacgcagtcaatgccttgtaaactacatatatatcccaaaatggttgcaacttccttgctattaatgtgttttgaaaagaaaacatatcgttaatataaacattataattaatcat

SEQ ID NO: 124528 - DNA, 1789 bp, Cannabis sativa
cactggaaagctacttggagatgtagtcaaattcaacccaaatatcaccactaatgcaacttggtttagagaattagccttcaagagcatgaatggctcttatgcttatttgggtactaaatgggacaatggtcatgatctcttgctccttaaatcagccactattaataatgttaataaaggggttatcattttgggttttttggtgaaggaattggttgatgagtactatgatgaggttaatcttgttggtgggagtttgtatttgactaccaaagatggtcaaatgattgttaatgatgagattaaagggactcagttgaagtttaatgttgttatggatgatcatgatgacaataatggtaatagtaatgttttggtttcttttgaattggttaaaccaaatactcatattggaaatgttacttgtcatccttatattggtacttcatcaacaacaagagctactgttatcaacattcaaggagctagttacaacttttattgttcttcacttgatttgattggagttcaatctgtaagtacaatattaatattttgatagtactttattggtaatgaatgaaattataatcttatgctctattttgattcattttgggataaatgtactaataatctaactttgatgtctctttcttaattttgatcaggtttatgtattagcactcccacaaagtggattaatcaagtttattcataaacacattaagggacaactcattctcctcatatcaataatggttctaaccatattcctcattttctactttgttttgaaaaactttagagatgccatagtagagaactatttgagagcaactcttataaaacaaatggaggcaactaaactagctcaaaagaagaatgaagatcaaaatctagcttttgctagagctagccatgatattcgagctccgttggctggcattagtggtctcatagatttttcttataaggaagttgctcctggttctgatctcgaaacaaatttaagacacattgataagtgtactgatgatcttataggtaaatgtattcattcatatctttatctatttatctttctttactatctaaatgagagtgaatatagtaggattaaggtcgaccttgaaaattgatggagtaaggtaaattttgttttatctgcttgggtaaattcataggtaggtgagtttggatattattgggcttaattcacaaaatttcagaaaggataatattttgtttaataacaattgcatacatctgtataagatttttgagttctgagtttgggtgggtcctaagcacagatctaactcgccttagctcaagtccagacttaaatatactctacttgtagagtacaaagagcatcatgtgtaagatatctgatcattgatgaatggttaggatcgtaccctacatgtaaggtaccttaccacaactaatataggatgaagcccttaggaaacttatctctttgcatattataaacattttcattcactttttgcatttattgtgttgtaaaaatattgtattaagtattctattcatattgtgaaagagtaaattgcatcttaattctgcattttagcattggagtaattggtaaaaatagatgtttatgtctttatgttacattgcaaaatgacattttttctttgaataatattctgcaaaagactattttacaaatgattaaatgtttcttgtgtgacattactaaccattttcttatggcttttcaggtattgtgaacaccattcttgacacaagc

SEQ ID NO: 124529 - DNA, 628 bp, Cannabis sativa
gtgtgttatttatgttatatatgaaatttcatatttttcatattttgtgctcggcaaaattggaacgcggcatttggctgatagagtaaaattttcatatggtttagtatatatgtattagcgggacaatttagttagacattgagaatgtcgagaataattgaggtattatttttgactaaattacccataaggtgtaaggatgccttttggcttaggcaagggcaaaatggtctttttgccatttgattctttgtcctttagtgatttataattgaattagtaaatttaaaattaagttaatgaaatgttagataaacgttaggttttatctattttattcaaaaataggaaatttgaaaaaaaaaattaagctctctctttccaaaaccctctctttctcgaaccctttggaagccagcaaaaaactagggcttctcaatccattttcttggtgattctggcttattttgactaaatcctttagaacaaactcgaggtatgcttgctctctctttttcttttgaattttcatggtttaagctttcaattttcatgcaacttttgaggttaagttgctgtgtgtgtgaattgagtttggttgtaacgtccccgcttcaagcctcca

SEQ ID NO: 124530 - DNA, 1169 bp, Cannabis sativa
aaatctagatcctggtaaaaaaatccccaacaactggccttagagctatggtaatgatttactttgatgaaatatggatttaaaacaatgtttgggttcatttggatgtgtttatattggtttatatgcatacttgatgattgtatggatatcgcaatttataatgttaaatattctttgtttcattctgaaaatatttttcctggaaattagataaaaaattaataaatttaggcttttacagaacttaatttggatgttttatgaattaattagttatgattttttgaagttggaaatatctaggctagggtttctagcctacgcgcgcggatggctgggagctgctcgattaagaccgagttcaaacaacctcgtgtctgaagttactcggacctcccgtgtttgaagccacatttgactaaggttccttggtcaaataggctgcttgtagcctcctgtctcgcctattccccctcgtgtgcgcatgcagaggtaattcatacccctgtacccaaattttgtttttgtgatattttgactttcgaaaatcatttttcattgaaataaaattcatattttgatataattttgtgtagaatccaaattttcaaataaaatttaattatcagaataaaattaatttttattaattttaattaattaaaattagttttagatattagtagcctttaaaattaaaaatttaatttttccacaaagtagccttatggttcattttgaaatttttgattattttgtttattttaattataagattagatattacttaatttattattaaatttgaaatgatcttattttgacattaaaatattaataaaatttagaaataatctagttaaagttttaaatttgctaaccatatcatattttcaaaatttgttattttattaaattaaattataagatttgaaaatatattagttttgatattttatcttattaaatatttatttaattaaaattttattttttgtaaaataacatgaaattttaaaaaatttgttaattttggtttgaataaatattttagggtttctaaccgttaacttttcaaacttaggatattttgttttatttaattgttaaatagaattgataatatcctaaccatcaaatatcttattttttaaattgtttatttt

SEQ ID NO: 124531 - DNA, 755 bp, Cannabis sativa
  modified_base (27)..(29): a, c, t, g, unknown or other
actaatcagattgtaaagagttttatnnngggcataaaacccaacaggtatacaatgtaattttctccttaaaaaaactataagaaccccaataaactttaatgaaaaatcccaatagaatatttaagtgaggttaaataaaacttaaaaataaaaacgctaattatatcttcttactatctctcttgttcatagcaactgtgcagctacttatttcttcaaccaataaaaaaagcttgctaccttcttccttcgaattggtgctcctgccttccttctcgttgctcctcccttttcattgccttcctccaccttgttggttgttactgctaccttttccctcttctcatcacagaagaaaaaaaaaaaacttgctggttgctgcaaccttgtccgagttaggtgcttgttcaactcatcctaaatttctgcttactcctttctttgttccataggtaaacatttgaatatcatttatttttttttttaactcataatccatatatttagttgttcttaggatcattaggtgtcgattttttatttggttattaatttgttgtgtagataagaaaatgaatagaaaatccaaattgagtcatattggtgttagaggagctagtggtagtggtagtgttgatggtgataataataatagtatttgaaatagaaaagacctggcttggaagttgttgagttttgtgccctaaataaaatctatttcaatataatcagatttgctaattaataaaaaa

SEQ ID NO: 124532 - DNA, 1859 bp, Cannabis sativa
  modified_base (450)..(458): a, c, t, g, unknown or other
aaatggaagagcttttattttagtgattatattagtttactaaaatatcatttatatggagctaagtgttttaaggataaaatacattgagggtgaagcggtaagctagggcttaattttgaagaaaagagattctagggtttatttgttaattaacagactttattaagtctaattaataaacatgataaatggccattttatttgataattaattttaattattaaataaatttttttggcatttaaatggttgaattggaaaatatggcatttttgagaaaataagataaatagttgaaaaatggggaaaatacaaagtgggggcccacatccatggtcggccacttatgccctattttaccatttatttatcatttttttaatgccaaataattcaaacctaaacctagtgggattcctataaatggatagtgatggcctcaaatnnnnnnnnnatgcattcaagccttttagttaaaaattttgagccttctatctctttctctctcatttgaatccttcctctctctctctctctcttcaatatttcgaaccctatagtgatagagtaagttcccacacacatcaagttgtactcaatcattgggtgtaagactgtgaagaatcaaattccagagaaggtgaatcgagctccgaccttaatcgagctccgaccttggtgatattgtgctcttggtgatattgtgctacagaaaggatacaagggttagagatctgagctgaaggagtcatttaatttcactgcaccaatgtaaggtttctcaaactttatatgtttttaaattacatgtaatagaaattcatatttcggatgttaaaaatattggttaaaatctaaatcctggtaaaatataatccaacaagcttgaggtctcgtgagctttgagtttcaaaaagcttttgagatattttctaaggattaagaaaatcaaaataagaggaagtgacatacttatatatgttgtgaaaattatttttcccccaaaaaaacttaattgagagttaatgccacaaaaatagccatgcatgggaaagagaaggtcaagagtttaaacatgggaaagtgaacatccgtcacacgatttcccacattgattgacataaagtagataaatgtcgtaaaatcacatcagctgaagagaccaatatcttgccctgcatatctgcacggcaaagggcgtcacaataccaggcagggtgtaaagtccctacttgaatagactttcaaacaaggacttgagggccaaatattatcccaatgtttcccacctatgtggcacctccacgtggctaaaagcaaaagacacatgagagaggtcagtaataactatccaggttagtgccatgcagcccccctaacccttgagatttcagggttgcaagataaataagaagagtatggagacttacaggatccacatcttcaaggttctaaagcaagttcatccttatatcagaatcttcagcaaagatagagatacacaagcataggcaagaccctggccggacctctagctagctggccaaggaagacagtcgtgtaccgggcaacctctaaatatggctagccggccaaacacacatactacgctctaaaagttgtgtttttcccataagccttccagaaaattccaaatcgtccacaacacacctacaacttcaagacgacttgaactacctacaaaagtaggaaagctccgtcagagtgtaactgccttattttctaggaatattttctatctattatgtatattgaataatgacttgtaaaatcctaacttgatgggctttgtgacttaaataaaacccatctcaatataatcaaatttactaat

SEQ ID NO: 124533 - DNA, 1160 bp, Cannabis sativa
aagatcagatactgtcccccatgtcaaatcacggtagtgcgcgcaccaccatacactccttttgtccgaagacttccctgacatctttgtcgggtaggcatgatccctatgcagcatgtgtcctgcaccaaatggtcccctcctcagtgcggaaccattgtcccacgagctagatattcttagtgggtctcataggcatgtatttgtatattttattcaattagtgggctcgcttttacagtaaaacctgaatggatcacgagtatacctaaacttgaattctagcctatataaaccctactaccccttcatgcaagggggacataattttagtagaagctctgttggttttattctaaattaactttcttcttctccaagagaaatctagagaaaccaccttatagcaagggttagagttccttattgtaaaactcatttgtaatacatttcaaagcctaaaaggctaatacaccaactcgtggattagggataattaacgctcgaaccacgtaaaaattctctctcttatatttaatcattatataatttcttaaagtttttacttatttagtttccaaaaatcttaataaacaaaaataaaaattaattttgctagcaaatttcaaaagatggtaatggccgctgcgctagcaagcctaacttatcatatatggagggatcgaaatgaaataatttggcaaggaaaacagtagatagtgacacaaatggctgggaggatcaaggagacagtgaagttgagaattaatctaatctggcctaagaaagttagttcaaaagatgtccaatggtttaataatctgtaaatgtatatagcatagggcttgataattggccaatttgattgtacgaaaacagttaagtagcaataaaaattcatcttattcataaaaaaaaaaaaaaaaattggtttttagaaatttgtatagatggttgtaaatagtggcaggggtttttgtacgattgtttattgattttttcttgtaatacggtgtttgtaaattgtaaatttgattgattgagcaatacaaatgatcttattcattaaaaaagggaaatttgaaattctatgcttaaaataccatctaatttttcccctaaatgcatagttattaaaattggtcctatatgacaacttt

SEQ ID NO: 124534 - DNA, 686 bp, Cannabis sativa
acaatctcaatagttcagggggaatttttaacggctaaaaaagttcaaggggcatgatttggtatatgtcaaagttcaggaggaaaaattactaatttgtcttttttaaattatgaaaaatacattaaagatataatatttaaagatgaaaagcaaaactttgtaaataatactctttccaaacagtctttaatattctttcaataattttatacccacaaattactgtaattatcataaaccacacaataatgtgagttttatagctcacaacatattaacttttatatgggtttttttttcgtaaatatggaaaaatatggtaaaatttacttctatatggtataaataaataatgtaacaaaatatgggattaaaaaataattaaagtacaaaaaatgaaaaaaaaaataataaataaattcaataaaacttgtaataatatattttgtcagaaaagtcattagaaaatttgttggtgtcggaaaagtcaatagaaaagtcattggtatccaaaaagtcatcggaaaagtcatagtcaccgaaaagtcactggaaaagtcaccaaaagtacatgtctcaaatataaataaaaatagaactcgctcaataacataatgaataaaaacaaataactcaaacatgttataattgaaatataatcggttctgtaacataatgaataa

SEQ ID NO: 124535 - DNA, 786 bp, Cannabis sativa
gagtcttagtctgagtctgggtacaagtttatgggaacccaatctgggcctagtctgggtgccaggttcgggtttggatcagagtctgcatctgcatgtgggtcgaagtcctgtgtttcgatcttggttcgagtcttggtcagtattcgagtctaggtctgggttcgtgtccatgtccgggtctgaatccctattttggtcagcggcttggtctcggtccaggatcgagtcccgagttcgggttcaggttcaggttcgagtctcactcctagtctgggttcgggactaggtcaaggaccaagtccgagccctagttttggggttaagttctgctctagttctgggtctcggtccaggtcttggtcctggtcacggtcctagtgctgttccagggtctcaatcccaattctaggtcccgagtcgtgttccattttcgggttaaagttcatgtctgagttacggtcccaggtctcagtttgggtttggagtcaagtttgggacccaatcttagggtgggtctgtgtccgagtctgggtcctggtccggttacagctttgggactgggtccaagtctttgtcctggtccttttcctgggtctcgatctgcttttggttcaagttttaagtcacgggatacgcgttcgggtcgagtttgggttcgagtctgggtttaggtccttatttgggtctggggcgaggtctaggttcgattttctgtctcaattagggtctgaggttgggtccgatttcgggttcgggtccaagtccaagtctggtcccattcct

SEQ ID NO: 124536 - DNA, 597 bp, Cannabis sativa
  modified_base (26)..(30): a, c, t, g, unknown or other
  modified_base (57)..(71): a, c, t, g, unknown or other
  modified_base (539)..(543): a, c, t, g, unknown or other
acaatctcaatagttcagggggaatnnnnnacggccaaaaaagttcaggggcatgannnnnnnnnnnnnnnagttcggggggaaaaattgctaattagcctttcatttataaccggtttgaattatttatttttatttattatgttatagaatcggttctatttttgttgtttatatctgaggcatttacttctggtaacttttctagtgattttttcagcgacggtaacttttctggcgacactacctttttcggcaacttttccgccgatttttctggcgtcggtgactttcccaacgacttttccgttaaaccttattattacaagttttatcaaatttgtttatgttttttttccatatttaaaacttcacttattttttaatcccatattttattgcattatttatttataccataaaaaagtaaactctactatatttttccatatttatgaaaaaactccaaataaatttttctgtcccaaaatgaatcacgttgctaacccaataataattgggaaatttacatggtatannnnnttttgtcatttttttacaaaaattctgtcagacgttattttttacttttttact

SEQ ID NO: 124537 - DNA, 1630 bp, Cannabis sativa
  modified_base (731)..(733): a, c, t, g, unknown or other
gaatcgagctctcaaattcgaggagcagctcaaacggagacgtagccaatttattggtgaacttcgggaaaaatctggtgttttctaacttaaatctttcttattttttgtgtgtgtgtgagggtgtttcgatcagatcattgtagatatgatcttgttgttggatttgtgtttggatttctgggtttgagggtttgagtttctcagagagaaactctctgctagggttttgagcctttcagagagtgagggagtgaatgagaaggttctcgaacccttctttggttttgttcaaagaaaaaatgaagccgttttggggcctgactttgaaaagtcaaagtgaacagagaaaggtctaaattgaccttggaaattgatttgtttgttttgttggtgtagggacaggatagtaaaatactatattaaatttcctacatgtatattccaataaattataattcaaaaatagttttgaagtttcttatttaacacgcgtggtatactgaaatatcaagaattctattgtcgcaatattgtaactgttcgaaattttttaaagatttacagagttgatattgtaactataatatcactacaaaaaactgctacttttagtcacaacaaaataaaacttgtgactaaaatatagtttttggttacaagttgtcactaatttagttttagttacaacaaatactgtgactaaacatacatttagtcacaacaaattnnnatttttgtgactaatacttttaaccacgaactttttaatcacaatataggaatgataatttataattagtcacaattttcttaattttagtcacaaattttattgtgactaaaagtaagattatttatacaaatattgctatatgaaaataaatattttagcacgtatttttagatgcaaaaattaattaattgttaaagtagaaaattgactataacaatccaatacaaattattgttaccaatttagtgattattataaaattcatgaggaatatttgtattgatttatttgttttggtttgaaaattttaacacaaaataagttaaaaacgtacccattgaaggagacacttgttcaattcttcttcgtattaaaaactaaaagccatgcatgcacacgacacacgtacgattgtactgtaagggtaacattctatatatatagaggttgtccaacctaaaatagttgattattaaatttccctaagtactatactttcagtatttatgcatgataactttataattagaccaactaattaaaattaagaatgatttaagaacgaaataataaaatagcataaaagtaaacaaataaacacacaaatataacctagagcattgatttttctaacctaaaatataaatctcaatttaccaattatcttataatttattcaataatttgtaatttcaagaacatgtaatctattaattaacctctcttgagctagctagaagtgatagaattaactaattaactaataagatatctcttgttaaacaataaaatattttctatgctatttccttgtatcttttcttactttatttgtgtaggtgacatgtgtcccttaatgggtctttactttactatatatttgcttgtactgtg

SEQ ID NO: 124538 - DNA, 1605 bp, Cannabis sativa
tgagatatttcaaggaaaaagatccctcttccatcttcataatattaagcaactgagatttaatgtttgtaggaattctgccaaaataaatagcatatttggacttattggctgccaaacctgtgacattacagaattcaataaaagcattgtgaatgatgctaaaagaggatatattacccttgcaaaatattaccaaatcgtcggcaaagcaaatatttaaaagcttcaaggacttgcacatggaatgaaaactaaaacttttagtgttcgagacatgaatgagcaaacaggtgagatactctatcataaggacaaagagaagcaaggaaatggggtccctttgtttgagtcatttcttcccttgaaaagaaccatgaaatctaccatttaacattaacgagtaagaagtgccacaaagacaaaccataatccaattaataattttggaagggaaaaattgtaatgaccgcttaactttaatataagaattagtagataactaggatttaatttagaattagacttttaattacgatttacgtaattatggagacacattagaattttaagtgtgctatttatgttatatgtgaaatttcatttttttttatattttatgtccgttaacagtggaacgcaacgttgggccgatatagtcactttttattatggtttagtattttagaaacagcggagtaaatttaaatagactttgaggatgtcaggtctatttgtggttttagatttgactaaaatgcccttaggtggcaagattaattcatggttaagcaagggtaaagtagtctttcgccttgtgatgacctttgtcttttagggaactagtagattaatactaaggaataatctgattttattaggtatgatattaataaaacaagaattattcacttttacaaaaattagaaaaaactaaactcattctctctccaagcctctctctcgatccatttagaaacccagcagaaaactagggttttcaacccaaattcttagtgtgttagctggatttggtagcatcttaagatccaactcaaggtaagcaagctccctccctctttcctttgaatttttatggttttaagcttaagtttccatgcaattttaaggttagggttctgtaggtttgaaatatgtttgaatctgttttcagaggttattttgaggatatttgagctagtttatgtttagttaggggcttgttgtgaggtttggacaaagtttaagcttaagagctcaaactttgccctatcatggtgattttgatttttggggtttgtacctagttttattgctggaattgtacttgttatggtctatataggtactttggaaggtttgggagcatttggggtcgatttgagttgtttagaaggtttttgggggttcctgtactgaaccagtcaaccggttcagttcattttggtcctgtagaatcggtctatcggttcctccctgggtagaccctacagaaccattttttcacttgggaactggtctaccaatgggggcaatttagggtaaactagattttcatgtttttatgatatttagggtattgccatgttatccatcgataggaaa

SEQ ID NO: 124539 - DNA, 5122 bp, Cannabis sativa
  modified_base (388)..(391): a, c, t, g, unknown or other
  modified_base (732)..(744): a, c, t, g, unknown or other
  modified_base (5093)..(5096): a, c, t, g, unknown or other
atcaaacaatagtttgaaattctcctcaaaattctaaaattgttcgaacctagttgaacaataattatttttattagttattatggtagcaatagtaaaacataattttaaataaagcatcatgaaagtatgcatacctagttttaaatgatgaaataacttgatcgattatataaagaaaatagtaaattttaaatgactctactgctgattgtgtcacctcctcattgacaatttcatcaaacttatttttcctgtaaactttttgttttttttaataaacacaggtttaagttccatcatacttgcaatctcagtagcttcagtcaaagccttctcaaaaccagtttctctatacttttgaagaaataaaagtagaatctttaannnnttgatggcaacatcaatttgcatatcttcactttacaggatcttgctagcagtattaacaacaaataacaaattatgcgaaataagcatgctcactaagaactcaaaattctgaatattatagattgctaaagtctcagcatcactttttatgttggcatcttcattgctttttgccaagtaatttaaaacttcttttagtgtggagcttggaatcttattgtcaacgcagattttcgttaactaaattaaagcctatttcgtgatggatttgcacaaaaataatagtagtaaaaggaaaagaaataacaccaagctttttttatgtggttttgcagttannnnnnnnnnnnntccacgagtctatcttattaggattctgataccaaactagggctttttctctaaaggttttttcatccctttattagtgtatctcgctcctatttatagttacacgagttaattacaatcagattgatctcccacataattatcccctgaaattatgggatttgattacatcccacataaattaaatgcggttattatttgaaaatcacacagctgtgatttatccatttttaccgggtcaatgttgacatggatttaaacacgctccaaagtgtatctcgcagagttatctcactagggtagcaacaataaccctgatagcgagctgaagcttttcccatgtcttcccgagattgatgatgtaaataccgtcatttctgctattgaagacataacactccatttgacaatcgcagttcttggcgacaagataaacttcagtagtcaacatcatttgaatgtcagcttttatctgagagagctgactcgacagagcagtgaatctcattgaaagatgtttaaagctggttagtgaaggcaccatgagtatgccgttttatagcgagatggatgcctcgctattcgttgttcaagttcattcaattgttatgcgtagtttgtataatgcatattatacgttacatgttttaacagtcaccatgtctcgtatacatctcttcatacgtagcgaggttggtgccttattttgtattactgatgtcgtccttatgttcatgtcttcatatactaaatggtttctcgtcaatatgtgaattaatagtttgtacatctgtgtctcgctcaagactttacagtcaacgagttatagatatactctaccagttcagcatttaatgagttattccattttaatatcctctaatataattaacattatattcattgattcatattctcccaggttgacacgtgtccttctctgaagtggtagccaaattttgggtataacaattgccccttaaaaagtgctttttaaatgattataaagggtatatttgtcataatcccttttgaaaaaatgcatgtcctctgatttcagcaattttatggtttcaaggtacatcagcatttaatgaccatcctttccacttctttttcaaattctacccgttggatcaattgtgtccctgatctaacggagattaacccaagagtatgaaatagaaaaaggaacaacctttgcattacctttgccattttagaaactctaagaatttttcaagcttttctgcagaaaaaaccattcccagatttgcccaaaaccttgcatgacatcattgtcattaaactttttcctacaagtttcatctgatttaatttttgacttcaagcatttggagggatcttcacgctattcgctgtttcacagattgtagagccgctcatcgtcccaaaaaccaactccaaataataagtgattttacttcttattttcttacatgcttttaatgttgtgttctataggtttgcctactaattccttagttagcatctttgttatttgattttagtgattttagggctaattgtatctgggtaaatgttaggttttagacagaacatagattttcgagattttccaatttaccaacttctggtttgataaatttcttccaagaattgggattactttctccttgcagcaatgtcccaatttggtttagaagtttatcgtcaagaagatctagaaatagagtatcctattgaacctgccatcccatacaaacctaaaatttcaagacctaaatccaaattagagataaatgatgcaaaaattagggaacacttagtgaaaacccatcaagaagatatttctagtcgccatagacgcttcttgcaagaaattatagaaggcagacgccgtttcttgcaagatgctgtttggcttgaacctctcagtttgtcttctattcctttggcgaagcctttgtttttacccgtggtgacaattgcttttgaacaaggtgacttggactttgaaatttgtcttccaagccacgtaaatcaaagactccccaggaccctaacgtcaccttcgaggctgagctaatagagtcaaaggtgcgagccatcagagattatgtaggtaataccctaagggcttgtggggttgaatataggcgagactgccaggttagatcagtacgtgctggcgagttcaattgctatccaccagtgcgacttacacgcgaaacctctaaggaggccagtggtgagaccagtataagtggctcgactaggataggcacttggagcctcgaacacatcagggctggagtaataatccccctgtgagactatttcaaggacttcctaaaccacctcgggcttgccccattacaactgaatcctatttcatatagaatccttgcaagtttgagggttttatacaaaatcttgaattgggagtgcccactctcttggaaatagagtatctctactctgttaaggctgttccagcgaggataaatgcaacaggaggtttttactatcttgggactcacacacgcgatcgcaagatcattgtggattttccaaataaaacttccttcaaggatgaattcttttggacgaccggtctctcccccatcagtataaccacttttcgcattatacataagtgattatttgcacaagtctcggttaaattagtccatgccttttattaaggtttagctgattgtaattctactttgtttttgacaactgtctcgaaaagacctgcccctactcctaagatggttgagcgacacaggcttttgttgactctcccatacggtcttaggtcatgtgactttcttttaaataaggtaaacttgaggtctatggatctcctaactgacaagaagtttacttgtgattataaatatcccaagtattcttcctggcaataggttcatgtcccagatgaggagaaagctcaagattgcgtggctcgggcacaatacctccaaaacactacttctcgggaagctgaagaaggagcatcccgaggtaatcaatttggtcggtcacccacaatccttagggctgaacgtaatactctagtttcattttgagatagctgctataacttttacacttcgaatcccctcctcatagatcgtattacacataggtttgatagttggtatcccaggttccacgtcaaaattaactgtactgagtcgtaatacgggatagtcgagcagtatgggactatgacagataggcaagtcatttggacgcgagctgcgatttagaaccaattaatccatataatatattcaggatcacaggttgtagggattttagtggatattatagcccctctacctcgtcttctagtgattatggtaaattccttagacaggaaattatgccccaatctccccttttacttgtctttcaattaatatgcttaacacctttttttgtctcgtagaaatgaattttgagcgtctcgtccacaagaagggaaaaaagaggctgaccatctcggaggtcccatcagacgcagaagtggagcccctaaagaggtccaagaagagtacgactaacaagaagcgactaattttgaggttcttgagactgagaattaagatccaatccccctccggcccccgcaaggaccgatgaccctattcctaatgtgacccaagcctctgcctccttgacccaagccctcgaaactttacctatcgaggctggaaaaactggcccggagtacactacagagtttggtgtgcaatatgctgccatcacttcaaatcctttcctcccccatgaatgggatttaatcaatcatggggatctgagggaaatgcttacaaggagtttgtctcacagtcttttggtaaatttccttatccttatttgctcacttcttttttttaaaaaaaaaaaaaatacttatgtatttttgttggttggtttccagacatctttgatttcttttgtcgcccagcagggaggcatggacaagatcaagtatctagagggtgtgatccaaaacttgataggccagcgcaaggttgtgactaagcagtggaatgatgctcaactggagattactcgccttactaaagatgccaaaaagatgaagaagaaccttgagaccaagcttgaagctaccgagaaagaggcaaaggacaagaccgatgatgccagaaactcaaaggggaacttgatgcagctaagaaaatgcttgatgggaaagaggttaaaaaccattgaatgatgcaacgttgttgaccttcgtaccatttataaagcttagatggaaaattcaaagatgaatacgagtttattggaagattctgaggaggaaattgttgggttttatgccnnnnataaaactctttacaatctgattagt

SEQ ID NO: 124540 - DNA, 1716 bp, Cannabis sativa
ggtttattggttttgtaatgaaaattgtcccataaattgcattgtttagtttacatacatgatggggaaaattaggatgaaggtcccatggtggttgagtcatgtatacagtttcattaaggtctctatttaaaatgcatcattgatatcaatctgatgtatatcccaatcatatgtcgcaacaagagtaaagataagcctgatggtacatggtttaacaactggactaaacgttttaaaatagtcaaaacttggagtttgttgaaagccttttgccactaatcgagtcttaattttgtccatagtcccatctaagttgtacttgattcgataaacccatttgtttgtgataacacacatgccatccatgtaaggaaccaaagaccaggtgttattttttgtaagagcatcaaactgagtatccatagctcttttccatttaagagtagcaagagcttatttgattgtagatggttctaattcaataatagattgagcaatataagtcttggttttgtaaatacctgttttggaccttgtgaccataaggtgattattgtgaatagctagggttgagacaaggcaagagaagactcagggacaggaaccaataatgaatgaccatatgaaggggaaatatgggtgatgacagaatgatgagaaataggaggagtgactgaaggaatgaagggagcaggactttgtgaggaagaagcaatactaagcctgagatcatggggactagttggaggacttggaggcagtaaagagggtgagataccaataggaagagactgtggaaaagaataggtattaagattaatgacaatagtgggttgagaagcagacagagaattggaaggaaagttgttgtatgggaattcttcttcattaaaggtgacacttcttgctacataaatcctaccagtggggtgcaagcatctatagcctttttgagatatattatagccatgaagacacacttagctgatctaaatgagacgtaatgagtgttgtaaggcctaagtaaaagaaaacatgagcagccaaatattttcatcatactgtaatctggtttgaggtgaaataatttctcaaaaggagacataaaatttagagtaggagtagggagcctagtaatgagatagatagttgaggcaaaagcttgtaattttcatcatattgtaatctggttggacctattttcaacccgcccaattaacagattaggcagtttgtaattttttcgagttatttcgatttgtaatttttatcgttttatttagtttaatttgggcgggttattcgatttgagcagtttacgaattttttttgtacaactctattgttttcttgttgtttatatgttgattgttttttgtttttatgttatttttttataggactttgtcaaattgtaattaaaaaaagggaaatcactctatgcacagtattttttagtttattttttgtttttacgtgatttattatgttagtttatttatatatattcatttttctagttttacgttaataattatttgtacattttatttatacggtttctttatctaagcatgcattttttttattcttgttaattatctttcctttctacaaagttttaatacatggatcaaattttgattaattagaacatataatatttttttattgactatttttttaaataattaaaaaaatagactaactaat

SEQ ID NO: 124541 - DNA, 1122 bp, Cannabis sativa
ataaatgtacaactaacatacttgagcaatagattaaaaataaaacaaacacaaacttccaactccaaatttcaatgtatgggcttgggtttgctgctaagaagagacggtttgtgaagagttatagattttgccctaagatttatgggcttgggttgggctcatatgtatgggcttaattaaataaatataaaaaattaaaatttaaaagatgtggtgcggtgtcgtttgaatcgcggtttaataattcaaaaccgcaaaccacaccgcaccgcgcggtttgggaaaaattcaaaccgcaaccgcactgcgaagaatttcaaaccacattttttttgcggtgcgggcggtttgagcgatttgagcggtttgatgtacacccctacaatgagaaaatgataaactaaggagagatttcattaggaacataagatatttcattaagcacagtaccaaactcattataacgaatatcatgaccattgaccgttaagaccaaacgaaggcaatcaaaaaaagcagtaatatttttgaagcccaaccgaaggtaaaagaaaagaccatgaaacaacaacatcgcctcgacaacatggggctcgaaagggccagacaaagaaaacacaccagaaaacaacattacctcgttagagtccaaagcaaccattcccgttcccattttcaaatcctcaacacaaaatccagcatcaacaaaaagattaacatcacccaatgccaactctccaatggtgacagaagtagctatcggctccaaataagtagatggtttaccaatgctcgaagaaccaccactttaagcgtcttgatagatccacagataattaatggcctaagaactaaccatattatctagaactaatggctatgaacaaaaatattgtgcttatactaaatacaccaataaagagatataaactcccctaattcctattaattcaaaatatacatacaactcaataggaattcatagaagcaagaagcatcttttaaggaatcaagacctttaacaactcactcagaacgattttttttttttttgatgaaatttcaacttcattaaatcaactttctgagtacaaaatgtctagaatagaaactggagca

SEQ ID NO: 124542 - DNA, 1459 bp, Cannabis sativa
  modified_base (1412)..(1412): a, c, t, g, unknown or other
tgcgcgcagcttgaacacagtgtttggttcgacaatctctcgtatctactccgttaacccacaactccttcaactcatccaccaagggtcttaaaaatacatctatgtccatacccggtgatttttctttaggaataagaatggtcaacataaaattattatctttcatacataaccaaggtggaagattatagttcgccaaaactacaggccacttactatacgcttggctcatgttgccagatagattaaagccatcagcagctaaacctaaatgaacatttcgaggttcactagcaaaatcaggatgtttggcatcaaagtccttccacactacaccatgcatagggtgtcgcatcaccccatcatcttttgatttaccagtgtggtgccataccatgtattttgccatatgccttgaattatgtagtctcttcaatcacggagttaacggaaagtaatgcatccccttatgaggtaccttttttgctcctgaattttttgaagttatccacctactactgccacaaaactggacatgaatctttattttcatgttcagtgtaaaataaacaacaattatactttcacacatgaattgactcgtaccccaaccctaatttcttcaatcttttcttagcatcatagtagtttgacgaaattttattttactttgaaaaagctagttttaacaacttcaataattcatctaatatattgttaggaatctttcctctaactttcaaatgcaataactttgccaaaaatttaagagaagatatccaatcacaacaaagatacaactcgacctcaatctcctcaaataactcgtcgtgccattgatttgcattaggattatcatctatttcaattgacggttgaagaaagtcatccaccatcggaatcatctcatcaactttatggtcatcatcaacatcatcatggtcagtaactataatagtagcacttgattctgcttcaccgtggtaagtccacttctcgtaaccagtaaaaaacccaatcgaatgtgtgtgcttttacaataggtaaagtttgccgcctattgttcacgcatcttatacacgggcacctaattctaccatcacaatccttacattttgaggccatctctaaaaatacatttagaccattctaaaattgtggacatctacgatttcgcaatgtggtccaagacttgtcgattgccatctaaagttttataaaaacatataagattttattgtataaagacaaaagtgaatgacacaattttataatatcttaagttaaaatattttatgccatttaatgatattttttttaaaaaaaaatcatgtactgttatttattttaaaaataattatttatcatttaaaagttattatattatttgttgaccgaggttttcggcnaccaataaaatattataagattagagagctgtaagaaaattagagaa

SEQ ID NO: 124543 - DNA, 1033 bp, Cannabis sativa
  modified_base (951)..(953): a, c, t, g, unknown or other
accctatttatttatttttataaaaataatttcttttaacaaagcaatttaaaatactacatataataaatttaaatttcttaataaatattttcaaataataattaataaaattgtgtatttagtttttaataaataaaattattaataataatatgaaataagatagtgtatttataattttattatatattagaattgtatttttaagtaattatttattataatactaaaaaaattaaattagtcgcgcgaagagtggctatattacctagttgattatataactgttacggaacaatacctaaataaataaaaagtatttttttttttcgcaaaacatttctaaaatgtatttcactagatcctatttttattttgatattgatagccaataaaagtttagttagctttgttggttagcatttcttttgtgtcataacttgtaacgatttctattatgtattgattgtagaatcagtgacggatccaagatttaagttgaggggacactttttttttttataagtgaatttgtctttttttttctacattgcataacatgttaaaaattaatgcaaatttatattttagtattaaatatagtataaagtaaaaaaaaaaagtaacaataaaaatattaggttcaataattaacatattactttataccaaagcttattttatgtttatagatattacttttatttataaatatatgttgtaattaactaaaatgcatatatatttttttccgatttttttttcagggtgggcgactgccccacctcgcctctatatgggtccgcccctgtgtacaatcactataaacaaaatctttcctcgtcataatttttgaggctttccttttcatttctttctttttctcttcttgcactttgttttgagttactctttcatggtatctaataggggtgttcatcaaaccgnnnaaaccgcccgcaccgcaccacactgcaaaaaaatacggtttgaaattctttgcggggcggtcgcgatttgaatttttcct

SEQ ID NO: 124544 - DNA, 733 bp, Cannabis sativa
tgtagtaatatttccaatttggataatataagtagaaatttgaataatagagtactttttgttttattttaatattttattatagataattttcgacataagaaaaatacggttttaaatgttagtattgcatatatataaatatgtactataaaaattttatttgatactaaattaaaatttggcccccctagcatttaagtcctagctccgcccctgcacataagtaatttatattggcacttacaccttaaatttattagcagatatcagtagtttagaggttttactactaaaatttataagttaaagagagaagttgaagaatatctttttttttatatatatatacattattaaatttacatttaaataaaatttaattcaaatatatctctttttatgagtattgtattcatattatttcaagcataatagatttgtattctttgtagattgatgcataggtttgtggaaaagttagaatagggtaaattttaattagaaaagaccgaaaactatcgtaaaataataaggataaaattggtagaatgatttaaaacaaaataaacatgaaagatttaaaaaaaaaagaataaaaattaaaaacaacaatgtagtataatgtacaagtaaaataataatttcagaaggaaaatttgattttctatacttaaaaaaccttaatattttattcttaaaccaatacattttaaattaaaaaaaatatgac

SEQ ID NO: 124545 - DNA, 1151 bp, Cannabis sativa
  modified_base (1043)..(1052): a, c, t, g, unknown or other
  modified_base (1103)..(1106): a, c, t, g, unknown or other
agggcataaaacccaacatgtcccggtgtggataagattgaatggattggcattgcaatattgggagaagaaaaatcttagtgttatggtgagcacaattagaaggaagatcatggtagacaaggtcacttcttctatatcaatggtgaaatatgctagaattttggtggatatggagatctcgaatcatcctccaaaatctattacgttcattaatgaaaggaagcaactagttgaacaatcaattgagtatgaatggctcccctcttagtgttcagcttggtcatattgtagctaactgtaatatggagaaaggattgacttggaagaagaaaactaatgctgctaaagtggagaaacaagtccaaaaacttgttgacggtgattctggtgcaacaagtatattagaaagaacaaatgttaggaagaagaatggaacgagccctgtccctgatcattatccatccctaaactaggagattgttactacttcatctactgcttctttgatccagaaggtcaacgatagagactggatcactccaaaaaaaagaggattgaaacagcctaacatagacactactaagttggtgttgcctgaaaaacttgaactatggatatgcagtgctgcaggaagcagatgatgggtgtacggttacaaactctgtgccaaagtctgatggaagtatgtaatatgatagggtggaacgtgagaggtataactagaagagataagcaagctgctattcttgaagtttgtaaggtgaataaggttggctttgttgctttctttgagacaaaggtcaaacatgaaaagactctggatatgattgagaataatttccctaactgggagttcaattctagtgctgccacttctggcagaattcttattttatggcaatctaaatttgtaaaggttgaagtcctgttagaagatccttaattagttcagtgtaagatcaaagttaatggccaaaaggaggctttctttgctaaaatggtttatgggagtaccaatatgttggaatatgttttaccannnnnnnnnnttactaccatgtatgttatttaaaatcctaaatatgaatctctaaaacaannnnaataaacacatataaagttttagaaaccttacagtgggtgtagcg

SEQ ID NO: 124546 - DNA, 1131 bp, Cannabis sativa
  modified_base (27)..(56): a, c, t, g, unknown or other
tctaattttacccattcatgggtaatnnnnnnnnnnnnnnnnnnnnnnnnnnnnnntatatatatatattaaattttaatcacctattatagtattaatggtcgcatgaagcgacatggtacatgcgataaattagaacttacaaaaatattataaaatgagggaaagttaataaaaataactgtgacatcgaattaaaacaaaaatataattacaaagcaactaaaaataacaaaatattgacctaattccaataactaaactaatatcaacttcctaatatatttttgtacgaatttatttttacttagttcttacaacttgatttatctttttgtactattatattattattttttcatgaaatttgttgttataactttattctttcaatttttttcctcttttcttttttgagttagtgatagttaaaaaagatatctatcaactgaaaaaataactaaaaagtaacataaaaaaacataacaaaagcacatatatagaataaaaacaatgtctagaataaactgaaaatgtacacgataaaaaatacacataaattaaacaacagctgtacaaaaaatacataaaaataacagaaaaataactataaaacaactataaaacacataaacaacaacataaaacaaatctaaaataactttaaaataacaaaaaagacaactataaatcataaaaaaaataacaagacatcaatctttttataaaatatacaaatcattcataaattaactctgaataaactacaaaatatccacaaaaaatatatattacttttattaagcatgtaaaagataaaaaaaattatagaagtgctcttaattttttattatatagataaagaatgtgaaaaaataagatataaacatgtatatacttattatatatatttttatatatacagagataaaaaaaaaaagtttagtttgacaataaaaatgagagagagggagagagagagagttggaaaaaaacataaaaaaaaaagagaaatagagagagaaaagaaagaaagggactcacttaaaaaaagtcaaccaacggcctggggggccagctagggatctcaggcttaacaacacccccaattggtcagcctctggctggcta

SEQ ID NO: 124547 - DNA, 1501 bp, Cannabis sativa
  modified_base (1430)..(1432): a, c, t, g, unknown or other
cacgaatttctcataaaaccaagatttctgttatataggcacactttatatagaatagagatatatatattttttttttaatttattgtttgccattatggtttctcggtttaggttgctggcttagttactataggagtttttgtgtgtaattttgtaaaaataataaaataaaaaatttattttgaattgtaaaaatgaaaaacccttataatttaaaatagaaatattattgataatttttattatatacttagatgaagttagtataataatgaaggtatatttaatttatttttataatatatacacgtttttttatttgagttttaaatttgtctcattccatgtaaatatattcaaactctccctttatataagcaacactatttttgtaactaaagcagataaaaaatgtgtgatcataagtagaaacttaaaaagtaaagaaagtgtagggttttttcaccaaaaatgacaatagaggagtttggagttcatttgcactataactccttcaagtcctttttatatcaaaacttacaaagtatataactaaaatgttatagaaaattatcattttagcaaaattatttggaaatttacttttcacttttttactattttcacttagtgatagtgaaaagtcattgacttaccctacgtagacttatcctacttaatgatcataacttttataagaataactttttttttttttttttgataaaggagaaacttagaaatactaaaaatgtattgattaacatgtttcaacaaaacactaaaaagaaaaatgccagagctatataaggaatttagataaataataagtacatataaacttatagaagacttattataaagaaaaaaatttacaagttattgacttatatattattaacgtagattttcgttaaccaaaattaaatagcctttcagtaacaaatattctacaaaaattgataaataataaaagatataataattcaaaatatttttacgtagttttgtagttaaaatctacatactctacgagtcattcttattaagaatctttttagagtaagaatacaatattttttttataattacaaaatacaatatctatattgaataataatgattctttctgaaatatactgtcccatttctcgtggaatctgtccatatttataggagtacaggtttgcagttattctttttgggatagatttaaatataaatgtaaatgaaacgtggacaatcctcacgttttatttaaatttaactacccaaccgttctttagttttatcctttagatggttattgctgacgtggaaggttacatcttttctgattcgagttatcttccttatccctcttgacaagaaaaaacactaagtcttgggaaactttccatctcgctattgttgggttttatgccctnnntaaaactcatttcaatataatgagatttacttattaatatagatcggaaataacatttaatgttgcatg

SEQ ID NO: 124548 - DNA, 655 bp, Cannabis sativa
caagtgcttcggaatattattggcaatgatgaagggatgatatacaacttgaaggaactaaaagaggaggaagctcttcaactcttttgtttgcatgccttcaaaagtaaatcacccaaagaaagttacgaagatctttcgtcgatgtttgtgaaatatgctaaaggccttccactagctcttaaagttttgggttctcatttatattcaaaaagcatacaagtatggcaaagtttgctaaacaacatacaagtaaatcctgatcaagaagttacaagtaaattaaaaataagtttcgatgggctagaccctaaacaacagagtatatttcttgatatagcgtgtttctttcgaggtaaattaaaatattttgtgaaagaaatattggatgatcgtggtgaatttgacagcgtcattgaagttcttattgacaggtgtttgataactaaagataaaggccttttccttcaaatgcatgatttgttgcaagagatggggcagtcaatcgcttgtggatcaaattataataagtggttggaaaattatactagattatggaaggttgaagatatttgtcgtttcttcagaagatataaagtaagtgttaagtgttattctataatgtttattacacaaaattattattattattatt

SEQ ID NO: 124549 - DNA, 523 bp, Cannabis sativa
  modified_base (453)..(475): a, c, t, g, unknown or other
aaaacaaaaatcttaattagccttatttatttaatttaaataacagtatgtcaaaaaaattaaataatagaataaaatattttgagtggctgagattgaagctcacttaattaaaacctaacttaaatcactttaaattcaattactttcctattatatatatcatataattaaataaatattattattaatattattaattacatattataattattatatatattgttattcaaaagttttatataataacattcagtgattcatttaaaaaagtttaaaataaaaactttatatttatatatattgttatactttatttttgcaaaaattttgaaaaaagtgtaaaatcattactcgaaggttgataagaaaatatttttggaggccaaatattatactcaatttttacaaaaaaataaaatggctactctgttggaaattattttaccnnnnnnnnnnnnnnnnnnnnnnntatgttgattaacaccctaaatacgaacttctaaaacgattatgaaat

SEQ ID NO: 124550 - DNA, 2919 bp, Cannabis sativa
aaaaattcattttttgtgtttaagttttacaaaccgtaaagttcaggtggtttagccgccaatatccctttccataattacaagaagaaattgagcaaatccaagctaattgtctttattctttgaaggtacgaattaatcctacaaaaattaggattgcttcgtgacatgcaagtttggagataacgtcgatcactattggaattgtcaacccacatttactggttggtgcatgcgagttgatcaagcgatcgagctggtcagatgtccaccaatgactttgcttggacatcctgctatgtacgtctaacttggatcttcatatttatttttacgggccactaggagtaaaactatccgcccaagttgaggaatataagacacgtgccatccagtctggtgccacgtgatagtgcaaaaattaggataacataaaatatatattttttgatgtagtgttaaaagagatatatattggattaagtagctaaattaagtatgaaaactcaaatatttctttcttaattaatttttttgattgaaattgaatagtttgattttactatatattattcgcatttccgaacaagtgacgcgtacatgtacgctcaatgaccccatgtcaattttaaggcagggccaaaatggataacggtacggccacataacagatagtacaaattcggttaagacttgactgaaggaaaacccggaccgacaaacctaaagagctgattcgaccaaattacaatgtgttcgataagacataaacagatgccccatgggcactctggacgggtagtccaaaggatgtcgtggaagtcaacctcctagggctgatacaaaatcccaaaaaattaagggacaagcttgtgaaataagcacaacacaaaaggtaactaccttttgtccaacgtcccactcctctggtcagtacaatacatgattggtcatgcatggccacctgtcaacctcaagtaataatatattgtacgaatgaaggttacctcttaattgggccaaacctaccaggccaaaaagtcaatattatatgggaatctcacaaaaataccccttttttttgttatttttatatttttactgtaatatttttcttttacattaccgtgccaagttttcaaaaatactgttttaaagtttcaaaattataaaaatattttgttttagtaaaattaaaaaaaaaaataactttaaaacaactaagatagctaaaaaaacaactctaaaacaacttaagaaacaacatgaaaccaactataaaataaaaaaaaaatacaaaacaagagaaaaataacacaatattaacctaattccaatatgccaaaaaatatcaactcctcaacatatttttgtattatgaaatttcttatttttacttagctttgacaacatgatttatctttttgtattactacactattttttcatgaaatttattgttacaacttcatactttcaattttttttttcgctctcttccattttaagttagtgacagttaaaataaaaatttaatttttagaaattataatatatagttacattaataatagaaatcagaaaattttatgatttcaagatggggtgtataatataatgggtaatatataattaatatgttaatatctactattgaacattgtgtcaattaaaaaataaaaaataaaattatcattgcatttaaaaaaatatgtcaagaaagtaaactaaatatatgtctctacatatacaaagcaatacacatataacaaaaaaaattgtcaagaataaaataaaaatatacaccataaaaaaatacacattagtaaaagaaacaactaaaaaatatatgttcaacaaaaaaattctaaaaactatttaaaaataacaaaacaaatgtaaatatatataatgaaaaaattatttagaataaactaaaaatatacacatgtacataaactaaacaaaacctatataataaaagaatacataaaaataattataaaataactatagaacacataaataacaacataaacataactataaaataacaaaaagagagctataaatcaacaaaaaaaataacaagatatcaagctcgttgaaatatgctaatcattcataaaacacaccatagaaaaataaaaaataataaataaataaaaagataattgttcaacaaaaaaagctaaaagctacctaaaaacaactaaaaacacataaaaataataaaacaaatgtacatatatagaacaaaaaaaaatttctgagataaactaaaaatatacatcataaaatgcacataaatttaacaatacttatacaaaaaaatacataaaaataacagaaaaataactatagaacatataaacaacaacataaaaattactataaaacgctataaaataactataaaacaacaaaaaacagctatataacaagacatcaaccttgttaaaatatacaaattctttataaattaactctgaataactacaaaacatccagaaaaatactacttttattaatcatgtaaacgagagaaagatatagaagcattactcataatttttttgtaagagagagaaagagtgttaaaaaaatgagaataattgtgaaagtaaaagaaacatatattagtaaatgttaaaagaaagtaattcaattttttttaataaaatgtgattaaagaaaaatagtatgaaattatttgagtatgaatagtaaaaaaatgtaaaagatagaaaaagaaatataataagcatttgcattattcttaaaaaatataataataaaataaaattttgtgagatgaaaaaatgagaaaaaaaaagatataaaaaaaatacacttattatatgtatttatatatatgtaaagataaaaacaagttagagagagagagagagagcgaga

SEQ ID NO: 124551 - DNA, 1735 bp, Cannabis sativa
gtctcacagtcactcttaataatcacaaaagtatgtttttgtacgaattttaccaatttaacctacacacaacagaatttaatcaagctttacccaaggttaattttgacctttcactgtgagtcaaacacgagttgactcccttgattcttgagtcaaacgacagttgactcacccaaacgcactgtcatttggtttaaccccttaacccttagaacactctcgaattaggtcatttccaaccttacacgaaattgaaagaaaaccctaacagaacttcgagtttcttccaagaaactcgaaggctgctatcaacccaaattaagctttctacccttccccatatcaaaaaaccaaaaccctaaatctatacacacaaatatataaagtggtaaaagccaaaaaaaaattgtagagagatagcaccagatttatacaggttctctaaaattgttgctgtgtacatcctctttcgagctcgcctcagaattggctcgattccactatatgatcttcaagatcagtagttcacaaactcagattccaaatcacatgtacgattggtaatcctcttaatattttacaagtatttacagtgtttttctttctctctttctttctcttatcaaatactaactctgtcttcttcttctttgtgtatgattctctcttggattggatctctgagtcctaaccctagggcttaaggacttagctctgtaagtctcctcctttccaatcttattgtgttctgatctgtgtttttagttgtatgagattgtatttatagcttaggatagatgagagatctaagagttagttgcaacagttttaacaaactttacaactaactttggttctgtctaattaggttgttagaggccgaaggccactaatttcttgtaactgatttgtgctgatttggatagtgcatatggggatttgttttaacaattttcacctgaatcctcataagaactcttaatagttgtcttagttattttctgagagtcttagctcgaacccactaggggttttaccaacctgtgtctatccctaataagcttaagtaaagcttaaacttattaagggaagctaccttggttcccatgtttgttgggttcactatagtaggcaccttttctatttctatttgtccttgagtaaccttgtccatgataaaatgatatttgagttctatgtgtttggtcctatcatggaacacatgattcttgcatagatagatactgctctggctatcagagtagatgatatgtgttttcttaactaggtttagctcttccattaatcctctcaaccataaggcttccttaattgcttctgtagtagtaatgtattcagattcagtagtggatagaactactactagttgtaattgtactttccaactagtacaattgcctcatgttaagaaaaaatatgttgatgtagatcttctagtatccctgtcccctgcatagtctacatctgtgaacccttcaatgttttaatgtgactggtgtgcttggtatatcagtcctaccttagatgtgccctttaggtatctcataagtcgattcatgacattccaatattctttccctagactagacatgaatctacttagcacactgatcgcataagcaaggtcaggtctaatagtgaccttgaggtacatgatggacccgactactattgggttttatgccctaaataaaactctgtttcaatgtaa

SEQ ID NO: 124552 - DNA, 1068 bp, Cannabis sativa
aggtggtgatgtgacttagtggagagaacatgcacttacggactgttctaatcgctcaaaatccattgtctccatgcatgtgccacaacaattagtaagaatgtgagcctatacgcactttgctcctcgtattacataaaagaaacatggattaagacctacgatgtgacaattaatgttgttggcaaggaggatgaatgagtactaccgaaacacatcaagaacataagagttggggtaccagtggagaaaaaactagtaggtcggcctaggaaaagcaatacgggtagaagaccgacaaagcatcaaacctctgttggtcaagtagtagtggatcctcatcattgttcgctctgtggtagttcagggcacaactaagctacatgcgaagctcacgtttcaaccttttctctaatagtttattagctatctatattagttgcaaacatcgagtttggatcagatttatgtgttatattgttggttgttgtttaataggattgtgtgaaccatgttgaatatttaataggggccatgtatttttttttactgtttttacgctattgtgtgatatttctacagcatttgtgcgatgtttatgcaatattttattttataaatgtgcaatatttgtgcaattttatttcaatattttataaccgaagttttttaaaaagcttagattatatgtgatgtctttgcgatatagtgcgatgtttgtgcgattttattttctattttttattactatgttttttttacaaaatttatatcatttacgatgtctatgcaatatctgtgcggtatttgtgcgattttagtttccatattttatgaaattttgatatttttcatttattgtaatatttacgatgtttatgcgatattgtgcgacatttttgcaatttaattttccatatttagactaaatattttttattgttttcatattttacaatatttgtaatttctaagcgatatatttttataattgtgcgacgattgtgatagttcaaacaaaagattatgtataaatgaagtaaattacaaaaataatattatcgtaaa

SEQ ID NO: 124553 - DNA, 654 bp, Cannabis sativa
ttcgacgagcaggacctcgtcaaacggtaatagcttaatttattaatttatcttttttaactttttaaaattataattttttgtgaagtgcttgtgtacactaataaatttttgcattttcggtataaaaaataattataatctcaattttttatatgattttatataataatgtatattattatagttatttaaaatattttaaaaaattttaaaaaatttacaataatttataatataaaaaataaaatttaaacaacttattatttgactcgtaaaaaaaaaattcaaatgacacatataataaaatatttaaactatatttaagaattgaaaattcaaaagtcaaaataactatgatatattctttcatataaagaaaaattatgctatatcaaaggaccataaaactttgtccctattttttttatagtttttctttttcaatagttaatatgattttatcatattcttcaacttttttcttaacttaattttgaaaagtaaatcttctttttttcttcataaaaacataaattaaagtttccaaaataatctccacttagtttttctcttcatgtgttttgaatatcattcaaaagtaagtcaccttaatctaacaagaaaacaacgtcgtaattaacttgtttcctt

SEQ ID NO: 124554 - DNA, 567 bp, Cannabis sativa
  modified_base (523)..(525): a, c, t, g, unknown or other
ggcttcctttttgtgttttgaagatagagacaaaaagagagagatagatagagagagagagagggacgatagagggggtctgctatttttttttgttttttttatatatacatatatattattatttaattattattttgtatatatatatgtttgaccggtcaaaaactgagtctttacatacccactttttaatagcttgtaaacatctcaaactaaccgggcaatcaaaaagagatggtgaataatttgtgtatccacaatagaaatcatacagttttgaacttgcactgtgccaaatttttccaaacgatcccttgttttgattctatttcggactactaaccaaaaaataactgaatgaggtattaagtggagcatcaagaatggttacaaactatttgctagtattatgtttgtttcatacctctgttgggttttttatcttaaattaaacctatttcaatgtagtcagatttactaattaataaaagattacaaattattttatgttgcatggttnnnatgatttatttaatgattatatacttaatgtataaattctat

SEQ ID NO: 124555 - DNA, 856 bp, Cannabis sativa
aggagatcacctattggaataaaacactcagaaaattatcatctcttctttattttctttctctaaattataatattacataatactaatattttataacagattttatgttttcattccttttctcctttgaaagatcttcttacaaaggtcaaacaaaaatttataagggaaaaaatagatataaaacattttctatataaaaacaaaaatcttaatgattcattcaaatatgagaaaatataattccttgagttttatttttcttttaaaatccaaagtccatacaaagtaagaattttcatattacttctaaaaattttcgagtcaaccttttctttcatttttttcgtgagtaggttatgtctgaaattcttactttaaggatgtaattatttaacataattattatagatatttttaattttattagtttaactttcaattaaaataaaaaaaaatatatatatatacagatattttttataaaaattttaatttaaatttaaaatacttaaaatattgtaaatatttttaattttattgatttaatttcaaattaaaataagggacaatttcaattaaggcacacaataattcactcccgaaatcaaatatagcccaaaaaaaattctcaattatcaaaatctaatcctatttcaaaatttaaaaaaaaaatacattacttaattaaaaataattaaacataacatgtattgcacatcacttaattgtaagtaatatataatagggcatgctcttaatgggtattctactattagccattggatcaaatctaatggttgatatttataactattgattaaatttttaaattaaatattttttattttaa

SEQ ID NO: 124556 - DNA, 1461 bp, Cannabis sativa
tgccagtttttttggaaaaaggtgtcgttaaagccatcagatccggggggctttatcattggcgagttggaaagcatctcttttgatttcagtgtcagtatagggacagctgagggaatcaaattcagactcagaaaggcggtcaatgaagccagaaagaacacgatcaatgatctcctcttcaggattctggcttggaaaaagttgatcaaaatattgctcaatcgtatcacaaaagcctcagtgtcagtggccaaagatccatcaggacctaagagagaggtaattttatttttcgctcgcctggaggaagcaaattgatgaaaatatctcgtatttttgtctcccagtctaagccagtttacacgagatctctgcttccaatattcttcctctttgtatagaagattatcaagctcatgttcgagttgccgcccaagctgaagctgagaatcggtcagatgagtgcaactttgcacattcttaagattagattggatatctcagattttggaagatatggaaggcccaagtgacttcttccatttcgcaaggtgtaatcggtagtattgctatgaaggttcgaagtccaagcatgacgaagacaatcttcaaaatccggttcagacaaccaaagtttatcagaaaagaagcgggtattatgattttgggagcttggtgtgtgatgaaggttcaaaattagggggcgatgatcagatccaaagtaatctccatggagaagatgatgctttgggaacaaagaatcccattcagtgttagaaatcccccagtcaatatgctcttgggtatggaattgctgattttgtttatttgtccatgtgaaagggttgccagtaaaactgagagcgtggagagcaaaagagtcaaggaaattttgaaactggccagatggggtgcgagatgtgtcccccccaattttatcatccagatttaaatagtcattaaaatcacccattatcaaccaaggggagttgtggatattggatccaactctgtggagcactttccaagagtgaactttattgtgatgactaggtgccccatagaatccagtgaaataaaaagcaaaaaaattattaggctttaggtaacaatgaaaatgacttatattatatgaaaataaagttacatcaacatcatgagtccagagcaacaaaagaccaccactaagcccgactcgaggaacttctaaaccattaggaaaattaagttgcaatttaaatctacttaaagcaccccaaccagggggagtttagactccataataaacaaaagtgtgggcttatatttcctagttaaaagggagagagatcgaaatgctcgtttactccctaatccacgagcattccaactgatgacaatcatggggcttggcgggtgcactgggcagcacccgcctcatcattatatccttcatcaagagcacgagaaagatctcga

SEQ ID NO: 124557 - DNA, 625 bp, Cannabis sativa
cactttgcatccgaattagctcgttggagggtgcatgggagattttgaaaatctctagcatttatcatttttctttacgtaggcctttgaatcttctatcatggtttgccagaaatatccttgccttagtattttctttgataaactctctactgctgtatgattaccacataatcattcatgtactttggataggagctttgcggcctcttcattcagcctgtacctcccgagcaagttttaacccagctatgagtgcttcatactttgctttgttattggaggctttgaaccccaatttaaattctccatgtaggggttgccccttaggtgtgatgagagcaattcctgcaccaagaagttcgtcgggagctgatccatccacatgtaatttccaggtaggtttgtctatgttctcttcttgtagagactcctgtactggctcaggattatcctttgtattttcttcctcttttcctgtacattccaccacaaagttcgttaaggcctgccctttaactgttgtgcagggttgaaagattatttcatactgtctaaactctatggcccatttaagtaaccgtccagaggcgtcaggcttttgcaacacttggtgcaagggttg

SEQ ID NO: 124558 - DNA, 1832 bp, Cannabis sativa
  modified_base (666)..(674): a, c, t, g, unknown or other
ttttttagggtttagagttttggtttaataataaaattttttaatttttcaagtatataaaatcaaaattctccaaaagaatcgatgataacaatatcaacattaaatttaatcagacccacgaaatgagacattatcaatcggtaaaagcatttaaattatcaatttctattatttttgttgatacccactttaactactctattaattgtctcaaaaatgctaccaaatataaaatattagatagtaaaatcaacccacataaaaaaaaattaaagtgtaacataaaaaatgtatatattgtaaatgggtaaatttgatagtatatttattatttaattatttattattacttaaaaaagggtcttacaaaaatatataatttttacattcttactggtaaacttttttttttaatatttttactgtgttaagtttttaaaaatattgtgttaaagttttaaaattataaaaataatgtattttagtaaataaaaaaaaattctaaaataatttaacaaatagcaagaaaacaattataaaataacaaaaagataattacaaagcaacgaaaaataataaaataattacctaattgcaatatgcaaaacaatatgaactcctcaaaatgtttttacattacgattttttttacttagttttgannnnnnnnnttatctttttgtactactacattattttttttcatagattgttgttacaactttatacttttaattttttttcttttcacttttgagttagtagcagttaaaatgataatttatttttttaaaagtttactaaataattacattaataatagaaataataaaatcttatgatttcaaaatagaatatataatataatagataatatataattaatatgtcaatatttactactgcagattgtgtcaattaaaaaaaacaaaaaaaaaaaattaatattatttttataaaatgtatcaaaaaaaaaactaaatatatgtatctaaactagaaagcaacacatatacaacaacaaaaaaaaattatcagtttgaaacttaaaatatactccataaaaaaatacacatgaataataaaataactaaaaatataatatttgaacaaaaaaaatattctgaaaactatttttaaaataacacaaatataacaaaataaatacacatacatacaaaaaaaaaatagaataaactaaaaatatacaccataaaatgcacataaacaaaacaataattgtaaaataaaatacataaaaataacagaaaaataactataaaatacaatataaaaataattataaaataataaaaaggcagctataaatcaatagaaaaataataaaatatgaaccttgttaaaatatgcaaatcattcgtaaattaattttgaataaattacgaaacatccaaaagatgctattattattaatcatgtaaaagggagaaagatataaaatgagtcctcttaattttttttaagatagagaaagagtgttaagaaaatattataaaattgagaaagcaaaaaaaaaatcatattttagtaaatgtaaaaaaaaaattaattaagattcttttttatataaaatgtgattaattaaagaaaaataatatgaaatagtttgagtgcaaatagtaaaaaatgtaaaagagagaaaataaatataataagtgtttatatttttttacaaaaataataataaaataaaattttgtgagggagtaaaaaagtgttagaaaaaaaaaatatatacacttactatatatatatatttatatatagataaaaaaaaaggaaaattatcctatatactatttttttaa

SEQ ID NO: 124559 - DNA, 923 bp, Cannabis sativa
tctttagtaaatcctttgtaaagtagtactttaaaactgacttaaacgctgtagacattcacagtgattagtttaatgtaatgggttggtactagcctttagaatttctcttaaacccagcccatctttgtgctccccaaatattatcactctgcaataggtgaaagttattattattattattcttattttaattttgttttctttatgctgatttaatcatttcctaaagctttttgctggcagcttttgtcatataacatgttcagtattttactcaaaggtgtaatcataactttcgaaaggaaatcatcgtggaattcaaagtgaattattaattgtggaactgaaagtaactatcaagttgttgatgagccatggtgcatattaggagatgaagcagtgttaaattatagggggttgctgaaaatttcaactttgatagtttagcatcatctgccatgcacatatacaagttctaacttgtttgcctttttgttagaagatttttcttcaaataattgtcttttaggaatttttatgtttggccatgagatgataaactagtctataacacttttctgatcatacttactagtttgttgtgaagttcatttgttctaataaaaggtcaatttttttttcgtgtaccgttctttgagcaaggaggtttctattaattaattcattatgtaatgcggtttcctacaatggagttattgccaaagctatttttcgtattcttatgttttgtcctatatgcatgtattttctttaatattcaacacatttgaagatggaagtatattaatcagtatttttcatcaagaataaatatgattgagagcttctacggtgcaacccaaaaaaaagttgcacccatgcaccccctatttcaatatccaaacaaaaaaaaattaaat

SEQ ID NO: 124560 - DNA, 1528 bp, Cannabis sativa
attgtgggaggcaacccaaaaaaaattttctcttggtgttttagttgaactttcttattttgtttttagttgtttgtactattttgtttctttttagtttatgtttagtgaactggtaaaccaaattttgattttctttaaatttttttgtactgttcatagaaaaaaaaagtttttttttcggggtagaacacagtggctgcaccgagctacactgtggccgcggccataaagtcgctagcagaaagggattttttagaggtcatctcgccgcggtgagctacactgcaaccgcagccataaagtctgggcagaagcactattttttacctctacctcgccgcggcgagcccattcgtggccgcggcgagaatggcctgacgagaatataagggggaaaaatcaacacattcaaaattacatccttttctcaatcctaaacccactaccaccgaaaaccactctccataacccaatttcttcatctcatctcattccaaaccctttttcttctaatcttttcataatctttcatcccaaatcattctaaaacacttttcttctcatcaaacactcttttcctttaaaaaaccatatccaaatccctaaacctcactcaaattcaaattttcactattcatcatcttctacctcaagaatttcaaggttttattcaatggaggtagagtgaagggggattttcattgaggtaacaatattcttagactctctatgcaattattagtggataattttagattgttagagaatcttgaaattttagtgtgatttttgggattttgttcattgcattattgtgaagagttgtttgtgaattagaatggtgctatttgtgatatgggtttttacccgaaaagtgaaaatttaaggggaagtgctgtcaaaattttcttaaattttgagtcttagaattttggagagatgagtcctaaaagagcaagagtaagtgaaagagggggagcttcatctaacccacctaggggccgctctaatgttgatagagctagatttgtgaatgttgaggcacaagagcgttttctgcaacttaaagatagaccattcatcgaagataggggtatagacattggtgaccctagacaaccttaagctgcaccttttctatttgagcctattagagaataaatagtcaataggcgttggactaagtttgtggatatcactgaccacaacaaccaaaccttagctttagaattctttgccaattggccagcaagagaggatgaaaaagtcaaaagttagggggattaaagtgtcggtttccaaaaccgctatccatactgtctattacttaccaaccttcaccatagaagaactaccactgacacagcaaatccgagcaaagaatttgaattataaggacatatctgaaactttgggctacctaggcctcaggtttcatgaatacgatggagaaccttatcagctgtttaggtgtgaactaaacccggtggccaaggcatggctatatttcgttagtgcaaggttg

SEQ ID NO: 124561 - DNA, 1337 bp, Cannabis sativa
  modified_base (1283)..(1295): a, c, t, g, unknown or other
tattggaagctcggttatacaggcccatggttccctcactattgagataatactgcttgcaaattcagttaattgatttttttttttattgatgaatcaggtgaattttattccacaaaacttttatttgcaacctataagcgtggccttaataatctctatacaatactatttacaaactctcaaaccattctttatcttttagctttactttttttggcattacaagcactactctatttttgacattccatttaagctgctgtattaagtctactacctgctgcctcttctcattccatatcatgtcgttccttgctttccaaatcaggtaaacaagtgctgtaacaccagcagctttcacactcttcctaaacttggactggtttgccttccttatccattttaaagtggtgttcaaagtaacagcttgagtatgccatttaagccactctttcagcttcagtaagcactgctgtgaaaaatcacacctgaaaaacagatggtcgatagtttcttctgcattattggagaaaatgcagcaaggtgaatcagtcatctggtatttacaaagtcaatctttggtctttaacctgtttaacatagccagccatgttagaaagctatgtttcagggtgtttagccttgaccaaacttcattgtaccattccactttctcatgattttgtgcaaactagctatatcctgctgccactttgaactcactcttcgaaaactcctttggttgagtcttttgcttcactatgtccttgattgccaccatttttttccagcaccaactactgctttgtggagctttatactcgcaccagttgtgttgcttaatatatacacagtgaacccatttctcccacaggttatccttcttgtttgccactgcacatatatgcttaaacattgctacaacattccaattagcgacattcaacacccccaggcctccttcctttttcgggttgcatagtttctcccaagccactgaaccagcccctgccatcacatttttcccaaatcaaagaaagcatctgcatacgccttctatttctttaaaaacatttttggagataatcatgatatgactccaatacatatgaattgtgaggagaacagagttaacaagtactaatcttccagcaaaggacagatttctagtggaccaaactctgatttttcttgtcattttttaagcaagactgatgcaatcagtagcagttacagttaattgattttaattaattaattttaattctaaaattagactnnnnnnnnnnnnngaattttcactaagcaagaacttaattgtgaagaaaagaagt

SEQ ID NO: 124562 - DNA, 1992 bp, Cannabis sativa
attaaggaatgaactccttataattctaaccccataaaaatattaattggaattaaactaataatagtaaaataataaatgaaaacataaatctgaaacggagtacgtcgttgagccgaaccgaaccactcttagatgactgctcttgaacccctcacagaagaaaacattgatgtgggaataagaaatattttggcatcaatcaaaaagatcaatacaataatatcttctccttcgaaatgatctggcttgatattttttttaatcataaatataataaaaatatttatgaagaaaaagtcgagtctggttatttatttaggtttataaatcacagccaagtaaacaggtggaggttagggttgaaccttcggtttacgcggtttactcttatttgataactagtaaacaacctgcgcttcgcggcgggtatttgaatttttttaaaattatatatatgaaataaattatatcttttatttaataataattaagtaataaaattgtatcaaattttaacgtactaattttatttaatttttctttgaataatataaaaagtaattaggtggacaaacgggttaacccgacctatatttacaaaatgataaactaaaactattaattaatatgtcaaattaataagcgaagagtcaaaatacacatgactaaaaaaaaggttaaataatctctctcattcatttagacattacttttatcttgttagccattttttgtaatgtgttacatatttatatttaaagtcgatatcatcactgcaccttacttgatgtaataataataataataaaaaaaaatattcaacaaaattgttcacaaaatgaccattacttaaatgtgaaaaaaaaaattacttataccattatggatggaaaatttataaatataaataaaaacaaccaagtcaatattgacaatacaaaaatgtattacataattaatcaaatatataataaatctaataatagttacaaaaatattttctcgaaagataagtaatattaagaaagaaaattgagaaaattacttacaaagtaatattaagaaaagaaattgagaaagacaatacgaagagtggagaaaaaaaaaattataattaatatagtttagaggtactcagttatgttatgagtttgagttgataaatatttatatatatttatatagatttgttaatttatgttaaatgtaaatattctttaagaaaaatattgatacatgtatttttaattttttggttggagttgatatacgtacgtatttaatgtataattttgcgcagatatttttttttaaataaaataaataatatatatgtttaaaggtttaaattgatttataaaataaaatataattaaaaatggaaagatgagtgaattgaggagataaaaaatttataaaatgaattaaaatattgatacacctatttttttgggtttgaaaattgatatacacacctatttaatataatttcggcatagatattttttttaaaaaataaataatagataggtttataggtttaaattaaaaattaaaagagaaaaaaaaatagtattagggttatgtttagaaagttgaaaggctttttaattaaaggctttttaattaatagagttagtgtgagatatttatttattttattttttaattaatatagattaaatttagcttgaagtttttttgagagaaattttagcttgaagttagtgagataaaaaatgttgatattagttgctaggtatttataaaattagcgtgtataaataattatttatctttttttaattaattatatatgtatcttttttaattaatattagattaaacttagcttagttagagttattgagataaaaataataaataccgtgagtataaataattaacttatatatatgtatattttttttatatagaaaaaagcgaaaatagttacatttattataaatctaatatatatatatatat

SEQ ID NO: 124563 - DNA, 1632 bp, Cannabis sativa
ttttatatttttataatggtcggtcggttttcggattagaaccataaaaaccgaaaaccgaattttggattttttgtgtgtaaaaaaccgaccaaaccaactattgctcacccctagtgggcaatatcaatgatcgtcatcatttgcctttatctctttagcaggaaacaatttgtttcccacctattgatagacccttccatcaaggtgtcagagaggtactcaaacattttaaccgctctttttcttcatcatgctttttcatcccatccatccaaatggcctataaaagccaacacttcccccaactgggtcatttctattgccttttaatttttagattttcaaacccattcgacaagattccagacgcccctgatttccttctgctcttcctccaccgttgtcaggcaaagtactaccatcaaacgacgtcttcggcccttgccttgcctttattgtgtaagttctttctgcatatattctttttttcatctgctagggcaagtagtgatagtaatgtgtatgttaatctgctttgtttgttttcctcaaaatgacggccatggtcgctattagtgtaacgcctccttcggtgggtgtctgatgacacgtgtctttctttatcactatattttatgcctactatttttattatatatgtattgcttctctctgttttctgaaaagaaggtcaaaatcgaagagttcttcgaatgcccctttctggtagttcgaagctactcttgcacgccttctatttttttcatttgatttccctgtgtcgcttggatatttttcacttgatgcctgtctttgtgaatcgtttgattccttttgactgtcatccagagggggcctctttccagcggttaggggacccccatttccatttttgacttagggtttgatgtgggggctaattgctggatttcttattttttttcagatgaatgaagtccatcgtgatcttcacaatcacattttctttgggtttgaccaagaaattcttgatctctaccaagctgaccctatgtccacccccgtagataccagagcaaaatcttccaagaaggggccaaggaagttggccaccttgaaggaggttatgaagggcccaatcatttataagaagttcgtgtttcattccaattgttgggacgctgacgaactctattcgacgttgacttatgcccatcagttagagaagattgtcaccgtggctgggattaagccctccggttcaagcgtataccaccgtctcccgagggacgaggagatgccaaaccataactacaatggcttcggggcttggagtcagactcaccttatgtccggggtcaggctacccctccaatattacttcattgatttcctcattttcgtcgaactttcaccctatcagatgattctgcaagcttaccacctgttatcaaggctttttatttttaatacctctaagagctggccagcccccaaccctatcaaaattttatatttttacgaactactttcagtcccaaaaagggggacaagtttaaagatggtttacaggcccatctgaccaacgagactctagtaccctttaatttttagaaaaatgtaagggaatactgttggaaatattttacc

SEQ ID NO: 124564 - DNA, 1339 bp, Cannabis sativa
agctaatcttcttgccttgtattgtttaggctacaacaagtagcatagacgaaaaagaatttaagaaaagagaaaaaaaaagtttattttgaatgatgtagttgtagtatctctttagtaaacatcttaaattttagctaactattttatcattaagtcattatgtagaaagttggtgtgccatgctcttaagtaatttaactcacttattaatatcgatctcgccatttttttttttttatttttttcattctttatatttttcatctctgagctaaataaaaatatcttcacctaaatttatttataataatattttttttgattaaatttataataatattagtaccacgtgagcatactaaatttccaaatacttaatattggaattgaaagaaaaaaattcttatactttccaatttttttgattataatatcgataatatattaattacttacttttttatataaaaaaatcaacattaaaattaaaattatttaatacactttttagttttaatttcttacataatatactaaatatttttaaaaaaattaataaaatactcaaatacagaaaaaatttatttttatagtttgaacttttttatttacaaaaatatgttattcagtaaaaataataaaatttttcgatattctattttggctgttttatattttatttatagttgatttatagttgttatgatgttaattttttcattaatttttgttattttatagtttatttataattgttgtgaaaataatttctcgttgttttcttacacttttttatttttttttgttgagaaagttgtatttttgtaattttaaaaatttaagattgtatttttgaaacgataattttgtaaaactgtaaataaaaaatttaagccattaaattataaataaaatatagtaaaatatatattgataaaaaatattttaaggttcttatttcagctacttactttttaaactatgaatttattttttaggttatatattagggtataatactgcttggttaatgtgtttagtaaaagttattaattggtttatctattttattgaatgataatatttggaccctacagtttttaaaatagaataatataataccttgagcaaaaaatagaagatcaaaatactctaagagggaagtgttatgactaggttagttacaaattaacatttatttgtgctagaaattgtctacatataaattgactaaaattagattttgaaaaaattattatgtactatttcgataaatacagaatttgaattgtcatttattaaggtgtcgtttggtaacatttttttaatcagtttt

SEQ ID NO: 124565 - DNA, 941 bp, Cannabis sativa
  modified_base (26)..(26): a, c, t, g, unknown or other
  modified_base (54)..(57): a, c, t, g, unknown or other
  modified_base (656)..(664): a, c, t, g, unknown or other
aaaaagtcactcaataatttctcatnaactaagaattctgttatatagccacannnnatatagaatagatatatatataattaatttgcttgttcttgactccctctccttattgtatacgtacgggtaaaacaaattatgcacttttcattagaattatgatatatcatgaataataattttataatttaaattatttaagctaggattcctataattataataactaaagtatatccgagttgagctatggtttgtcatatttacttagggtgagttcatgtaataactgttagaaataattttttgtttttttgaattagaaaagtaaacatatttaggtggcgtttaataacacctttattttaaaaaaatttaatcataaaaataaatttttatttttaaaattttaattttgaaaaacaaaaatgtgttatataaccacttttattttttgttttttgtaaattttattttcatttttatttattgattttatttaagtcggatccggagtcaagtccaaggtcaggaccaagggcaggtccaagtccggggttggagttgggttcggttttcaaggtctaagttgggatcagaatcaaaatattaattaaaaaaaagtttgaaaaatattgaatgattttttttttttnnnnnnnnnatttagattcttaattaaaaaaataaaaagtaaaaacagttttataatacattatattagaaaatatttttacttttttaattttaaaattaaaaaattgattaaaaaattagtatttacttcaaaatgagaattattgaaaaaaataattaattccaaaatttatttaaatagctaatattcttttaataatagactattgttagacttttatttgggcttacattaaattttattggttttattaaaacttgggttgattggatagttctttgct

SEQ ID NO: 124566 - DNA, 845 bp, Cannabis sativa
tttcatcaaaaagtcaaaaatcttattgctagatactctttctcgcctggtcagagtgttggaagcatttttcttaagaaggcactatctaagcagttcaatgttttacctttttgtccttattttgtagatgaaccatgctgaattcgggggaggtgaacgtaatgattgacgatgatttgctcgaattaatatttgagaataattaaaccttccatgcaagtagctcatcttcatcttcaagaaagcctttaatttattctgaatcctctaaggaaaaacaatcaagtgactcctcggagtctaagtttcaacatcatcaaacttcgaatagatcggtggtgatagctacgatcgtcacatcaagagatgataaaaggttgaaggcaatttcttcatgcctcttgggaatacattgtccgaccagacacaggagacactctccctgtagggtgatgcctgctgtactcctaacctaactcctgtagaaattgagtctctagccctagctcccacagaggtactgttgcgaggtggcaggcgtgcattggttttatcgattccaatgtcagtgggtatctagacatttggatcagtggctcattgggtcctgcagttgactagatgtagccctccttgttttaaccattgttcttgaatcgaagatgatttgaaaatagataagacacaaatattttgtagagagcaaagaggtatcaggctctcaatgaaagtactaaaatgttgacctcattttagttaatgacgtggagtcaataaaaccattacaaagatatttgataattagataaacgacacacaagatttatagaggtttgaccccc

SEQ ID NO: 124567 - DNA, 2682 bp, Cannabis sativa
tgttacaaggctgttcatgttcgaattttgactgcctttagtgaagctcattttgtaactggtgtgaatcaccatcagtgtgctttgtgttcttgattctctattgttgtaagttgtaatctttgccattcaataataaaatcatcacagccaatagagttgtttctacccggggattaggtccaagttttatccaaaacttgtgactgaacctcgttatttcttgctgtcaatttacatttctggtttaatgttctaagcctattttttttttcttccattgtgttcttgtttgtgcttgagtgcacaacatatatatatatgtaggaattttttctatattaagctaagattatctaaaataaatatttatactctcataaggaaaattaaacatttatactatttaatattcacaaaaatactatttataaatttattaattacaaaaatactcagccttcttagatgcattttgaacaagcatccccacttggttcagtgttgtaaccaataaggcaataacgaatattaatgcagattatttttattttaaaataactaattttattttatttttaaatgtggagttcgtgcacacataatttacgtgaataaatgtaggtacaacgtcacagatacaatacactcaccaatagtttattttgcaattcaaagtttcatagggacaaaatttactttttttctttcacacacatgcagtcacaaaaaatgacctcataaccagcttcatttttcttttccataaaatcttatatttatctataattataaggtggtgttatcgcaagactgttatctgcatttgtatttttatgattaactaaatataacatgtggaatacaatatgatgaacttaaacttgtcactaaagttgtgaacaaaacaccttgtcattaagtggcaaagattttaatacatatatactcatgaaaaaaactaaacatattattaatttttctattatcaagataactaaataacaacaataaaacaatacaataacaactttattttaatataaaaattaaataaatttactcaattaaaaataaattagcaagacttcaactaaaaatatacatataaaaattaagtatacttttaatttgtattgtttgtgagtataaataccaataaataaacaactagacaacaacccaatttaaatatgtaaatcaataacacattaatattaaaaaaaaaaaaacttaaaacaactaaaaatcacctttataacaactaattgtatttttttttcttaaaaaaaaccctacatcaaaccaacaacacggcgacaaaaaaaaaaaaaaccgcaacaaaatgtgtcaaaaataaactcaaaatatatacaagaacatatatataaatccaaaattatcataaaaaaaagacaacagttcaactttaatatgcaaataaattagacataatatattgagtcaacaacctaataaatacaaaaataatttaataaaataaaaatacctacaaaatattgcttataatacaccataaaaatttaacatatattattttaatatatgttgaacaactaacaaacaacttgataacaactctaagtcaactaactaataatttaataacaacaaaaatttatttacgtgatacgtttcaaaaaaaaaaaagtacaaatcattaatataaactcattacattttacccagcaaaaaaaaaaactcattaaattaaaaatgaaaaaaaaatataatttgagaaaaattatgataatgagttaaatccaaaatgacacacagttcaagatatacctaaaattatttcaaatatataaataaacttgaaatcaacctaaaatacacatttgaaaactaaatatttatccaaaattatataaaaatatattactataaattaaagaacgtagcaataatacaaatatatttatgtttttacatgcaaataactaacaaacaattaaatatatattcatttttttattgaacaactaataaattacaactgaataacaactcaaaaattaaaatttatatactatgtaaacaacctaaaaacaacataacatcaacccccgcattgtgtcattccaatatgaaacaaccaacaaacaacccaaaaacgacatgtatcaatcttattttgcgccaacctataataaattacaaactaacaaaaaattaacacatcatcaatcctacactatacaaattatgaaactaaattacaaaacaacaaaaaataatatcacattagcatctaaatgtatgattgttagagacgttaatataactaaaaaactaccacattaataatatcacacaacaacgagtccaacatatatcacaaactaatctaatttgcaatgtatactaattatcttagaaaatatgaagtatttatttgtagtattaagagacttaaagtaaaacaagtgtaataatgagtatatgaaaatatcaatcattataatttaattaaaaaaaaaaagaatcattatcttgaaataaaaaaataataagtcaaaaaaaataggggccttttcatttttacacttcaaaacagtttttttttgttattttacgaaattctacatagaaacccctattgcaactagagctgcaacctaaatcgcaacaaaaaatcgtataacaactcacata

SEQ ID NO: 124568 - DNA, 713 bp, Cannabis sativa
  modified_base (660)..(667): a, c, t, g, unknown or other
ccctgccatattaaagcagttgctacgcccagtctcgctttttagccaagatccgtacatctgaacagctgggccacatcggggaatcaccatagctgtttgtgtcgagcacagcttctcccagtgagcaagcttgccacagttgaagcatgtatggggtagcttttcatacttaaattgcacccaggagtctggtttcccatctgctttaaggaaaaaacctgccgggatgggatgcgtgagccaaacgtcaatacaacaccgcaggaatccccgcggaaccaactcctccttacgcttattttcttgtttgaccaggtttcccaccttctttgccaataatgggacattgtcagttgataagaaccttgttggcagaccgtgaaattgcacccagaacatagcaacttcaaaatctccgagactaacttctccttcaatgggccaaggttttaagttcagcagaacaccattgatgatccagggcctcatgtccatcacaaaatgatagtcctcctcttcttcaaaaaagaatccgagaactccatccgggcattttttcattctccaatatcccagccgtcgccacactcccaggaggattttctttacaaccgacgctggcatatccttgcaacctgttaattccatttttggcannnnnnnntgacaaaaatattttattatttaatgtatatttcggctggcatata

SEQ ID NO: 124569 - DNA, 916 bp, Cannabis sativa
aggaaaaagaaagaggtttttgagttcattagtttggaaaaaacttaaaggttggaagggatcttttttctctacagttggcaaggagattcttattaaagcggtggctcaagttattcctgactattgtatgacttgtttcaaacttaaaaaaaccattaatagtctctacaagatgtttgcccagttctagtggggttcaagtaaaaaaaaaaagaaaatctattggcacaaatggagttttgtttgtaagcctaaagagagggggtggtttaggttggaataatgagatgtttaatcaaactctcattgtaaaaaaagtttggaaattattaaaaatcagaacgacatttgttcaaaagtgctcaaagcttcttacttcccaaattcttctatccttaaggcaaagaaaggatttaaggcttcatgggttcggcgtagcctcgtgtggggaaaagagcttattcttaaaggctataggtggcaggtgggaagtggaaatgatatacaagttgcttaagatacgtggttgccaagacccattagctttagaattcttgacaatacctctatccccgatgatctttatgtgattgatctaaaaaaatgtgcgactgtaagtggaatgaggagtttattagagcaaaatttttgtaaatttgattcttatagtgcctactagcgataaagagatgaaagatgagatactctgacattatacaaaaaatgaagagtatagtgggaagagtgggtataaaactgcagctaactcaatctttcatgttgaagcatataatgtgaagagagtaaagtccttttggaatcgtatctagaagttgagagtaccataaaaaatcaaacactttttatggaaagcgagccactcctggctgttggaactattttaccaggatct

SEQ ID NO: 124570 - DNA, 921 bp, Cannabis sativa
aactttctcttcgtaactaactccttttttcaaattttctcgtccccctccctttctccttacagttctttctcttcttgtctctctggtttatggtatattcctagaattttttagttttttcttggtttaagcctgtgttccactccttttactattgtcgatttgattatggatcctctcatgacttccttgaacacaacactatcactaactgaggaagttagcatggtctttgctcttctagaagatgtagtgccaaccctaataccacattccaatcatgttatctgaccagagtactcacggacaactatgttcataagtcggctttcattgatcaaatgaccgaccactagaaaggtcattaccctgctgtgatttccgactatggtgatgatttgttcaaaatctctttcagttgttcaggggataaactcagggtgatgaataaggaaccttggcacttccaaaatcatcttattgtgatgtacactccagatgttctacagaatgtctcaatcaatagtttgatctctactccattttgggtctagatttatcgcttgccttttcaaagcaaattcaaggctttggcaaaagtgttgggtaatcttattggtgaattcatggaggtacacaaagattcgctcgatgaaggatggggtccttttctttgtattagagttaaactctctattgtcaagccacttcctcgaggtcgaatgataaatctcccaaagattagagatgaattttggattgacttcctttatgagtgtcttctggaattttgttttgaatgtggtttacttggtcaccgctttgataagggtgcgtttggaaagccacaatgtaattagatttgtgtgtaattggaggtaattacacaatttgtcatgtttgtctgaccatgtaatt

SEQ ID NO: 124571 - DNA, 1968 bp, Cannabis sativa
tcgaaccgggacctggacccgagactgggatgtgcacccgcacccgaactgggactcgggactcggacccagactgggactctggagccagacttgggacttgggacctgaatctggacccaaacccgaacacagatcctgactcggacccgaacccggaactcggacccgaaccctgacccagatctggatcccgacctggtaccagacccgtagttggtgttggggtcaagtgtattgaaattatactataactttacacaatcgattaatataaggtaataccaaacattttttattaaataatactaatacaatacaacacaatccaacacaatacaataaaatacaatataatacaatacaatacaatacagtgtatcaaacgagccctaagtaaatttaaatgaagtaataagcaataaagtgccacaaactccaacaaatccaaccacgaatcccactccaattcccatataaagccatgacatattaagccacccttcatcatattcttcagcatcacttggatcatgatctttaggactatttggtgtctcatctccaagacatgaatttcttagcggaagtccacacaatccatcattatcaatgtatatcgaatcattaaaactttgcaattgagtgccagtagggattctccctgacaatctgttacttgacaaatttaaaaaagataaagaacatatacttgccaaccttgttggaatgacactagaaagcttgttatgggataaatctagagaatccaacttattcaagttccctatttccataggaatacttccactcaaattatttcttgaaaggtttagttgaatcaattcaacaagattgcataactcttcaggtatttttctggtcaacttgttgcgtgaaagatcaataaatcttagcaacccaagagtgctactgtactatcgaaaaactcctttccacataatcatcgtaacaatttcataaaaaagtacttgatgacgactatcgtctaaagaaacttctgtagatatgttactcattttcttacattggttccttccatctaccatagaggtaaaaaatttatgcatgaaggaagtaacccagttatgttattatttgaaaggtcaaatatttgaacaaaatgaaggtgacacatactcgacggaataactccatagaaattatttgattttagtcgaaggaaaattaaatttgtgagtctttcgccaatccaaaattgtatgttgccttttagcttattagctttgatgtcaagaactcgaagttgtgaacaattttgtaatgatgacggaagatttccagagatattattgtgtcctaaaagtaaatattgaattctatatgataaatcaattgaacttggaattactccagtcaaattatttttatctaattttagaacaaccaaactcttcaagttccaatgacaataaggaagactcccactcaacatattatttgaaatatcaagaaattttgttgccccatttattggctcacaaagaagagaacttaaattattattaaacctgtggtaagaaagatccaatatctccacatatgatagataataagggatatgaccataaaactagtttgaagatagattcagaaaattcaattttgtagaatgattactaaaccaattaggaatagtatcttgaatactagagttggaaatgtcaagaaaagacacatttacttgagttttaagccaaataggaaattgtggacctaacttacaagacctcaatactagagaatcgagttgaaatggtggtatccaagtgaatgaattgagctttaatgttaaggaattatcatgaagatgaaaatttttcaatttgaaaagtttttcgaagtgaaattcagtgaaaattcctgtgaaaaagtttgaagagacatccaatacttcaagatgttgaagctgttgggttttatgcc

SEQ ID NO: 124572 - DNA, 1505 bp, Cannabis sativa
agaaatgggagaaagaaacaagtttgagtagattttagtgggttttttttttaattgaggcctttctcttttcttacataattaatcaacattttttaaattctttttatttcctacaaaaagaaataatttactaaccactatagaacatgaaagcgggtcaaacacgataatacaactcaaaagttacacgaaatgtaagtttgaatttaccttaaatgagttcaagttgtgttccgattgactcgtctaatccgtttaatacaaaccgattgacacactaatacaaaattaactcgttaatgacctactttagtaatttaacaaattataaatggaccatatgcgtgttaaacatgtcattaataaattaaaaaggttttttaaacaggttacatgattcgtgtcgtgtcaatctacttgtaaacggtaggggtattcatcaaatcgtataaatcgtccgcaccacaccgcaccgtaaaaaaaaatgcagtttgaaattctttgcggtgcgatcgcggtttgaatttttcctaaaccgtgtaatgcaatttgcagttttgaattgttaatatacggttcaaaccgcaccgcactgtacataataaaaataccaatttttatatttatttaggtctaatatgtgaatgtccagcccaaagcccactaattattgtattgttgaaacttaaaaaaaaatcatatttattttcaagccttatagtatttttgacaagtgttgctcaaactttgttgtatttgtaatagtttaatttttagtgatagtccaaactgtagaaaccgcaaaaaccgcaccgcactgcaccattttttgcggtgcggtttctgtggttttttaatttcgttgtgcgggtgcggtttgagaaattgaaaaaactgcatgtgcgggttggtttgaaaaaaatagtcaaaaactacaaaaaccgcaaaaaccgcaccgcactgcactattttttgcggtgcggtttctgtggttttttaatttcgtggtgcgagtgcggtttgagaaattggaaaaactacatgtgcaggttggtttgaaaaacatagtcaaaaattgcaccacccacttcacgaacacccctaataaacagattgtgtttaaattttattttttgatacaattattaaataaatcgtgttcaaatcaaatatatagatgttatatatgaatttcaacacaacacgaacacactaacacaaatggtcacatactattatacacagaaagaacctcaacatctattttgcttaaatgaccatacctttcctctggcctttaaagtttgcttaacgtgaacataaatgatcaaaacaaaactacatatagatttaaacacacaaatatttctattataccacatataataaacattagctgcaataaaaattaggctaattagtaattttttcctcccgaactttgacatgtgccaaatcatgccctctgaactttttttgccgttaaaaatttcccctgaact

SEQ ID NO: 124573 - DNA, 1079 bp, Cannabis sativa
cactttcatttaagaaaaaaaaaaatgaattacaaattctctaagtataaaaattttttagtaatgatatttacacatataatttacacacaaatttaatatatatacttatgtgataagtaattttaataaataatctttatttatatacttatgtgataagtgatttatgtgtgcactatcattactgaaacgcgccaagtacataagagcaaaagtaataatattactactataattttttttaaaaaaatatttactaatattttctcctaccaaaccattaataatgaaacaaaatatattttttttctttctaaattcactaaattttttaagaaaatgttataaatagagtacaccgaataaattatgtaagaatattattattattattatacaaaatgatagtttaccaaatgcatctattggtagctattctacatatataaatgctactttagaagaatttggttacacaagtaatcacttattgacaatttgatactttaaaaagttatctttatcaattaattattcttaattttactattttgtgtgtatggttgtatatatagtttacacacaatatatatcaatttttttatatatatatatatagttatttagagaaaagaaaataaaattataattaggaaaaatattttcaacttaaatttttaattaatttgttatcataattttaaattgtaatgctaaagttaatgaaataaattataagtaatatatatcttaatttatttaaaaatatatatatatatatatatatcgtggcaatatttttaattaatttgttggacaacaatagcattaatgagacgtaaaactttgaccaatataattaagttttgggattaaaaaatgttcactactacacacacccgtattttttaacattattaattattaattaggcaattgttgttacaaaatattttatttttagtacaaaaaaaattatgattgaaaaaatattatcttacttttcatcagtaattaaaaagtatataggcatctaataataatttattataattaaataaatttttaggcacact

SEQ ID NO: 124574 - DNA, 821 bp, Cannabis sativa
agtgttgtggtgagatggaggaaattattttccatagaattagagaagatagctttattctattcgatttggcccgatcaacttcaagaagtatcttacatgcggaatttaaaagatttaagcatttggtatatttttttaagggattatttcacaaatacacaaaaacaacaaaaaaaaaattacaaaaatacggttgtactaaattttaaatatatttttatattttttataatttttttatagaaaataatttttttgatgtatttttatgttgtacacttgttaatttattattaattttttttgttattttttgttgttgtttgaatgttatttagatgatattttcttaatactttaatgtaatttttttgttattttcatgttgtttttatgaaaaactataaaaatataagaaaaaatctttcagcataaaaatatataatttttttttataaaaaatagtactttatataattattattttttaaaactaataagatatatctttatttgaattatttttacttagaaataacttagtaataaattaaaaataaaaaataaaaagaaagcaaatgacatttaaaatatattaaaatgttaaataaataataatgtcattagttaataaaatatagtatttttttaatcaaaataaatttaatttaatattacatttatatatatagtcactagtattatagcacacattatctctctcccttttttttttttgagtaaaattacttgttattataaattaaaaagagcattcatttacaataacagagtaaatgggaggagggatttcctca

SEQ ID NO: 124575 - DNA, 542 bp, Cannabis sativa
  modified_base (497)..(499): a, c, t, g, unknown or other
aagaactgcagaacggattccatatcggaggagtagagttggagggttgagatgaggtgtcttgggcaatagccctgccagaagaaaccgcagcaccagacggattagaggactccattggaggcttctgataccatgtagaagcttaaccaagcttcaagaaggtagaacctgatggtaagaaccaagaaaaaaaccagaggaaaaacagaacaagaaatagcaggaaaaagctctcaccaaaatagtgagctgagtactttatttatagggatcaattatacaaagcagagttacagaaaagaaaacagatagttaactaactgttaaaacagaattaactaaccaagaaaattaaaaactaattaactaattctgtatgtgtaacagtataaatgaccatttctatcttaaatcgtatttttgggatttattttgttatatataaattaaaagtcacccaatagcatttttgggatttattttatttttatttnnntatatataaataaaaagtcattcaataatttctcataaaccaa

SEQ ID NO: 124576 - DNA, 1126 bp, Cannabis sativa
tataagtgcaaaactcaaaaggtcaaacaaaaataaaacaacacaacttttataaagaaataaccaaataacaaccaaaccaaatcgattaccttattataaattaataataaaagttactgtgtcaaattaaacaaaaacatattatacatttaggttacaaacttgttataatcggttactacacccaaaactatatcaattttgttgagaaaaatactgaaatttagttttttttaatttaactttgaaattatgtatatagttaggggtatttatgtaaatttattttattattgagttgtattttctcttaactatgttgtatttttgaaagaggatgtaaggtctggaactattaagtctttcaccatatttgttgtactgttagtagcaattgatgatcttgcaaaaatgagatggatcagctacagaaaatgaaaactttgagaatgcatataaattggtgaggttccatttcgcatttaccattaattattatgcacatttggaacctagggttggctattttcaaattatgaattgagaattgaattataaatttgcattatgatactcctttgctgcttaaatttgtgtgttagtcagaatgacaacacttgcactatttgttttctttaatggaaagaccatgtccttacctagtaaggaggaacgtgaaaaactaccaaagattgttaaattttaggatccgtaattctgtagagtggtcactttattctaattgtatttttttttttcaaaaaacttcattctaatcctaggattaaaatactaaatgaatattagaaaaatgcaaactatactctctctctctctctcataatatatattatttgttatataattatttctatatatatatgggtatgcttttaatgggtacccatgaatagatatttaattatggaccattagatttaatcaaatggatgatatttaaagttattaataatttttttaaaaattaatattttttgttctcacctgttacctgatgacacgacagtcatcttatttttcaaaccccattttttcccttctcattgttaggttatatttagcctatgtttcgggtttgaaaagtaagcattttctcgtctat

SEQ ID NO: 124577 - DNA, 1100 bp, Cannabis sativa
ttcagggagaattttcaacggccaaaaaagttcagggggcatgatttgatatataacaaagtttgggagaaaaaattgctaattagccttaattttttgacaataaactatctaaatttcacttctgttaggttatttactcttttgtgtaaaaactttagttaagtgtcacggtatatataccatagtatatactaatacacacatagtaaatttttagtggttcgcataatattgataattaaatattataaaaaattataaaatcacttaaaatataaataaaattaaaatgtaaaatccaaaataaataaataatttgtttgtcttcatcttcattttctttctccttcgttattctccacacataccaccacactacccactattattatcaccaccaccataaccaccacaccaccaccaccaaaaatcaaagacctcgattttgggaaacaaaattatttaccgagattttcataaactaaatatttaggagctaaagaaacaataatttacagattgaaatagatgaaggttttttacgtagttcgagtattaataaaccttactccacgtgtctgtccattagcctcttagggcaattttaatgtgtttacaatatttttgtaggaaaccctaactctttactctaagtttctcttgaagaagaagaagaactagagtaatattagcagagttttagctacgtaagttgtgatgcccccttccaatgagaattgaagggtatttataggttaagtggcgggtttagacaagcccatgacccacctaaggtttctactaaaatttcaccattggggtaaattagatgcaatatgagagttggctgaatgatccagtgggtaacactatgcccgtgcgtgcagcagctagataatgggaaccattttgtaccatatggacatgtagcatgcaaaggtttaacctttaatagtagaggcacgtgtcgcccaaagcttgcttctttaggagtagaagtttataatacccgtctggcaaaaaggtagtagaggtacgcacactaccatgcttagatgtaggagagaagatctgatcttcattaaaaaaaaaaaaaa

SEQ ID NO: 124578 - DNA, 1326 bp, Cannabis sativa
  modified_base (266)..(274): a, c, t, g, unknown or other
aattattatttttatttgataaatgaaaattaaatattattcttattaattaataatatgtttatattaaatttaaattattgttgcatacatatataaaagtgtaaattgttgtgcaaatcaatatatttaacagtgcctatacataaatcaataaaataataatatatagtgtgatttatgggcagatcatatatgtctaatggtggtattccactcgccttacaccttaaaaaaatatattaaaaagtaaaaatctttttttnnnnnnnnnaaaaatatatatatttaaaatggatcgggtcagattcgatccgtaaaaaaattaagcggggcaggtcggatctgatccaagatccaataactatccgaatgttttggatcagtaatgatccgtcggatcggatcactgatccgatccgaatgaatggatctttttgccatgcctaacaccaagtgatcccggacacccttggatgacccctgggcgtatcccccttgagttcatgtcgttttcttgctaagtctagaattagtatccggacccattgtccggatctgtcaatgagaaatgatgttggaaccagaccatatgtccagtttcactcgttcttaatggatgggtcgagcaaatcgtctgctgcctggtatgtgtaatgggcctctacgagggcccacatgttgtctttctaggagtatcctccttgagttcacgttgttttcttgctaagtctagaattagtatctgagacccattgtccagatccgtcaatgagaaatgatgtgggaaccagaccatatgtccagtttcacccgttcttaattgatggtcgagcaaattgtctgctgcccggtatgcgtaatgggcctttgggagggtccacgtgttgtctttccaaaatcatgaataacaatattattagtaaactagtttatagatggtatttaggtaattatataattattaggcaatgtctttactatagtagtaattacataatagtaattacaatctatttcaaaatacaagtgagtttggatgtaaagtattaagcacatataaattttattttgtaatattagttttatgataattaattgtctaaaaatattaatattttgtaactaaacattgtaaatacccattctcatgctaagaataggatagtgtagttaattgagaccccttaatattacctttaattgcgtggttactgtgtcatatatattgtgacagtcagtagtctcgtgatccgtaaggagaaacaccgggtaagttgtgcaatctcacaccgcctgggaaaggtcaagtgggataattctgag

SEQ ID NO: 124579 - DNA, 565 bp, Cannabis sativa
aatagagttggttattctgacattcacacggtagtaatacaagttagagaggagctaagccaaaaaacagaatgaggtgcaccagaaccctttagatgaagctgctattgttgaagaaaacaatgccagaaatagattaattcaagtgcagaaggattacttttcttttctgcagcagaaagcaaaagcagtttggattcaaaatggagatagcaacactgctatttttcatgcgagcatcaaatagagagtgaggcagaaccaagttttctcaattgaaaatcaaaatggtgtccgaataattgaaccaaagcagatttcagatgcttttgtggactattatcagagtttgttgggttccaaaattgagaatagaaggaaagtggtgaaaagcatcatagaaaggggcccggttctgagttctcttcaagctgaatcccttacaaaaaagttcaccaaaaaagaagtgaagcaggctttgtttgacatacctggcaacaaggctcctggccccgatggctactctagtttcttttatcaagacaactgggacctggtgggagag

SEQ ID NO: 124580 - DNA, 952 bp, Cannabis sativa
agggtgctgctgctaaatctgaattccaaggaaacaaaattaatcagagaaagagcagacctttctgtactcattgtaatgttcacggccatacaattgaaaaatgctacaaaatccatgggtatccaccaggattcaaaagcaacaaaacaaaagatgctgcaactaatcaagttcaaacaagttctgagcagatctcttcgaaggaggaagctcatgcattgctgcctcaactcaatgccactcaatatcaacaacttttaactcttttggccaatcaacatactgttataaccactaccgatccaggttcttgttcaagaactacaggtactatcttgtccaaccattgtgttactcccacaagtgaatcttggataatagattcaggagctactaagcacatatgcaacaatataaaactgtttcaattcctctgtcatataccaaaagtaagattacttctacccaataatgaattcatttttgtccagcaaagtggctctatcttcatcaatgataatcttactttaactgatgttctttataccccacactttaaatataacattatttcggtcagtagcttaaccaccaataatgcaatatctgttaagttcactgataatgactttcatatgcaggaccaactccacctgaaggagattggtagaggtagaaacgtaaatggtctctacattttggatgctattcaacctgagagagttctagctgtcacggctgacttatgacattcaagattgggacacctatcccacaaaagattagctcttttgagtgacaaattaaattgcactgtaaacaatttacataaacattctccttgctacatttgccctttggcaaaacaaagaaagttaccctttcccaataaaaatttctttgctgaaaataaatttgatcttgttcattgtgatacttggggtcctta

SEQ ID NO: 124581 - DNA, 680 bp, Cannabis sativa
ttattggttttataactaattatttgacctaataaatcaattacactatcaatctataattgttactatagttaaataaagtggataaataatattattggtgttattaattatttaagtagtgactctactaatttaatttattatataaatttatatatttattggcgcacaagactagtttcaacaatgctaataatgtcttagtggtaataaaaaaaatataaaaatatttatagatgtaattaagtgaaaatagtatagtgattataatagtgatgtttttgttttgtagtctttctctttcattatcctttttattatttcatgactttttggagtttcttaagaaaatcaaagtgggggccaatagggtatcaaatatatacctttcataagctgtttcccataaaataataaataataaataatatataatatatatttaatttgtttatttatttactaaatcaattaaataattataataattagctttagcattgtctaagtttttctttggagtttgtatatattcatcatcacgctagagtaattggctttctttttctctaagatatctatcaattcatatgaaagaacaccaccctctatacacactcctctcataatatagttaaaaggctaattagtaatttttctttcgaactttgacatgt

SEQ ID NO: 124582 - DNA, 897 bp, Cannabis sativa
  modified_base (28)..(30): a, c, t, g, unknown or other
aatctatatattatattattataaatannntaacaatcccccactagattaaatattatctctttagcaacaaacttgtaactcttgtaacatttatttgatcaatcaaaaatattatatcaaaatataacaaatactcactcatttgagtcctattaatcacccaagtttgagtgaaactaatgtctctaccacgttagcaaacaattataattctagaaaagaaaaaattacaaataataaataaataactaaatatacaactcaaacaaagataaaaaaaattagtataaaaaataatcaaatatcaaataatacatataaaaaaaatcagattataaataaaatttaatcggtttccttttcagtaccaacatcaaaacaatattaatatacagtactatattaatcaaacattacaaagattagaaaaaaatcagaaatacattcaagttcctagcaaaaaattttctacacaaaaataacttaatcataactaaataaaaaaaataacctcaataaaaaaagagaaaatatattccaatacactttttaatcacaaacaaacatgaagacctgaacaacaaacaacaaacaacaaacatccaaatcatattatattatttatcagaaaataaaaataaggtcaagaaaatttagatcaagacctgagtttgtagtactaagtaggctctacgacaatcgacgattcgatggcgacctaaacaacaaactcctgcgtcggctgagatacttttagcaacatgaaactgaaaataataaaaaaaaaaaagtaaaataagcctccttcctgtttcagcaaagaagaaaaagaaaaagaaacgaacaagaggattagagaagataagagaacttacatgcggtgttatctcaggc

SEQ ID NO: 124583 - DNA, 802 bp, Cannabis sativa
cattgggtcgtggcatccaccgagtccacaagcaacgaaaaaccatggcttgcatagccacataggatttttatggataaaaactaaaagttcaactcaagaaaacaaggaaaccaaacaaaaaaaaagccaaactttgtcaaaaaaaaaatcttctgcatggtttgtaagagcccatgtatgcatagagtcgtggcatcgtgttaggctatttttagcctaagttccgggttgcattaataaagcattttctcagttatcgttgccttttggaacgattttaagcttgattttccttattttaggttctcggtgcattgtagttcaaattcattaaattggcaaaaagacgggacaatttggtgaaaaatctgctgaagctgccagaaacgtattaatagtcgtgaccatgacaaggcctagtcgcgacccttttctctggtcgcgactatggtcgcgacttgggttgattggcagaatgcatgtttttccacttttgcctatggtcgtgaccaaccattaaggtagtcgcgaccaggtacaaaacacaggatttttgaactaaatctgataattttccaattagaggcacaaccctaattcatatataagagactcgactcagatgatgaaaggtatcagaaatcggccccaaaaagtgaatgaaggaggagaagaagctatcttgacgatctggagctaaatcaccatctagtttctttcttcaactctttaatttctttatgtctatttctgttttagatttaatcatggatgttaattttattttcatgaactaaat

SEQ ID NO: 124584 - DNA, 1722 bp, Cannabis sativa
taattataattaatttaattttagaatataattaatctttattaaaattttataagaaaataaattattaagtcactattaggttataagttaattattattttattttattttatttctaaattaattacaagcattcaatagtaatttaatagttaaaaaaatataactattgaaacctcctccaacaatatatctatatagatatagatggttatagtttggattgtaagtttaggaaattatgagctaatcttaaagtatagcagccggagaaagatctaatcgggggtagtttttctaggaaatttaggtataaagcttagatagatgtacttgtcattaattagatatttatcttggaaaatatctagagttacaactacaataggcatcaaataaaaatgacaccggtatatttataccacattaattattataattaagcatctgatacaaaagcatctgtgaataaaaagtccactatttctagcttattattccattctccatcacatcttctatatgatgtaaatgattattcaatatttccaagtcacacttctaaataattcaggtataaaaatactacaaggctaacaaggtagaaacaaaaaccaatatatctttaagtaaaaatgacatcatcaagattaaggaaaacccttccagttaaaataagtttgattactttagcttaaattattcttacggctaaaatttaatgtccctttttctgtttggtttgttaggcatagacatcaagcaccagaaagggttgtagtcaagaatgaagagataaggagtccatacattgatgttacatttggagataaggagtctactctagtggcgctcttaataatgttttatacatcaatgtttgtagttcttggttttaaatgttaatccatgcatgtatctcttttcaggttttgccttgttgtagtgacattaaatgactagtgtctagtgtagtattctgcattagttacgagtaactttagtttagtattaatatgtctatttatagcagggctgtgtcgttttgtccactctctttcttgcgaaataagtaagcaactttaagagaataagtctaatttattactcttgactcatcatcgagtctagcttgtttaaataaaattatatgtatatactagtttgatgactccgactccgagtgcgatgataggaatgcatcaagtacttaggataggaaccaatgaaaagggaagactagtactaagatttcataaacttgagctaacaatgatatcattaattgtcatatcttaactgtcatcaaaattattcttttgcatctattctgctaaagagaaaaggactttataggtaataaagcttaaagttgaccccattcaggcgttcctttacttctccatgtaaatccgtacaaagatattataattaaggctatttttaccctgaactttaatatgtatcaaatcatgtcctctgaacttttaaagtcgataaaaataccccctgaactattgaaattgttggatttaaggacttttgtctaattttagttaaaaaaatctaacatggatgaaagttcaggggacatgatttagtatatgtcaaagttcgaggggcatggtttggtagatatcaaagtctagaagcatggtttagtacataaacaatcacttgaatactaaattcactactacaaaaacccactttagaggc

SEQ ID NO: 124585 - DNA, 1895 bp, Cannabis sativa
aattcttcgaaacaatggaatttgttaaggaaattaataagactttcgtgttccttattcctaagaagattggactgccttgttttgatgactttatacctattagcctgtgtaattttacttacaaggttatgtttaaattgttggccaatagactatgtcctcttctgtcgaatttaatctctttagtttagtttgcgtttgtgccaagtcattggattgcatagaatagtatcaagtctcatgagatcatggactctttcaagtggctcaggggaggttcgagttgtatgggccttaaattagacatgtctaaggcttgtgttgaatggctatttataatatgtctactttctttctgcctaaaagtcttttctttgagctcgattagatagtttgtgaatttcggtgactaaggtgttatgataagactcattttttggctttgatatattggaagtgtcttctgttcaaaaataagtggcttagtttcaaactctttagtgatattaacctagcattaattaccaaactaggttggcggattgctaatgttgagaatatgttgtggtgtgaagtgtttaaggaaaaataatgtcgagaaaatagtaattctgttttgtctatttctatctcgaagagatctacctttggagataaaggaatttttcaatcccaacagttaataaagaatcagtcttattttttcattggtgatttgagtgaggtgaatttttggaattctccatgaaaaccatggctatcttgggaccattttagagctgcctttaatccattagaagcctcaaattcttgtcgcatctcagctttgattagagatgacagagaatggaacatggagctggcctgtttttggtttgttcctagtgttgcagttctttatgtttaatttcccaattacctgctgtcggtgagggtgacaagctgatttggaaggatgatgtggatggttgtttctcccccaaagcagcctatagttccattattaaaagttgtttgagcgattatgatcctgcatggaagaggctttggcttctcaaaatacctgatcacatgaaactattcttgtggaaattatgtcaagatggtttaccatttgggaacagaccgagtacaatttttggtaatgtagagagttgcactatctgtgttgaaaatgttgattcttttgccaatctcttctacctttgcccattggctagagctctttggttctttagtccttagtcgattcatagtgagtctctcggtttcattaactgataggatatttttaggtgcatttttataaagtatttttagaggcgtatttcaattgattatattcattttttgcagaattacgcttgttttctacttgttttaagtttaaatggtaaaactcataatgtgaattaaaaatgagaagaaacatgttaaatgagatgaatatgatgaattcatcatggaatttgattaatcggtttctttctttcattgttgtgacatagggtccgagatcgttgatctttctccattttggtcgactgacatacttgaattgggacttgaggtaagaaagtacatccgtaccacatagtatgtcaagatacgattattatcgtttatgactcgattatgattgaggtaaagatacgatgattaacattgagcaagagaaagtcatgacgtcaattgaaaccactattaggctttatacttgtcggttatcttattagacaatgacaaaggtatgtggatgctaggatagggcatcatgattgtcttattaggcaacaagaggtgtatagatatcgggttagggcattagggttgtctttttagataacaatataaatagttactttataaagtaacagatatggcttgtctta

SEQ ID NO: 124586 - DNA, 1368 bp, Cannabis sativa
  modified_base (30)..(30): a, c, t, g, unknown or other
aagccataacgagctggttttgttgaaacnctcccactacgacgaggagcggtagtgggatagatttacaccgataagaaataaggggaaaccttcccaatttcccttttagttttatttgttttaggaaggtaaaaaagtttcttattttatttcttaattgttttgggaactctagttggtgtaattctttcctataaatagtggggtcatttcactattcaaggatgagaaatcaattgttcaagagagctcttatgctgtaaaattgtaagtttttgaaagagatcaagaacttcttacttctcttctcacaagtgatacaaacaaaagaagactaggctattaccactatcacgaggcagaacctttataaatctcgtgttctcattgctttattttatatagttcttattcaatattatttattttaatcacgttaattgactcaacatcgttggttaaaagcgaggtcaacaaccgaattttggaattttacactacaggtgatatgtcgcaataccaaattttagcatgcatttttttaacattttatgaatgttgtgctcgtttttaacaattcctataacccctaaatcaccaatttaaatccctaaatacccaatttaattagcatttgtaacaactaagaactttatggtgatcgttcatgttcaaatgagagtaaaactctataaatagaggtcataatgttcacttgaaaaagattgttaaataaattttgttgtggttagaactttgtgagaatatactcatctttagacactaagttgagcatatgagaggcttgaaaatccttaagaacatttttagaattttcctaagtgtccatgtgaaggaagaaatgatttttagggcaaaggtcctagccttagtcaagcctattgtgtgttcttgagtgttgttatttttcttctctaatttcttttaatcttgatgtaatactttcatttatattttaagtattttaattgtaatctttctatttctttttgcaaatgagaaatctattactacaatatatatttatatggaggaagtttcaatggtcacatcaaatatgtaaccatgatagttacatttatttttaaccatttgatcattaatgaatggttctgattaatttacaaattaaataaaaaataacttgtaacctcataataacctaatattttatttctttataaagctttaatttagattacttttattttaaaattaaattaatttttttgtaatttgttactaaacaaggttcttttagcaattaattttctagcacttaaattattttaatatttgtagcaaaactagttacattttttgtatctattcgtgttagaaatt

SEQ ID NO: 124587 - DNA, 1432 bp, Cannabis sativa
taggtatttccatctgttcacaaacctagccgagtaaagatgggcctgagaacgacttgctcccgaatgttttagagaggaagctcactctattggctggccagaggtgcaccactaagggtatggttggccaaaggttggccaagtgggggtgttgttgagctagagatccctggttggcccccattccattggttgtaagagtctggtcactcctgccactagatctatgtggcaagccttgtccacccttgggcgcccaaaagtttgtccttgttcctgaagaacctagttggattgtttgtttgtagaccctgcctaatctgtcaactagagtcttccttggagaggatctttgatcagatcctagcctctccccacagttatttcattgaactgccttattaggtcactaacttctctattatggtgatctagctccacctgatgagattagagaatgtactcctagccatccatccatctcagaaattcgtgtctctattatgcaaatgcattgcaaccagcagtgcgtgattcttcagcttggccgacttggcatacgaccgctctaagtctggccaatttaaaatcttctcccaattccagatgaggctcaccaattgttggttcaccaattcttagtcctgtttcccctacataatactagggtccagtgtcagtagtggtgcctaagggttgctccacattgacaaaaccctctgtacgaggcaccaatggcgtatttaccctaggcgacagaggctggtcattaggatcaattacattggcaaggtcgacctgactagttgtgttggtcgagttttttatgcctgccaggttggcagggttagccacatccgttgagcttgtggaaattctaatggtggctaaaacacaaacatcagcgcaatcgggtcttgaggaagacccaatgaggcaggagttgtagccggagttttccttgttatagccatggtaataaatcagatcaatcgacaatgctctcattgaaaacaccaaattgttgacctcaaatttggccaaccgacatcgaagttgtatttatgactaaaatcaccacatgtacacaataagaacgggcaaacaaaaaggacacaatatttttatagaggttcagcccccttagttagcaggtaatgatatactttctttttggttgtattgatattagagataataccaattagttcacaagtgttgtggattctagagtggttctcttaagattacaataatgataatcaagagataaatctcaagtagatgagatgagggagtcttagtccattctacactactattggcttgtggaagagagggtgagctagggtttcaaaacttagagcatagaacttagcatgtagcacttagagcgtagagcctttaggtttagtttagtactctttat

SEQ ID NO: 124588 - DNA, 770 bp, Cannabis sativa
  modified_base (721)..(726): a, c, t, g, unknown or other
aaaaaaatattttttgaacgtaaaaatgtaaatattttataaaaaatggtgtcttatataattattctttaattttattgttaaaattatttatatatgttatttttttattttaataataataatagtgaagtggtaatattattagattgatgttactatacattattactttctaatatataagaaggaaatgattcatgtgatatatatatagtaataaagtttgtcatttttttattgttggtcaaagaagtgatatagtaataaagtctagggtatgaattatggagttttagagggtatatgatgcattggggaatgggttgggagacatatacatatacataatatatatatatatacgtggacatatcataaagagtacgatgaatgcgggcgattgaaaagaaagatcatcaaccataaccaaacaacaataaccccacctttcaccactcactacaccactacttttgtactttttcggtatattttttatctgttttaatatttacgagaattttttaatttatttttttatatataatcgtgtacattataattatttagaacactcataataatttttctgaaatgaaaaagttttaaattatttaaataactgtattaaaaatacgctataacaaatactttaaagtacttttttttcgttttaaaatttctttaaaatttgctattcttttttttttttttgaannnnnncgtacttatattagattagaaactgttagacctcccggtcatta

SEQ ID NO: 124589 - DNA, 650 bp, Cannabis sativa
  modified_base (602)..(616): a, c, t, g, unknown or other
gaattacttaacttaattgttgctaatatttactaattttttaatttgtagtggcgattgtggagtgtttgccatggagtacattgagcactgcatgttggacagatcgtttcagcatgttaatgatgataacatgctcacctttagacataggtggtgtgtggacttattttaccaaaacttgacatggtagttttttgcaatgttattcttatatacacataaacttttgcaattatattatattatactgtgaaatgttaaatcgctcaaatgtcgcacatatatcgcatagacatcgcaaataatatcacagttgtaataataacttgcttagctcgctaaaaatgtcgcacatacaagcggtataggtcgtttttgcctgatttttctctccgtacaacctacgtgcagattggggccatggcaaaaactagggcaaaaatacaggggaaggcgaatatggatgcaaggagttcgaggaagacgaagaagaagggtccatcatcttcgggtgatgtgaaaagacaaagcggatggaggaggttcttgaagtcgagccgctggcattctttgaggatgtaacaccctaactaacatannnnnnnnnnnnnnnttttaaacatgctgtgcagctcattgctaatcaa

SEQ ID NO: 124590 - DNA, 1077 bp, Cannabis sativa
ctgtatcagtccactttggcactttaacaaactaatatggaaacatcatttggtacatgttaaaatttaagggataaaaattataattagtctaaatatatttatgggatcactttgagcactcacatgagcttctttactctatttttcaaaatacctcattaattttttatttttttttattttacctcacatttttacattacaccgtatatcaatttttttatatttttatcggcatcaataaaataatatattttcaatacattaataatatagaaattaataaaatattatatataattataaagaattaacttaaataatgtagtaataaaattaataataaaaataaaaatagctttctctccatagcaacatgttgagatgcattttattggagtttgtgcaaataggcaaacataaaaattttgttcaatggggacgaaaaaaattagaaggaaaagtaaacttaaaaattaagacataatgaaaattaatttataaaaaaaaataatataaaagaaaaataaaaataaggaaaggataaatataaaaatatttacaaaattaatatataaatgtaaaaaaataaataaaaatggactaaattgtaattaaaaaacttaaatattaaaattttaaggtgggcatatgacaccctcaatcttatattgggtctgccactatgtataataattcagttatattgggttttttttatgtagttattatttgattattttaataatattttataatttaaatttatttaatataaattaattttatattataataaaaataataatagtgtttcttattaaaatagtattaaaaaagtttagaaaaaaaataaaataaagagctgtgtatatttagaaagttcttacaagaaatgtcgttcgctattgcgctgcgctcgtaaaaataacttttatcagcgcatttcgcaaactgtgcttgcaaagaggtcaaagttttaccagcgcacatttgcagtagctaaaatctaacttttaccagcgtatttgcgcgctaggaaaagtcacttttgccagcgcttttcattttgtg

SEQ ID NO: 124591 - DNA, 670 bp, Cannabis sativa
  modified_base (588)..(588): a, c, t, g, unknown or other
ggatgcttttgtgttggcccattttgcaaagcggtaggtcgttaaggtaagacttcgagatgcttaccttttattttccttccgctgttggcagaaagggctaccatggaagtgggcacgctagtgacggagttagaatgggtcaaggtgacaaaccgtgacctgtgtgccaccaacgagaccttgtgggctgagcttaccaacgctaggtttccaatttggggtctattgcaggccaacctacagctggaggaggaaagtccccgctaagcccgcttcattcggaatatgaaggtcgttcacaacctttagacttcgcttgaaaagatcaatgggaaagcatcacgaggggtaggatagacttcaagcagtcctttaatttgggaaggagggttgaagacgtatcccacccccagtgatatttcttgcatgaaaaataacgtgcatgtgagagtcatgttgattttttatgtaacaagcttcggcttccgggaagaaaggctgaagttgtataaaaattcaagcttaggcttcgcttgaaaagaacaatgggaaagcatcacaagggtaggatagacttcaagcagnccttccattctgggaatgagggttaaagacgtatcacacccccaatgatcttttttgcacgaaaaacaacgtgcatgcgaga

SEQ ID NO: 124592 - DNA, 879 bp, Cannabis sativa
  modified_base (794)..(798): a, c, t, g, unknown or other
tgaggctagcttaagtgactataggtgggtgtgtgttggaggtcctggattcgagtctcaagtaaaacatggttgtattatataaatacttaattcaaaaaaaaaattattttttaaattttatgcttaatatgtggtcacaaaattgtaatgatatatgatctttatgttgatggctttagttaaggctatctactttttatataataaattttattttgtttcttttattttataaatagttgtgattgaattaatagattatattatagggtgtttctacaatgcacacatttaaaaaagatgtaccaatgcatcttttatttatttcagtatttagaagaatttttagtcaattttttttcatagtcgtgtacgttatacttatttaaggtatcctataaaattctaagaaatttagaataatttacaatatagaaaacagtgttcaaatagtctatttcacacgcatataaaataaaagagtcacacgtgcaataaactgtttgaaccatattttcagcatgttaaatttctctgaaagtttcaaaattttgcaagatatttaaataactataacgtaaagactatgaaaacaataaaattaaaaaattgtcccaaatactaaaatagatgggatgcatcggtacatcatttttaagagagtgtattgtagaattttcttcatttattttatattacttaattttgaatctttagtgaaagagtttaataaattttcggcgcggaccttttcaaataaggattttttttcacaaatacacaaaaataannnnnaaattacaaaaatacggttttacggaattttaaacattttgacttattttatttattggaaatacggtctttttatgttgt

SEQ ID NO: 124593 - DNA, 696 bp, Cannabis sativa
caatagaaaaaaattagaaaacataacaaaatagagaaaatagagaaatggaaggaaaagatgccacatcaatcttatgctttcctttatttatagatatatagatttttttagtgaaatacatgttattataaaataaaaagggtagtcatttacaataatagagtaaataggtggaggaatattctccaaccaaaaacaaacctcagccatacctaatgcaaatatagtcaacctgtgagcagccttgttggttgtacgtttgacatgagtaatagatacattagggaaaaagaacaaaaaactagagacatctacaatcaagtcagcttgaaaagaaaagattgcaatgaagggagctctcaaagtagtagaaaccatcagtgtgttggtctccacctgtgaaattggcaactgatgttgaagggcctagtttaagctatgaactagcactttggcctccattttatgagatgagaaattgccaattatcgacatcgaaagagcaacagcaacatggccatttacgtcccgaacaacatctccaacacctataacattctttgaaacgtccactacaacattaacattcaatttgagtgcactgacacttggaggtttccatggtactgatttagtagtagaacatgctgactgtggaggagcagcatgttggaagttattttaccaggaact

SEQ ID NO: 124594 - DNA, 638 bp, Cannabis sativa
ttttaataaaagcagcatctgaaatgtaatttattgtcgttgttttctctatgtaacttgaaccttcggcccgcccacaatccaagctgatgaaacctggaatcatgtaagaaattttaattggctacttttatataatgaacaaattgcataatatatagaaaatttctaaaaggcaccacggctactaaacatcattttcgatgttatactgctattggtgtaattaagtatcgagtctcacataacttgagaaaataatttttaaagaatatcgctaatcaatcatattgtgtcacctataaaagatgatgctcaatatataatagggtaaataggacttgtagaatttttctattgttgatgtaatattaatgttaatttgatctagctcaagagtcaaaatagcaatgtaaccataaattatgataatatcaacatgatttttaagagttagtgtttatatttttaatgttaataaattgaatttttggtagtttaaaattgttaaacaaatttttatactgtatttgcacttagaactcatggttacataagtaaattattttaaaaaataattaaaataatataattgaagggaaatatttgatttgtgtaaaatttaggctaattagtaa

SEQ ID NO: 124595 - DNA, 867 bp, Cannabis sativa
aatttatatatttttctatgaaatttaataatactttaattacaaaataataattttaataatatattagatataaataggtcaattcaaattaatttcgtgtcacatatgctaatcctaacccgactcaaatgataattgtatcattcgggttccattttaacctacaataatttatattgaaatcgtatcgtattgtcgtgtcatgacctgaattgctattcctaattctaatatgataatgtgaaaattttatataaatatttatttctcaatcaaaaatcaattttcctctcctaaaaataaatttaaatttatttggaaaacgtctaatcagtcttaaatgaattgttgcaagtataactaaccttttctgtttttttttcccaaaattactcctactttagttggttgaaatagtatgtagtggtctaaaaatttaaaaatggaggtccacttccaagctatacaccctatatttatttcatatatatatatatttataaatgtctcattaactaaaatataattacaaaagtactaatgcctttttggtgaagtgttaaagttgactaatgatcaaacaccaagacatgttcatgctataaagcaaggtaggtctatacttaagactcaaaatttttatacacatgaatatgtaaagaaaaaagtggtaattttgtaaatattacgaaaataggcccaataatgcctaaacccatcctattgcccaaagccattttttaagcccatgaaatattagggtcgaccctgctaattaggcatcaagtacactagccaagaatgtaaaaatgtattttttttttggaaaatttacaaaaatactgaaatttaggttaattttta

SEQ ID NO: 124596 - DNA, 2258 bp, Cannabis sativa
tagatctaagttcctggtaaaacataatccaacagtatcctatagccatttggatttatctagtaagggcagacacagaagaaatcaactatgaatatgaactatggatgcaagggtaagtaagtgctcgtattcatatggaaccttgacctagcactacagcaagtgtcctaggagccattaagaccactgtatcatggctttcagacaatagttataggaagatagtaatcatcttgtattaattgagcttgatgttcagtaagagtactaaacacaagaggtcttagcctgaaagctcgatttcttagattatcactctcgatggcagctttaagaagctcaatttccatcaccttcccattaagcgtcttgtctaagttcttagacttaggcacagttagcttggatttaatgaactgaaccacatgggggtcatacacatcaagcaaccttctacttctctttatcctagccatgacagctgaacaacacaagttgcttacaactcaaaaaaagtctgattggattgagaaagttcaagcagctttggaggaaatgttcaaggcactaggaaagtgttttggaattttggaggtcttagaaaaaataattcaagagtttttaggagtataaatatccttggattaagatcaacaaaggagaagaagaagaagtttctaaaataaaaggcgttgattccaagaaaagaaatatttttctaccttgaaatgaagaacatttgaaggcttgatgaatatgagatttcaaggagctcattaaaggctaggcttgtggattcggaatgaggaagtgcataaattttgattcataactctcttatttataggtgagttcaatctcctaatcctaaagctaatgggagtcttttaaatttaaagcttttaagaaagaagtaaatgacaagtaaaagatataattatatctttttccttctcttttcaagctagatttcaaaattcatatacaaatatgaataggaatccaaatttaaaaggtaacatgaattcctaatgctattaagattaaagaaaaattagagaattaaaagaaaaagataaatgataaggaaaagatcaaaagtcttttctcttcttctttattcctctaattttcgaatggcctaacaactaggattaggattcaaatccaattaatcctaatgtcatgacaaaaataagaaatttttaaattttcaaagaaaaaggtaaaagataagtgaaaaaaaaaaagacaagtttttcctcttacggatcatgggactactgactgtcacattgcgactagagactaaattttggcagtttcttgtttttgacctaaaaacgagtagaggctaggttttcattatatattcaaattttgtagacattggaggctaacgaaggacggctggaagaaagaacaccgttggaggactctaattagtgttctttctcttctttcttcatttttttgtgtttaattgaatctcttgatgtttaagatgattgttatgagttaaatctcttttaaagattattatgtgaaccactttaatttctttcataaattaaaatatatactgaatttcttctttttctattattttaattctatgcaatctgatttaattgtgcaattactgactgatcacctataattgttatttatgaattttgaatcaaaattttaaaaagtgagatttcaatatgttttgattgttatgaatgtaaatttatttaaaacgaaagtatctaaattatttgtatgatttttatgagttgctttgtttaatgctttctttgtgattaaactttgccatagggatatagagagttttcacatagattgggtttgtaagtctttatcagattatgaactacttaattcaacttgttaattgaatagaaagaaaaaaaaaattgagtaattactttatgatgtaaaataaaagacagttgggggtcataataatccatatttttctcattgatatttctcttaatttaaattgttcgttttgttttattcaattatctccaatatttttatttaatcaaatcgaaacaaaatattaattatttgataattgataatcagtcattgtgggacgaaacttggtcttccaagattattacaaattatggttgtgtgtgttagactataatatagtgtatgtaatataacatatacaaaacgatatgaaatgcggaaaaacaactgtaatcatatctataatatatgcaatgaaagga

SEQ ID NO: 124597 - DNA, 1733 bp, Cannabis sativa
  modified_base (33)..(58): a, c, t, g, unknown or other
caataggagtttcaatgtagaattccgtaaaannnnnnnnnnnnnnnnnnnnnnnnnntgaagtgtaaaaattaaaaagtccatttttttatatgaatatttttgacaaataattataagaaaaaataaataagaaaataaaattaaatatagacataaaataaaacaatgacacctatttaaaaaaaataactttaaataaaattattttcaatacttttattaaagcattatctatatatatatattagaattagagaaagtttattaaaaaaaaattaagaaagtaattaacttgatagatttattaattattacatgcatgaaaaaaaaaatattatggagaaatttattttaaatagcacaaaaagtataaaaggactaaatatatatattttttttgaaatggataaaaggactaaatattaactgatatgtatgtatacgtcactaatataaatgacatatatctttccaatgaagcttttttgaatgctattgaaacctacatggatagtgcagaagagtacttggagggagttgctttttttttttgaaagaacaaaagttcattaacagcaaaagatgcgagtgacaggggacactccctccccaatacaaaaaccagcatccaagctagatattctagcacttgtagctaaaccatccgcaaaggaattcaaattcccacgaacaaaaggaaacttacaaatactaaacttcttaattaaacctaaaacttttaaagaaacatgcaatacactccagacaaattaacttagaaaaactactaaccaacactagagaatcagagaagatatgtattgtattccatgagttctccaaggcccaggtgattaattgatggtgctcggtgattaattggtgatggtattatggtatagtttttctaaataaaaagtgtttgcaaaagttatttttgagaagttgtttaattatccatgaaagtaaatataattgaaaaatgcttgagtagagtcatgaaaaatgtctgacattcttttttattatatgtcactctattatttaatactattaattaattaattccttttatatttttattattattttttttaataatttagtaactgttgaaataaaccccatattacctgtacactgtaaaaccagaacatttactcagagtttacaaggcagtgaaaatactaggtggcctttggcctctaaatacctaggacagatcagcaagttagttaagaagtttgttacactttttaactaacccttttctctgtattccactactacaacagatttaaaagcaaaaataatctcaatcacagaacagaacagagcagagaacatacaacagaaatccattcttctctccagatcagaaattacacagatcaaatccaaaggggttaaagggttgaaggagacttacattgggtgagtttggagccctagggttagggctcgaatgttcaacaccaaaccagggggatcaaatcatgcaaaatcaggagaagaagatgattagagattaaactcagagagggaaaaatagagagaaaagagagaaacacatattgtaattaaaaaggggatttccgaatcgtacctttattttttggaatccagaactttgtacacttgatctttgaagaattatagtggaatcgagctatctgaggcgagctcaagaggatgtacccagcaattgtttttggggaacctctataaat

SEQ ID NO: 124598 - DNA, 1714 bp, Cannabis sativa
  modified_base (67)..(69): a, c, t, g, unknown or other
  modified_base (1668)..(1684): a, c, t, g, unknown or other
caacaatctcaatagttcaaaaagtatttttaacgaccataaaagtttagagagcatgatttagtannngtcaaagttcgggggaaaaaaatcctacttagccttattctattaacaagggtgacttataatttttttagaattttcatttctaaattgttttctcataagagtgatgttgttggtgatcatgtgtctattttattagatgattgcatttcttaatatatatttttttatttccttttcaaagaaaaagtaatacatttgtcttttgcttttaaaaaggctaaacatcatttttgacctaaaactataacacacataccaatcataccacacctttcatgtatatatatcctcttcaatctcacgcccctaattaaccttccaatttcacaattaaaattcaaaggttaaggaaatcaatggattggatccactcattcttcaacattgctttacctcccataattatatttctacactttttgattctaccaatatatattccattcaaatttccacaatctataaaaacatccataacccctcaagaaaacgtggctagaaaagtagttctaattactggagcaactcaaggcattagagatatatgtacatactaattatctatatatgtgagtttagttttaacaattatatattgtttattttgttgaagcgacttgcttatgagtatggtggaagaggagcttttttggccctaattgacattaaagacaattttgaagttagaagaagagctcttaaattaggatccccagatgttatatctattgttgcagatgttactagggtggaagactgtaagaagtttatagatgaagcagttcatcactttggccaatgtaattgatcataataattagtttgtgtgtattttcttaatctatatataaaatctcacttacaattaatttaattatctgaattttaatgtgatgatggatcatctggtgaacaatgctgggatagtaatactgagcaaatttgaggatattgaccacatttctaatcacaaatcgattatggtaaactgcattaaaatcactacaaatatggtgtaacattattaattactgacctatatatactactatatttcattggtaggatgttaatttctggggtacagttaatagcattcactttggaattccacacttgaaaagaaccaaagggaagatagtagtgatctcatcaatcagtggatggtgccctgatccactaatatccatctatagtgtaaggaaaattaaattcataatttgttaagaaaaaaagggagcttccttttatttacactacttagtaaatacaagtgttgcaatgttaaccaataaagatttagtttagttagtttgtttagttgttataatttttttgatttgttataacaattagattaactaacatgattgtctctttctgtaacttgtttctcttttttctgttattgctctgtttttactctcttggttttaccttctggtttctaccttctcttgaagcttgttctgcttctatatgcaaaaactaaaacattggatcattaaaaacattatttatattcaacttaaaattataatatatatcataggctaattaggatttttgtctcctgaaatttgacatgtaccaaannnnnnnnnnnnnnnnnttaaggtcgttaaaaatatcccttgaacta

SEQ ID NO: 124599 - DNA, 1557 bp, Cannabis sativa
tatttattgaatctttctcaattaaattatagaacacctaacataaaactaaatatacgtgcattgcacgtaactttcttctaatatatatatatatatataatagagacttaattttatgtagaggtactgaggacattttatttgagtgataaaagagtaaagtttatgaaagtgaagctagagtttagtttatgttaacatatctcctccttattttttaataatattcttttattttatcttttagcaaaaaaaaaattaatattagtttgcacaactttttcaccgttatttttttaaaaaaagaaaaataatttcacctttgatttagatttgttttttttaattttacttattaatatttacttaaaaagttctcatatcacttcgtaccattacttattgtttttctaaccactaaaaaaaaatacctatttttctttgaataacaattaaacctaaatatacatataaaaaattataaagtaaaaactaaacaaaaaaaatatatatatataaattgtatacaatatttatagaatagtgagaaaaaaaatacatgaataaagatatcaatcttaaaaatatttataaaaacaaaaaaattaaaatatcatatcattttttgatacatataacctaatttttgtgatattgaaatttttttataactattcactactgcaatgtggatttttagaggctgttttttcaaccaaaattataaaaagggaagctaaaaggtgtgaaaatactcgcctagttcgaaattaacatttaaaagcagttttttgataaaaaccgtaggtatacaatttataatacctatgtcgtcgattgggagttgaaaatatttcagcctactttattacacctatgacatcggttattagggaaataactgacgccataggtgcacatgtgtcagtaaaccgtacagctatggcgttggttatttcctaataaccgacaccatagagtgtatatataaacactctgtcttcttcactttcatcttcttcctcatacgcgatataccagcatccatagcagaaccatacccacgccaaaaccctcgccaaccaccgttaaaataccatcattctctctcatttctttaccattttaccccatttttattttaaaatattcgattttcaatacttaagcctatactgtaaaaaaaaataatttttttctctctttcattatagttgaacctattaaaaaaaaagtggtggtataactccggtcatcgattttggtgtagaaaacgttgaatctcaatgttcattaaggtatatataagatgatctattcattttattaatatacattgttttattttcgttgttgtaaattttttttgggatataagcattttattaacattatgttattgtgtctgaatggtggttggatttttatcgcaattggtcttcggattgtgtttataagataaatatttattaacttgatatataatatatatacattgtattttattgaatatgtgtttatatatattgggtatatattatttgtgtaaattgt

SEQ ID NO: 124600 - DNA, 2485 bp, Cannabis sativa
atcaaaactcaaaacatattttttacaaaaataaataaaatatcaacacttgattaactatttactttcaatttaataaattaactattatgtttgcattatatatattttactagcattttgagtgtaatttttattttttaaaactttacacaatatattattattttttttcaaaatacaattatgttatttacaattattacttgtattgaacattatttatttaaaaatcacatataacaatttaaaagaaataaaaactaacgaaaatttaaaatcaaaatatatagcttaacacgtaacatctatctatctagtatatatataatattagttttatacatttaatacaaaccatttcatactctaaattaaataaactagatacataaacataaatatgacatttaaaataagttttatatatgtatggcaaaccaaatcccataaagaagtctaaaaatacaacaatgccaaaaaaaagtgcacaaatttaaaagtatcatattgaagacataaagttttaaaatctcatataaagtgtaattttcaaaaagataaaattggtatttaatattttgtttaaaaatatattattaataaatagataaaggtgcattgctattaggcaccagtggtacctaataggggtgggcatctaatttaattcaatttttttttcctcatccgattcaatctaatcagtaattagatttggaaaattatcatccgatccaaactaattagatcttaaaatccaatcttattcagtccaattactaattagatttgatcggttttttaaatggatatccaattacacacctaaatttcaatattaacttaaaaatatgaagaagaaaaaaaatacgtaaaaactataagtatcaccttctatttaagtttaatacttcataaacatactatcattacaagtataatgtaacaaaaaattttaaataattaaaacaacaacattaaaatagaacaaaacatcatgaaaaataaatacacaaaacaactaagtgttacaaattcaacacacaaaaaaatctaataaatatatattatatttttttaatattttttattatataaataattttttaacatatataaatgtaattagattggatcgatttttaattaaattttgagattgacatccaataaccgatccaatccaattagaatctaacttttagcatctaatcaaatccaattgtaattggatatccaactttttgtaattagatttgattggaacggtttagttcaattagattggattggatgatgtccacccctgcctagcactttctagacatgtcgtgttgcgattggctagcgatactccctaaaagctattattttaaattatataggaactaatacttagttgaatcaatagcgatattgacatataggagtgtgctaggcaccactggtgccttttagcatttctctaaatagaagtcattacctattcccttggaaaatgtaatgtaagaaaagaaaagtattcactctctttttatttccaacttaaccaagtttcttatttttattgtgtaattggcgacggatccttcttatatttaaattttataagcttaaccctttaatttttttttatgtggtaaaattcctttaactttactttttttagtaattttaaagtgtcagttaaatctcactcgttaaatactaattggattacatatcatatggtcgtctcaagctttaaagcagcctaggaaaattttgtaaaatgggactttaaaaaaatactttatataattagttacatgtatatgaagcaaaatatgcaactataaatatttattaaaataaataagaaaaaaaacattaaattagaactgtttattaggttggacctcttgcaactctaagtatcatttattaaaaatttgggccagcaatgtgaactttcacattttttataacaaaaaaaattaggcctctttggcctgggggcttaggacagtggcccttgctgtcccatccttcagctggtattggattgtcactgtgtacacttttttatatgtgagatatttttattgactttaaagctttactgtcacatatatacatgtatatagaatgacaatcacaattaatatttgacagtaaaatttaattggtaactcaaatttgcaaagaaaactgaagttaaagaatattactaccaaaaaaaaaataataattaagtgtataaaaataacataaaaaaacttcgccactaattaccatttttattttaataaataatagagtatgaattattatcataatatgatttacattagtaaatataactaatcctaatacttttcggtctattctcataaatttatatatatatatatatatatatatatggaaaaggttacagtttttttaagtcattggattactattatgttgttgtgattaatttggaaattaaataaaaata

SEQ ID NO: 124601 - DNA, 1353 bp, Cannabis sativa
gagatagatcgctagagattcagccataggatatgcaactgcgactaattgtgacagaggggaggtgtgtagggtggtgagattgaacttgatagagtgagcgtgttattgagaaggaagaaggacatagaattaggtggtagcgatgggatcgttaaagatggccgatgaggagaacatgagggtcgagaaggagggtttagttcaatctttttttttagtttgatacatgatgatgatgatgatggaaataacaattaatttataatttatatgtatacatatattcatttgtttgagatgataatgatgattattgtttcaattcgattgatatttttttgagaggttaaattctttgggtttgggtttagttggaaaggggggattaagatttagttttatttaattttttttcttaaataattaaaaactatttttttagaaaaattaaaaagcattgttattcattaaaaatatatatatatatatttagttagttttattgtataaaaatccaattaatacttttaaattcatagaataacacttgcaacttatttagttaaattcataattaatttataaaatttatttgcagcatttaaaattgacaaaaacaaataatgggataattaagggtaatataaatatattaaaaaattataaatgatggcaatgtgccaaagtagttagtttttagaaatagaagatactcattaattattatttaaaacaacaggtactaagtatgtattttcataaaacatagggtacaaaatgatcatttagtcatttttaaaagacaaaaatgtagtagaatttttgtttttgaaaaacaaaaatttgtttcataactattttagttttttcgattttaaaaattaaaaaataaaaatgtgcttcccaaattttatttttgttttttatttatttaagtgaggaataaaaaattgatcaggtgagataaagtgggtcgggggctaatattacgccttcacttcaagtctctattgggtatctaccgatagaccttatggttgttatacactggtacgttactttgggtgcttcttggaatgacaattgtagcccaacagacaaacacgagtctttcccgcgtgttttgtcctcgctcacatatttcttggaaagttttcccttgaggttactcatcatcatgagactactcaaaataaagtatgtttaactttagagttctcaaatgatgagtaattgaaaagattatgcatcttattgacataggtactacacatcaatctatttaagccatcttcaaatgtgttgtctcatgcctacaattaaaattccgtattttaatattccaagttt

SEQ ID NO: 124602 - DNA, 1071 bp, Cannabis sativa
  modified_base (650)..(650): a, c, t, g, unknown or other
  modified_base (745)..(753): a, c, t, g, unknown or other
tacatgaccatgagaaaaaatttcactaaaaaattatttcgggtgctaaaacagacaagagtacattaatgtatctattttaaggggttgcattgtaaaatttcccaataagattttctccccaattcttatagaattttgttggttgcaaaaattttcatcaactataaaaattattgtaaatacactttttttttttcaaattatattttgctcattttaaaaaataatttgctttatgtagccatgtgtcatttttattgttgtagtaaattaatctatttaacaatttcaaactacttcaaaatttaatttattaatattaaacatacaaatattaattctgagaatacattatattcttataaattattattagattgctacgtatatatttatttatttggactattaaactgcaccaaattaagaatgttagaatgttcgcagtgcgggtgatgagatttttgactattttttcaaaccaacctgcatatgctttttttttttttaatttcccaaactgcacccgcaccacaaaactgcactgcaaaaaattatgttgtgcggtttgaactatcactaaataataaaactatcacaaatacaacaaagtttgaacaatacttgtcaaaaataccataagactngaaaataaatatgaaaaaaaaagttttaagtttcaacaagacaataattagtgggcttaggttgggccttcacatattagacctaaataaatatnnnnnnnnntatttttataatatgcggtgcgatacggtttgaaccgcatattaataattcaaaatcgcaaactgcaccgcaccccgaggtttatgaaaaatttaaaccgcgatcgcaccgcaaagaatttcaaaccatatttttttttgcagtgcgggcagtttgagcagtttgatgaacacccctacaccaaattaaagtaacgttgagcataataaaactgatggtaaatactattttggaccctgtattttgtaaaagttatcaatcagaccctctgttttgttaaatgacaaaatagacccttgtattttttaaaattgtaca

SEQ ID NO: 124603 - DNA, 725 bp, Cannabis sativa
tatatatattttttttttttttctgttgcctcaaaaaatcaattggtatttaagcttgtgcgtgtgagagctttccatatttccaaattatgctaataaatttgtagtcttttgtttatttatttatttagttattatttttattaatgggattagtaaaaaaggtacgtcacttatatctacaaaaaatcagaaaagttgattaaaaaagaaaaagctttaatttggagaaccgtagactggtagtagtaggtacttttttaaattttggaagtcaaattaaattaagtaaataattaaatttgtactgcctagattttttttagtttccaaatttgaattggaaaagaaaatttgagaatatatacatatatttaggggtaattagattctaaaaaaaagggtaattaatccactaaatttctgtgtatccatattttttaaagggaaattttatttacacctcaaaaatttataaagacatcccattttaataatttttattttatgtaaaatttatatctttaattgtactaatttttttcaatttttttctttcaattcacattcttcaaaattgtactaatttttttcaatttttttctttcaattcacattcttaaaaattgtacttatcaaataaaaatataaattatattttaaatattatgacaaaaaaaataaataaaaaattatataaaattttcttaaaaaaataaaaaaaa

SEQ ID NO: 124604 - DNA, 640 bp, Cannabis sativa
  modified_base (35)..(36): a, c, t, g, unknown or other
agaatataatttacttggtcccaagtgtattcttnnatagaggttctactgtatattcaattaataaagaaatatacataaattcagttaattaatatttgttctcaaacaattaggaaatgaaaatttggcattagtacgtacttgtagttcttacctggtgctatggtatagtgtcactatatgattatttcatgattgtgtggtttgcagtgataacaaattctttgatatttctgttagaatattctttaaaatattgttatgtaatgattttagtatgagatgtcatatctagaatttttttataattttctttatatataaattcaatagtagccaacctcacaaaaattgaactgagctttttcatttattgagtatattcgtgtcgtgtaaacctacctaatttttttttttatattttgaaatttggtatcagagcattctacatcggtggtgtattaacctcgctccatggctaaccacactcctccccgtgatagtcaagacgactcagttacaaagataacttctagtgcgattgctcagccctcaactccatccatgacagttcttggacccagggtcggccctaggctaaggcggactaggcccgtgttgggttttgtgccctaaa

SEQ ID NO: 124605 - DNA, 949 bp, Cannabis sativa
aaacaaatccctgtaactcaaggcgaaaattaaagaatcatcaatgatccgagacgagaaatcaataatagaaaatcagaaaaaagaataaatcaacgagaattaccttgatcgagattctaaagcttctacaaagttctgagattgacacgaggagaaagatgaagaaagagttggctgagttgagaagtgctatataaggaagagttctcaaccagtcgttctgtgtatggaagtctccagaagcccagagattctttcttattcttttttcttttttagaagaaattaaaaatatatatattttcatctgacggtagccaggtttatatctgccagcctgttttaaatccagccgttcattttatttcatggctttttaaatcgaatggtgtttgggcccacgtgcaaattagattggacctctaaaaataaataagggataatttcataactacccacaaaacttaaaatatttataaaaataccatacgaaattttaaataattttacagtttatataaatttattactaaaaacatgaattattgaaatttttatatattttttgtgttgtaatcttattatttctttgtatgttgttttcttttgttattttcaccctatttttatatttttataagaaattgtaaaattgtaattaaaaataataaaaaaaaactctaaaaatattaaaattttgtcaaaaaatagtactttgtctaaattttccaataaataaacccctactaaaaataagtattttttttttataaaaaaaaaatgcatgtccaaaatataatcacaaaaaatatattttcgctcctccttttagtaaattctcattaaaaaggagaatttgtaaagtaaacatataaaaggagataaaaagtttggggaaattatttgagttaatttcacaaatgcacaaaaacaacaaaaatacagt

SEQ ID NO: 124606 - DNA, 1259 bp, Cannabis sativa
gagcctatgcgccggcaaaagtaacttttcttgtagtgcggtaacattaaccttcaatttcttcttaacagggcgacaattacttttttggtaggcggagcaaagtctgaatcaccatcttcaacaatgggtcgtttgcttttaggtttgttggcatgaaatttaacacttgtttttgaaattatttttcagcaatggtaatgggaaagatgaagaccgagtaatggccatttatagaggagaaaaaagaagaaaaatttggaaaaaacaatgtcaaatgatggaggaaggaagttgaggaagatggatgaaatcattttttttggatgaaaaataattttgcttgtcggagaagttttcaaacagaacgctacaatgataattaaaatgaaactctattattttttggatttttgtcttgtttgtattttaatctcttatgatttttctgttaataataataaaaaaaatatgaaaagtgtgcatgtatgaaaaattattgtgtactggaaaactacaataactactgatacatgaaatgacttaatttagctgcaaattaaatcttacaagatgaacgttaatttttagtattaccagtaaaaggaataaatcttatttttctaattttagataacttaatatgatctctaacatattcttaatacacaatctttgattgttttacgtactatatatgctcattataattttattattttattagtgatgtattacatccacatgtatatagttacataatattgttgaccaaataagtttcttgtatttttcccataaaaagactttgtttcttgtacaacaataactaaaataaaattgaaacaaaaatgatagaaaaggagagaaaataaatagtgtgtggagttgttataatgacacaatgcatgtgtaagagatattagtgtaattaaaataatatgaaatgtaaaaatatagaagcagcctatagaagtaatatttttaaatttttgtattatttatgtaaatattccaactttatatataatttaatatttttattaaaaatataaaatactaacgtaaacattaattttattattattgtattatgtaaacaataaaaaaaaatataaatattttatattttaatactagaataaaagagtaatttgcggcataaatacctaagttttatgccgagtagccgataaatacctaagtcctatttttggcggtaaaaataccttccgtcactagtgtggaacttccgtagg

SEQ ID NO: 124607 - DNA, 1586 bp, Cannabis sativa
atttgagcctacttggattatttcagggtggcaatgagtcctcatctaagcttgggagacccctagtgtggatactgatgtgaagaagcgggataaacaactctgaaatgaaaaattagaattttggctccatatgtggcggtgtaccgtgtttagagaagatgatctcaaaccgaccatttctagaccaaatacaagcggtatttggcttctttaaggttctgggacggtgaaaacattttccaatcaaaaagacgcatcgaaacagattgttgaacgagttttgggctcaccggcattggagaagataactacaccggtgtatttccaacgaccacgatttgggaagatctgaggtattttcccatctttttttgtaggtttcgattctacatattatttaggtgtttggtgaagtttgataattttctgaatttatttggaattatagtgaattatttggtttattttttaaattaattaagaaaaacacttaggttgctcataaaaatctatgtttattttccattattgtctataggatataaattgttaaaaaaattatagattggatttttggttgattttatatttttcacgaattatttatgttatttctaaatttatttatgagaaatatctacattgttcaggaaattcaaagttaattatttatgacttattaaggactataaactgttttgaaatatttaaatttagtttttggtcatttttgtatttttcatgaatttatttagttaatacttaaattaattatggaaaatacttagtgatgctaaaatagtaaaacatatttttgtaatatcacttactgtgtatgctatgatatagaatagagtttataatttattgatcactgttgatatttattataattatttgtaattaattaattaattaattaattttgtttaattagaataaatagtaaaaatattgttcgctatttgggagctatcaatatgatgctagaatataattatattgtctggaattaataagagactatgctaagatgttttgctatttttgattaattattttgtattttttataatttaacgtataaattaatacataattatgggtagtattttctacatattttgagtatgttttatgatctgtatgaatggttaagaaatatgctggcttctgattttagtaaataatcccataattgtatattttgttaataaatagtattttagtaaagtttcacataaaaagtgtttgtatgtgttcatgttttacgttaaaaatgtttgtttgagtacatcatatgtgttggtgtgaatcaaagtgatacatgattatgttttgtattttatgcaaccaaaactgtcttatgtgttgagtattttacgtaagtttatgtatgagtctacaaattcatatttcgagtgtattattgtatcattgaacgtccatgatcttgttctcaacaaggaaatttattgaagtgcttgaagtagcaagaaggtattcttaacaactgaggtaagaagagtggacatatgtgcacagggtgtatgttggagcatacgactttattgtgggtttga

SEQ ID NO: 124608 - DNA, 735 bp, Cannabis sativa
aaaataatttccaacaattgactatgtagatggctttcgattttgatatatgatttttatctactctctgctgttttttttttttaaaaaaaaagtcaattgttagttcattgttaagtttttgtattgcttctcaaagtaatctggtactttttatttgaatatggttgagtgtgttgtattatatatatattccaaataatgttaatgactctattaggattgatttagagaataatgattaaataggggttgagaatatcatcaagaataatgatgatgatgatgaaaaagaagaaagaatgagcttttgggacgtgggatttgtgttggaacaagaagaatttttttaattatatgaaaagtagcaaatattttttacaatttaaaagtagtatttattttgtgtaggtataaataaatggtatataattgaatggagtatagtggagatcgaagtcattgaactaatcatatgttattcaaaagttgtttaataagattctaatatcacctacttttcattttttttaaggtcattaatcatatttagagaatgtcttcatctaattttaaatcatctcctatgaagaaaacatctaaaaatatgcaatccccttcttctacttgtggtgctaaaaggaagtgcactagtgaaactgttatattattttataatataataagtgtagattaaaatgtagtaatatatattattatgtgaataatatgtat

SEQ ID NO: 124609 - DNA, 1308 bp, Cannabis sativa
cgctcttccgatcttttatgtatatattaatattatatatttgaaatgaataaaatatattaaaaactaaaatataaagaaaggattaacagaaactggtgaaagatgtaatgaaaaaatttaccttaaaataaataaaataggaattcggtgatgtatttgaaattatagaaaaaagtagtagttgggagtagtgttgtaaatacatgtcgtcctataagtatgtactatgtcgtgttgtgctataagaaaatacaaatcaaattgtgttgtgctataacaaaatacgagtcatattgtgtcattccatggaaaaaatacaagccgtgttgtgcttcgtcataagaaaataggggtcgtgtagtgatgtactttgattcgcatcgtactcgaattcatgtcgtgttttgctcaggccgactcgttttatacaagctcaaatttgtactctaatttttcacattttttttttacacttgataagataaatactaaaataatgtattttttttaccgttttaattattttttatataattttacatcaaattatataagaaattcattattaaaatttgaatatttaatagattatttgtacttacgtcttgtcatgcattcttgtcgtagcgtatcgtgcttaggctcatatttttcatgtcatgtcaagcttaaacccatattgttcttatcgtgtcgtgccagtttgtaacattgtgttgtgtcgtgcccaaacttatattttttcgtgtttggttgtgctcgtaccttttggactcataccagtttcatgttatgtcaaaaaatccaacccgtattataacactagttgggagtactctaaaagcatcttcatcattaacgaagatgctttaaagaatgattaatgacatgaatatattttttacatcttttaataaatatttacgttaaagtaaaaaagaatgccaataaaaaatattattgtatcttattttttattattattttgtctgtaaaaaatataaattgtttaatatatgttaaataataatagaataaatattagtttggactctatgttttgtaaaagttgtaaattggaccctttattttgttaaatgataaaatggatattatattttctaaaatggtacaaataagaccctgaactaattttttgtcaaaataaaatttaataagaatatgatctaaatgtgtcatgacaaaactatttataatttttatatttatttgtgttaggaattgtcttcaagtttgttatattaagaaaaaaagttgtctaaaattaagctcaaggtcttattt

SEQ ID NO: 124610 - DNA, 1392 bp, Cannabis sativa
agagtgcacctctgacatctgaggtacttatttcaaccgagtctataatcttgaagggccagctgatgccagagctcaagaagcaccagcattggataattctactaaactttaattgttctaaaattttctttattttatttttcttttatttggggaacaaggattcccctttttaaatgtgcggaaacaatttatacccttgtcacacggttttcttagtacttggtaccacttgctaattcattagatatttgcattttatatcgtagaaattgctaagtctttagtgcttccagcctcgtcaggttctagttccaaaggcctgaacctttagttttttcaactaaatacttagacttaaatacattttttttatgaaaaagtgcttttgtagaagggtttatttgaaactctgaataattaattaatcttctgagaatttaccctttcctggcattcaccacctatcatcagggtttctttgaacttaacttttaattgacctgaatcaactgatttaagtaacttgaatgttatggtatcattaacctgaattaaccattaggcctgaacctttattttaagttaacatggattaaccattttaattccaaatatatgaaggcaatgacttactttggttccctgaggctccaatttttaagtcatatttccttttctcatatttggttaagtattaaataatcttcaaatataataaggcagtggcttactttcgattccctaaggctttggttttaggcaatacttcttactccaatatttgcgcatttagcttagctgttttctggcagaaagagaatataaatattttgcatagtaatatacatgctacgccccaaatgattaatggtcgagacttttgatcacttgtcacatgatagaacttttaaagaccaaatatgaaatgaaaatcttctttttattcaaatggttcttgccctaaggcgtacatggaaattaaaaagggcaaagtaaaaattaaaaaggaacttgaccacccccagttaactaatagtattggcgcaggtggttagtgttttaggctcttagaattcttgttccatctattctcttcatatggtgaattccatcaccaatcttgttagttatttcatacgggccttctcgctttggacctaagacccccacttcgggctcttgagaagcagggaaaacccttctcaaaacaggatcaccgattttgaaatttgttgctcttgacctttgagttaaaattcctggtaatttatttttatacatgtggagttgcacctatgactgttcccagagttcctcaattaaatctaaggattcttagagtagagcatgattatgagttgggtcatatgttgggttttatgccct

SEQ ID NO: 124611 - DNA, 840 bp, Cannabis sativa
aggcggtgtgggattgcacagcttacccagtgtttccccttacggattacgggactactgactgtcacaccgaacctcccacaccacacactaaaccaacgtccacattcatttttctcacccaaaagcaatgggtaagtactttttatggaaaatattattagtttttattatatttattgtaatttttatggatatgcacattcttgattgtattttgtccactttgtgttttgatttgaaagtagactatgatctatttttggtattttttttcttggttttttattttcttgcgatgtttaaacgataattggcaattttgtgcgattttcaaaggttagggatgaatctatgcgacatttgaacgatgctattgcgattttgtgcaaccgaaatcaataattttatgcgatttatgggcaatttttgcgcgatgtttgcgtgatttttacttgttgtttttcttgtgcgacattatgcgatatatttttttcttgtgcgattattgcgggataatgtttaattttttatggatatcttgttgccttttgtgtgcgacattatgcgatatgttttatttcatgtgcaattattgtgagatatgatatgctgattttttttttgtttatttttgttttgtttatggttttttttgatagattcaattgcatttatgcctatactatatgatgatgtttgatgagtatggcatcaatatgagttatgataaggcttggaggtgtagagagaatgaatttatgtatgtgaggggtactccagcagaatcttatacgaagttatatggttacttcggtaggaatttattttaccaggatc

SEQ ID NO: 124612 - DNA, 2110 bp, Cannabis sativa
taactcgtatcaatttcccttgaactgacacaacttttaaattttccaatcatttatggttaaccaccattataaagtgaattgatccagtctatacggtagaggcaacatcgctcatacatggtacccataatttacttggaaatacccatttcctacattctcaactgataaacaattaatcagagattatttcttgatctcaaagtttcttttctggtttggtagagaaatctttgataatctattcaaacacatccaaaaatatacatacctcaagtatattcgttgttttattgacaaccacttggtacgaacaaccacaccaacttatagtgattctcccgttgatggtgctgattcatcaatatctgagactctcatgttctttttccatcattaccactaagatttcacttcctggttcatacgctaccattgcttctttgaattcatcactatcttcatacttggttaaccactctaaaacttatattacattcaattatatagtttgttgtttaataaacaacctactttgtgatccaacattcaccaaccacttgaatacatgtccattaaattgcatctcagtttataagcttttcccattctgggtgagcataccttttcatcattacttaataagataatctttttcttgaaatttcaatggtcacctcgtataccatattgaccattcggtcaaatataaaagtattctccatcattaccgtatcaccatgagtaattcaaataatcttctttaccttagtgataccactactctccctaacgttctgttactcgttacttttgtaacgtcccctcttcaaacctctattgggtcttcccccacgaactaatgactcttatacacaggtacgccactctagccacttcctagattgatgactgacccttcaggtcaactcgagtgttcccaacgtgcgttgctctggctcgcacgcttttgagaaaacttcctgaaatgaaatcaccctaggtcaaggacacttaactgtggagtttttttcgtgataaactaccaaaaattaatatgcaccttgttaatataggtagtcctaatcaatccattcaagttccctacaaccatgtagtctcatacctacatagtctgagaatcactacatacgaccttcccctaggggatgtgggattgtacagctcctggtcttttccttgtggatcacggtctctgactgtcacaatttgactcatgccccctttgatcatttccccctggtagtgaatatatcaacccacatgatcgtcgcctttaattcacttaggattccagacaatattcataaatggtcccacctttactaacattagataacttctaaacaaaaatattttgttctttgaataaattagatggattcctccatgagctactcatgtcctatattacgcttgagaatatctaataaatttaactaatactgtcatttctctaatatgtctgccctgtcaaatgagttaccattaaatgacatacatgcaccgtccattcagatcttttgatgtccccccattgagtgtacaatgtttaataccaatataaattaaaatagcaaatataatatttcccataaaattctaacatgagtcggtcaaaggaccgatacctgagtcctcttgagtcataaccgccacttgggcaggaaccatacactcttctcctttaacatcagtctttcttaattgcgggcatgttctttttagatgacccactattccacaataaaaacaagatttgtcactacattggtcgatatggcgtcttttacatcttggacactcaagatatggtcatcatttctcgttctcaccttgactgctatcctgatcaccctggatccttttgttcagtcccataattggtggtttatttagtttttacttccaaatttgctcgtaagttagttccatatgtttcaccacatctagtggcacaacaggatgtgtcagtggtacaagaatagacacaagacatgtatattgttctcttagatctcggatctattccccttgttgtctaatcatatcatgcatagtggaatttacatgttcccagtgttgc

SEQ ID NO: 124613 - DNA, 843 bp, Cannabis sativa
tgttgcatgttaaatttatcacaagagtagaaagtttgcatgtgattgagatttatatatctaagaagactataaattaccttagtaaacctgtaattgcatacaaattgataatagaaatataatcatattaatccatattcaatagatacaattgaaatcgaagccctagtttttattaactgttaatttccttaaattgtttctcctatcactgtttttatttaacctattcttaatttttatttaaccaagtagaagtaaaagtttaattttaacgtacttaactacaatcctcatgggatcgacctcactcttggtgagtctactacttgtaaacgatacgtgcacttgcgtgttcaataatattacaacatccacactcacactgatacacactaaagcacatatttaaaaagttacaaaatatgagcaccaagacactttaaaacttggccaccaatagacactctaaacttggccaccaagactcattttctcacaattaataattatccaaaaaaaattacagctttacaaatatagataaataaataaataatttgagtcaaactctaatattacggacatctgcacttgtgctgattagattttatttcacatgtaaaagtaactgatctaatttaatatgcgcttattattatataaaattcagtacgtaagtatgcgtacgtaccgtttcaagtattaaaataatggctaattaggaattttacctcccgaattttgacatgtaccaaatcatgccccctgaactttcaaggttgttaaaaatgccccataaactattgagattgttggatttaaagacttttgtctaat

SEQ ID NO: 124614 - DNA, 620 bp, Cannabis sativa
aaaaaaagataaaaaatagtaaaaatgtattaatcaagtatgtatgcccccaagcgtactgttccaacttttagtgttgctcctggagcattctctcagtatcctgcctcaacaacagcttcggctactagttctccaaccaaacaaatcatctgaagtaagagatcaagcaaaggaagcacatgaatcgataacaagaaagggagtaagacacccgactatgagtagaatatacccagtatacagaattaatagacacccaagagcacatctacttggaaactcaccaaaatgtctatcatcgcaagcctccactgatgattctgacacctctccaagagggaccctaataaaatatgcgagtaccataatgatattggacatgataccaacaaatgtaagtccttgaaggacaagagtgaaaacttgatcaagctaggcaacctccatgaatgggtaaggaatcgtttagcacaaatgcaaggaggactcatcgggccgcaagtgccaacaaggcatttgggagggttaccgcaggcactaggtgttgggctttatgccataaataaaactctatttcaatgtaattttttctattcaattatcaataaagaaacata

SEQ ID NO: 124615 - DNA, 1208 bp, Cannabis sativa
ttccgaactcataatataatacttaatataaaacatagcatacgtgcatcgcacgtaacaatatactagtatatattaacatctcaataaaaaaaaaactttataccaacaatgattccatcatttcattgtttgtttactgttatttaaactttgtttacatttgtttctttttatttttcacaattaatggaccaaagttgcataaatagtgttgctttgatgccaaattattaatacttgcttaaacaattccggaggaagacgataaaactactttctaaagattgtgtacacttatcataagaaaattgacaacaatatcctaaaaatttgtaaatattaaaaaatatatcgataaaaaatattgatatttaattccttgctatcatcaactactttatatattaaagaattcttcaataatttgaagaaataagtataaaaaaagtattcaattaaaaaaaaaacaatagaagtcgccctttagactacttcattttacatcactatttttcttccactttgtaagttcacacatccttttctagataaataatgttaaaaaaatgagggaaaaaaacataaccccaaaaattattttaaaaaactcccttagaaaaatcattaaagaaaattaactaacttaagttttgttaatattgattagaaattagcatcatgcatgacctcaatatggaataacattatacaaaagttttacctaatcgatgatgaatatcacaactcattataattaaataataataattgtaatgagacatttcattgtcactcttggtcaaaaatgtatattatataaaaacataaaagatcaaaaaaaaaaaaaaattcataagaaagaatgtaacaaattactagaattaatgttcttataccataagtacgagaaatgctaaaaagtatcagtggtatttaacattattaatataagattgatattaatacaatttaatatcaaatcgagagcattgctattggacaccagtggtgcttagcacctttagacatgtcattttgcgattagctagcgatactcagaggcagatccacatgtaggcgaggcgaggcagtcgcctcctaaaaaaattgaaaaaaaatatatgtaatttaattaattacgacatatatttgtaataaaaaataatatttatagacataatattagttttagtgtaatggttaaa

SEQ ID NO: 124616 - DNA, 2239 bp, Cannabis sativa
tctggatcattcagcctacctgtcttctagctggtttctcccctcggacagctttcttgggaatgacgacgccaaccttttagtgcaggactttgctagggttgaattagattgtctgtgtaggattagttttactgctttgttcttgtgtgcgcaatttctcgttgatgtgctgatacttatttatttttcttgaagcagctaggccaatggacgagcttttggctacccttgctcagacttacagtcccgacccgatccagcctccaacacaagacttggagatgacctccgggaatccttcttctagcctccctttaagccaaattgttcttattgacgaagacggggaggtcgaggaggaagaggagggcgagattctcacccctctggaccggaagtgtaaaggcaagatggtggaggtcgaggctgccaagaagcccaagagagccgacactccgacccccagctctgattcggggatcccacctgaggcggaggagtacattgttcctcctagtattgttctgacctccgttcctgccgatgaggaaagacaacaacttcggattgccaagcccaattatgctatggcagaatacacgaaggggaacgcggaagtggaggctttgaaaaaggtcccaagggaagctcaggacagatcctctcgcagtgagtactctggaaatgcctgggatttaaacatagatccttcgacagactggttcaaccgcttcatcaggcctacccttgcttcttttgcctcagaactaacaagccacttcgtctccaacctgacccaatttttgacaaagagatatgcagcctgtgcttccacaaactcggtctaccagatccaggacataagtgcggccatgaccgcgataagtttctatctattagtgttttagggcttagtcttttggcgcttgtcctcacgtgcttacacatttttcttattttgccagattgttgccgagaccggtcgcctctcaaagactctgattgaccatgagtacatcatatccgagtttgggggcatggatgaggccatgaagagtcttcgggacttggcagcacagagaaaagctattcgggaggaggcccagcagagggaggctcttttggagcggagtcatcaggaggcgctaaaggcaaaggccaaggagctgaaggctaaggatgatgcgttgaaagccaggcaagcggctgtggccacggcgaggcgagagctccgggatgctaaggagtccgtgcaggaattgaccgccaagctaaagtctctagaagagctgcaccgagctgatttgcaaacaacagccaacctaattgttgaagtgaaggggcttcgtgaattcaaagagcagactcagaaggaggcggctaaggtgaaaagagatgtcctcctggccccaatcacctgcgaacaatgcaagaagcgtgttgatgacggagttatcatggcttggcagaccaatggccagaatcttaagctcgacttctatcccaagcctgaagaggtccttgttcgcttttgggaaaagaagaaaagacttgacgcagtgttggaggagcgcaggggccctcgtctcccaccccgcattgattaagccgattgttcaacaccaccatcagtgttatcttctctttttcttttcttttttttttattacatattcaatccttcccctttctttaagataatttattttcttttttcttaagaagagacacatgtggcccgtcctcaggatcttatttatctttttaaagcttttctttgagatctaaacagtttatatttatgtttgaatatatatatagcttttaactttcctaattttggtctatttacatttgtccgtgtgatatgccttactacccccctgagtgacatgaaaaatcaatttttaggtcgctcagttttacaaaattaagttagaggttgcatacatttgttcggtacaaattttctttacagaacataaactttatttttcaactattggtaattctcccggaggtgatcggtattccaggccctgggcaccatggttccgtccattctttttagcttgtaggccccggaaccgatttcgtcctcaatttcgtacggtccttcccaatttggcccaagttccctcactccgggttcttgagtagctaggaagacccttcttaggactagatcaccaatagtgacccggaccaattggtaggctttaacgaacaactctaa

SEQ ID NO: 124617 - DNA, 718 bp, Cannabis sativa
tctctctctctctctctctgcgcctgatcttcccactacccctctctctttcagccctgaatccctccgccactatctctcagccccaatcgctcataggtgtataggcgtcatccccaattgaaagcttttgcagccaaagcttcttctcatcaagctccaaaaaatcacatcaaggacctcaaactgcttctttcgtggttctagcttgggctcctcatcgatctttagtcgcacaatctcgtcctgctcgtaaatgtagagactaagaatcaataacttggattggtcttgatctgggttttgatgattttcctttggaaggagcttagctgtgagctcaccattgacgatggcgacatcatgggcaacgggggcgcatgaaccagggttgcgatgccaggcttgattgcaaaatggtgtctgattgtaattcctgaattcttccttcttccatgagagaaccgagctcaaattttactacgtcgagagagacaagagaggttcgagagcgagacagaatgggggttttctggttctagggacttagggcagagatcctgtttctccgatcttcttcaatgggaacgaccaacagtggccagtcaaaatgctctacaaaaactactacttttagtgacaatcttttagtcacaacataaatttttgtgactaaatgtgacttttagtcacaacaactaaatgtgacttttagtca

SEQ ID NO: 124618 - DNA, 1440 bp, Cannabis sativa
ctaataggtaggtcttataattaaagaaacaaaaatgttatattattataattataattaatatgtcacattcatccttttaagtacattctttattttccaaaaaataattaagttggaattttcctgcccaacttctcttcggaagaaaatcaaaagaaagaaagtttttgtatgtattttaattttggtgcatagacttttgtccaagtaattaaaaacagagacaataaaaagagtattttatcgttccttctattaattcaaagaaaaaaataaaattaagccaccaaagtcacattgatctttctctcatgactactttcaattagtagttaattaattaattaacctccaaatggttaattagtatgtactatacaggcccttaattgatcaatgttgaagacaaattatgggctacatcatatcgtatctacttaatttcactataattaaaaggaaaactagttaggtttgaaattgtcttttataaaaactaattaattaatttaattaattatggaataataatattggtactgaatagttattctgtagttacagaatatatctctgcaactgcaacataaatcaaaaaataaatagtacagaaaaataaaaacacacaagaggtttttatacgtgatgtcaacaatccttgtagattattactattccacaagaccatgtccagaaataaaattcattagataggtctcaaaaatacaaaataattgacttatgcataaatattctcactctcattgtatactacaagcttgatgtattctaccttctaactgaatcttgctaaaactttaagtgctcgaactcccttcgatctccttgaagagtgattacttcctatcgaggcaagacttgtagaactttctgttgaaggtagcactattctttttttttttttgtagacttgattgcagactcaacacaatttaacaaaacaccactagatcaggttattattgaactttattttgataagaaattattttattgtactattttgtaccattttaaaaaatgtaaggtctaatttattatttaacaaaacatatggtccaattaataacttttacaaaagaaatagtccaaaatagtactatttaccctaaaattttccttcattaacttgataatatgtcaccatatttgtaacacaatatattataggattaaaagttgaggcaagatttttgttgaccaattccattctgttcataacaattttgtgagaattttcatttttatggtttttaaggtataaatttacaaaaatgtgattttttttcaaaaaaaaaaattatcttatgggaaaaattacaaaaaaaaaggttaaaaatatctagaaaacaattttacccctcactgtttttcagggtttaggacccactcattttaatggcccaaataaaaaaa

SEQ ID NO: 124619 - DNA, 1957 bp, Cannabis sativa
cacaatatgtttaaaatcacataataacgcctatgctagttagggtgttacatgttttatattcttttttttttttagaaaaagacaatagttgttaatatatatatttttttaatgttatacaatttttgaccgaggttttcagcaaccaaatatctaatgtaataatgagagcttagggataattaatgtgggtaatttttacatggttcggacattaatgagtcgtagtccacgagtctctgttattaataagtgggtgtttcttacagagaatgttttttgtgtctttttctcccatccccccacaaattttggtgaggggtatttataacgattggtaggaagaagaaaatgggtaacttgtcttcaagtgccaactatgggcatgcacaagttcccaaaaagtacaaaatagggcatgcactacctatgcagtaggctgcttaggttttaggcgagattagccttcatccttccttgattgatgtgattcttcataatagagccgtcactagctcccttatttatcatgtaatcgcgcaaagtcaggtttacgacgtctgacacgtcctcttatgggtattcctagacgtttttcccatgtcacattaaatgcgaagtgactgttcacctccagcttaattggcccgaaggagtttattcgtcctccacctcccagagaagaagtggagctatttgctcttgtccgggagcttgcccatgaatcataattattagttctgagcagatttagttaagtcttctattcatctccgggtgataggtctctacctgccacgtgtcccacattgcagctgccacatatattgggagaaacttggggcaacatttaccccaagtcttatttagtcataagtaaatgagacttgtacactgtctccgacctcaataaatgcaatgacacatgcctcgggcgcgtgggcgatattaatgatcgtcatcatttgcctttatctctttagcaagcagcgattcgttttctgcttattgacatacccttccatcaatgccggtgtcagaaaggtacgtttcaaccgcccattctcttcatcatcctttttcatcccatccgttggatcaagggattttaactgttgtgaacccccaccgcacaatggtgttcactcgacattgcctcacaccctaaatggcctataaaagccaacacttccccaactgggtcatttctactgcccttcagtttctagatttccaaacccattcgacaagattgcagatacccctgatttccttttgctcttcctctgccgttgtcaggcaaagtactaccatcacacggcgtcttctgcccttgccttggctttactgtgcaattctttatgcatatatacttcttttaatctgctagggcaagaagtgatagtaatgtgtatgtttatctgctttgtttgttttcctcgaaatgacagccatggtcgacattggtgtaacgcctccttcggtgggtgtccaatgacgcgtgtctttctttattactagattttatgtactattttattatatatattgcttctttctctttttttttttaaaaaaaaaaagagggtcgaaatcgaagagttcttcgtgtgcccttttctagcagtttcaggcagcctttgcatgctttctatatatattttttaattttccagtgttgcttggatattttgcacccgatgtctgtctttgtgaatcgtttgattcctttcgacagtcatccagaggagtcctctttccagcagttaggggacccctattctcctttttgacttagggtttgatgtgggggctaactgttggatttcttgttctttcagatgagtgaagtccttcgtgatcttcacaatcacggtttctttgggttcgaccaagaaattcttgatctctaccacgatgtgttgggttttgtgccctaaataaaacccattac

SEQ ID NO: 124620 - DNA, 1007 bp, Cannabis sativa
cctataaaattgccttgtgatgcagtgtttatggagtatgtggttaaactcatcagacgaggtgtggcccaagatttagagaatgctttgcttaaatcgattgacactacttccttctcttactcatcatcaccattttcagcccacactgctagtactggccaattcgccagtcaacaaatcccagttattggttactaaagcaaaatagcactaattaattaattaactagtgtgtgtactactctagtctctgattgattgtatattaatgtaaaaagataattaatttcatatgatgaattcatgaatatataaatatttatatataattattgtgacaacaatttcattatcatttttgagggtacgacgcacaagacagattactattttgggatacaatataagtgagaacgtcaggcctcttaatgttataattaaaaatttcaaattatataattattaattatgtagttagcagagctcaaaatttcgaaagtatgcacatctctgtttgatcgtgtggatgtttaccatgttacacaatataagcccataactaagctagcctttaattatcaaattatgagtcactacaaaaaaataattaaaattacttacgattaaaatatactataatttagttttagtcacaacaggtatatattgtgactaaaaacataatcacaacaaattatagtggtatttggtaacactttaatcatttttttatttttaaaattgaaaaagtgaaaatattttacaaaaacatgtttagttttcatttttcaatcttttaattgagaatcaatttttttttttttttttttttaaaaatcactttcaatatttttttaaaaagtttttctcctaatcaatattttggactatcacaagaccaagacccaaatctcccctcggccctggtactaaacccggcctcagatccgaacccgaattcgaccccgaacttagacccgacttaaataaaatttaaaaataaa

SEQ ID NO: 124621 - DNA, 954 bp, Cannabis sativa
atttaagacattctacaaaaatttgaaaaaatttaacttgccgaaaattattagttaaatataacaattgtggtgatttttgttaattaatatgatattttttttattattttataacaaaattaatataataataaagaatatttttttagtgtaatttttggtgttatggttggagttgaaatattttttgacaccaaatttgatgataatgtaacaccaaatttggtgtatctttggaaatgctcttacattctaaactctttattcttaatttttttttctcaaaagaatatttggttagggtcgtaatataattcgggtaagttttctgaaatttatgaataatttgtcatataaaaaataaagattatgatattttagtttaatttttccaaaatacatttcaaatatttttatttattttttatgactatattttcttcagtataatataataaaatatttatatatttgtacaaaattatttaaattaattttgtatttttcgctaactatatttgatcacaaattaatatgtgataagagtaaatattataaatatggtcagctttcgatttatcgaatcattcatttctcgatttgattttcttcgttaattatcgtaatgtacacaaatactattatgaaaaaaaataaactaaaatattctatcgaatgtcgaaatggataagacataccagaataattctgaagatgtattatagatttttcaagtaatactataggaagcttctacgatacacttcaaaaaaaagtgtaccgatataatcactctattttggcatgtaggaaaaagattaatttttttatgatcatatataagtagttttttttttttttggaaacatcatattgtgtaaattgatttgtgtttatttatgtgtgtgagaaatatgaatgtaacgccctaatgctaaggcacgctacagt

SEQ ID NO: 124622 - DNA, 806 bp, Cannabis sativa
aaattaactcaagtaaagaacaatatgaatccaagtatgacacaaaaagacttgacctatcagttgttggtacaatacagtccaacccatatttttttatggtctagcatagcacgatttgtatttttgcgaacttttaaaatacgagccgaatcggcacaacacgtatttatagctgacaatgtcacctacgacttaaaaacaaaacttcaatagttattccctttcattacccaaatcttaaatgcgttttcacccttagtatgttttaaaattcacactacacgaaatatcttttttgttggcgcttttagtcactactacgttaattccctttccctcaatcattaaacttagacatgataagtctttcatgtctattttgttgctacacgtgatatccaggggcataaaataggtatttttaaaaaatatatcatgtcaccattgttggacactgtaaatatatatgtgtcgtgccataaatatgaagaaggaagagaagtggctggttcgaaaatagaaggatggctcaggaaaatttttactgaaggcaagaaatttcatcatctttaagtgtgagtcatcactatctatttataggcaaccacctaggtttaggttaggatttatttggaattaaaataatagaaaaattaagtggaaaataccacttaagtggccggccatagtgatggccccacttgggaatttttttcacttttgacaaattttccttattttctcaaaaatactatttttccaattctaaccatttaaacgccaaaactgtttatttaataatt

SEQ ID NO: 124623 - DNA, 835 bp, Cannabis sativa
aggaaagacgatttggtaatcctaacaatttaggagtaaaaatcctagccattaaaattttgacaatcccccaacatatctaatttctaagttcaaagggggtaaaagtggtagagttgctagttaatgagcgggtacagtccaagaaaagggaatttttcctataattcccagctatcttattaattattaaattttgttcttcaaaaaaaaaaaataaataaataaaacttggtggttataatacatgccaataaaaaacttgtggcacatgggacacttttaaaaatcattattttataaaagttacacctaactcctccaaaataaaaattgaaaaaagaggttacactaacttgtactgatattatcaatctaatatttggttcgaaggtgagatcacaaattaataaaaaaaagctatgacctaaatttaagttgtatctaactaatcaaatttagatattaaaaataaaaaaagaattacattaaaaatataaaaaaattacttttatcataattttacttatataaagtatagtcaacatttatactttttttttattattttatttatcaaaatccatcttacacacaatttgcatgcgtaaaccaacttcaaaatacaatcctcatgagtatgtaatgctcactgatgagggagagccaaaaacttaccaagaaattatcctacatgagcatataataatgagtgggatggaggcatgcaagaagagatgagttccttgcatgaaaatcacacatatgacatggtgaagttgcctaaagggaagaaagctctaaaaaaacaaatgggtttacatgcataagactg

SEQ ID NO: 124624 - DNA, 1775 bp, Cannabis sativa
  modified_base (1711)..(1715): a, c, t, g, unknown or other
atttggggtccatataacaagtccggatcgactcccatgtccacaagttccataaaagcaatacacttatcaaatggatgaccaatcttgccacaataaaaataaaaaactaggagattttcatatctgaattccagccagtgttcatccatcacccgaggcagagacaccatctttccacacatcagaggttgagaaacatcaagatgaactcgaatccgcagaagagaaccccatccttcatgaaacgagtcttcgtaaacctcaataaactcccccacccattcacccactttcttggctaaagcacgggacttgctaagaaaagggaggcgatgagtttgaacccaaaattcagcaaattgaaaatcctctttggaaatattctgtaaggaagttgggaaatgtaataggataagttgattgaagaagttccatggttcaccagaggaaattctttgcttatcacctgcacaagccaaagtcaaaaggaaaatatcagaatgcatctccgacactacaacttcaaaacgacatttattgctccagaactctcctatttttttgataaaagtcttcgggttaacagtattagagaggcatcgagcaacaaggaaaaatttgggaggctgatttggatcatgaaggtcagattcagaaagggagtgaacattcctttctttttcagacaaacagagagtggaattcatgtcttctaagatggattccatacaaatatcagagaaggagaaagagaatagaaatcggagatacaaatcatacagactattgtgatatttatatcgtgcttcagaacacaacatggagaaagtggtgcaactagagatgaggcactggaacgggaagagatggaatagtgggtagttaaccagagtcatggaagaaggggagaacaggggaggaagacgaagacgagaacccagaaaaccagggagataaccgctagtaactgcaacagagcaaaaccctactccggcacaaaaaattcaacattaacgatagtcagagtatacttgagttggattgtacttgagttggattgtttgggaactccagttcaactttttgagatctgcattttgtggatctaaaaattatagtcagagtattagttttatgtaaattaaattgatttctggtgttgaattttagttttgcagtagtttttctacacttttttgtcatgaattcgaaacaaccactgttttgatatataatatatatgtattaaaattaactgcaacgatttaactttttgattagatacatataagtgtattttagtcaatgtatacacttaaaagtcatatatatcaagggttaagaaaatatccttatactgtgagaacaaaataagaatgcctaccataaaattattcttaatattatttcaggattacatttttattcctattcaaagcatttcaaattacaaatttgtccataaaatctactgccaagacaatcagtaaagagaacgagttatagtacgtatattttatttttttaaaattactgtaaattttttatcagtaaaaagtatagctttatagcatgtgtcagtagattattatcactttttaattaatattgtccacattaattattaatataaatattactatattgttgtgtgacttgcagatggagcctatacgtaggaagagttataataataataataataatnnnnntaataataataataataatagcattgctattaggcaccagtagtgcctagcaccttctcg

SEQ ID NO: 124625 - DNA, 887 bp, Cannabis sativa
catcaacattcattttcaattttgacaaatattttcacctttagtttagacaaaaaattataatcacttttaataaattgattcaaattatgtagacatttgactattataaaaaaatatatgtgtgacttttttactattttagtatatgattatcaaataaaaataaacatatatttattttttttatgtgattttttttttcaaagtgtggctatgtatactgtatacatgattggatccgtcctgatgatgacacttgcattcaaggacaaacagacgtatatttacaaatatattggcttaaatgtatatttccattaactaaaactaatatattatgtctggcataaatatcattaactaaaagattaaaaatgtgtattgactttctaataaataagtttagcttctaccaaactaactaattaaataagaacatatgtataaaaagactactaaaaaattataagtaggaaagaatgatcaatatcaaattattattatgtaagcataagatttcagtacaacttagatcaatatcaaaagctgaagataatacaacttgaactaataaggtaatttgaactttttataatgtgagattaactttttatattatagttttgtataactactatttttatactttaagcatacattaataaaattgaatggtatagtgtgacagtccgtagtcccgtgatccgtaaggagaaatactgggtaggctgtacaatcccacatcgcctgagaaggtctagtgtgatgattctaaggctgtataggtatgatactacacagttgaagagagcataaatggattgattggtactacctatattaacaaggtgcatcttgtttttcagtagcccatcacgaaagaa

SEQ ID NO: 124626 - DNA, 904 bp, Cannabis sativa
attattattattatttcttttctacagctcacatcaccagtttccatttatttatttcttttccttcacattcatataattcgcgtgtccaccacaatcttcgctttaacgatttagactaaaagtttgactccgaaaaaaaaaacgaaaaaagaaagtcagcatttcattccgcaccaactaatcagattatgccacgtaatcacatacataaaaatctctctacgtgtcatctattggattaaagaaattatttccataattccactttatcggtggcaaaatgggtttctacacaatagacgaaccgcacgaaattttacagattaaacttgaaaaaaaattagatgtgggttgaaacagaccaaacaagacacaatttgtttaacataaatttttgacacaatttttttttaaataaataaaaaaatattaataataatatatttatataaaaatatatatttagtaatttaattttaaatcaattttttttaaaaaaaattaaaatattttaaaatttttaatttttatgatacatataaaaaaactatatacacaaatatatgagtttttttaatagaacttacatttttttattttttctataattttagcttcaataataataaaataagataaagtgggttaatacaaacaaaacacaattttttaaaagtcaaattagagtaaagaaaattagacacaagtaaaaaacgaatcgacacgcctaatacgaaatataaaaataagtcaaataaaatataacacgaatacgatcagggacggacccatttagcccctactaacaaaaatactgccttttaaaaaattaaatataatttttcaatttaataattataaaccaaaatagtagaatagcccccataaaattagataaatt

SEQ ID NO: 124627 - DNA, 1097 bp, Cannabis sativa
aatctggaaattctcatattgatcggcgaggttacccaacacatgactgctagaagccataacacccgaagcaacaccactggaagtaactcctcaacaaccttaaacgcagcagaacaacacaccacacacagataaattctgtatacaaaacaaagaattttcaccacctcatacgtataacacactcaaaagagagagacttgggcgctatattatattatttgtgaaataactgtaaacttgaagaagttcttatttttattaggttaatttagagttttacatccccaattggcacgtactaaattttggcttcaaatttattaggcccttaaaaacttcatgtggcataatatgagacatgttaaaatttgagagcataaatttgagagtgatatatatatatatatcaaagtttaagtgacataatttaatacataaataattagtatattaataaaattaaaaaaaaaaattagacaaaaattcttaaatctacctatctcaataatttgtgaatttttttaaaaaaagttctaataacacgattcgagacttttttttctcaaaaataataaaaaaaatcttcaatctccaatagaaaaaaataacaataataataagagagaaacattaaaggatactcgtggtacttaatatctttatacttttgtggtgtataatatcactattgatataactcaatatcgaatcttacttattttactttaataaatgttaaagaaaattgttaaccaattataaagcgatattttatcgtaatgctagacatcataagtgtccaataacaatgctctaataataaaatcaaaactccataatagttatgtttaggggtgttatgcacctatctagtgctagtattctagaggggcttagagcatctccaatcatgctctctaaacttacgttttagttaaaataaggagcgagtcataaaaaaatgagctccaaccataaaaaaaaataagggaacatgtatgtacattatgaaatgtactcacctcaaacatgttagaaagtacgttcttcttcgctcttaatctccacccacaatctgtatccttacatgt

SEQ ID NO: 124628 - DNA, 1917 bp, Cannabis sativa
tggtaaaataattccaacacgagtctgggtcccaattctgttagataaagtagttacaagtttatatactccgaagttagttctttttctattacaagcttttgctttcctaactaattacggttagtttcagctcaagctaactaacttaacaacttgtatttaagggctcttcaactttatttagattcaatatataaatcattttctcagttcttcctttatctctctcatcttcaacattgtatcagagtaaaaagcattctgctattttaacgtctctattcttcgttgatcatcgttcatggcaactccagcattcaatccagttgtttccttgcacaaagtttctatcaagcttgatgataaaaattttctcctccagcatcctcaagtttactctacaattttgtggacatcgaccttagaacatcatctttgacacatttattcctcctgtcaaatatctcaaccaagaagatgaagttggaggtcatttaaatccatgattcaggaatgggaggttcaagatgagctcctgtattcttggttgctttcttcaatgtctgatagaatccttactcgaattgttggagctaaaacttctgcttaaatttagaaaactctggaggtatacttcatcacccaaacttaaaccaatattgaatgtacaccacacaactacaaaactataataaaggctctctcatccaaacctttgattctcaattgtatgcttcatgtttctcacatcacaaaaaatctcatcttagtttctcaattttctcatgacgataatgctttctttgagttctaccctaactactgcaatgtcaaagatcaggtttcaaaggaaatcttaatgataaggcaattgaagcaatgtcttaatgtcatagagccttccctactccacatatctaagagcatcacttcattcagtccacatgttttgtgcaatgtttcaaataataatgtgtactctcctctgtatctgcttgtaataatttctctttgtagcacaaaacacttgcccatccttctgctaagattgtacaatctattatgaaacattgtaatgttcttgaaagcaataaactacacgctgacttttgtgatgcttgttacaaaggaaacattaataagtttccttttcctttttctcaaacagtttacaacaaacttttatagcttgtcagcactgatatatgcggaccctcacccatgttgtcctgatgtagatatagatattatgttcatttcatatatgcctactctaggtacacctatgttttcttattaaagctcaggtagaaaaaataatttgggaactctattcctgctaaaagaaatggtattgctaaaagaaacacagacaattgattgaaatagctttaactcttttagcttgggctcatatgcccttatcatattaggacgaagctgttcaaacaacttattacatcattaatagactcccttctcatgtcattcaaaatgacacccctcttcataaactggtcgacacaaatccttactattcaacactaaaatctttagatgtgcatgttttcccaatataagacattataatagacataaacttgattttaggtttgaaaaatgtaacattcttggctacagtctcaaacataaagggtacaaatgacttgcaacctcttgtagaatttacatttcaagagatgtgagtttcattatccttttgctgtgcaatctgaatctactcatgtaccctataaccatgattttgtacgtccttctgcctgcataccaacttttgttggccatgttcaagcaccaggtaccccacatgctactgcctcatccttatcatccatgcctacactagattcaacagcggttactgttggaaattattttaccatgatctagatt

SEQ ID NO: 124629 - DNA, 1979 bp, Cannabis sativa
tttaatataatagtttttaggaagtatcgctaaccaatcgcaatgcaacatatcgagaaggtgctaggcactactggtgcctaatttttcacaaatgatcttaattccattaatttcataactttgattctctttctaaagccaaacgttataataatttagattggtttaatacattatgggacaccaatttttcacaagtaatcttaattccattaatttcagaactttaattctctttctaaagccaaacgttataataattttttttaatagaatatttatttgattagaacacacagttttccatgagaaaaaaaataaaacacagacagtaatttaaaaaatttatacatatatgcagtaaaatttaaaagacccttacacaaaattaaggcctaaaaaaagtaataaatctataaaaaataataatcatatatatgattttaaaattattgtatcattgtcttgtagtcgagattacgttaattcacaaccgttgtcatcactgtatctcacttatatattcaaagtcattattgtcatcatcatatctcactccactatttataaacaagttacattggtcgtatttggattttattttttggtacaatattaaacaggttgtgttcaccatatacttgtaatacatgtgttgacacgaacatgacccataatgaacacaaattgccacactttttaatgagatcaaactatcttacaactatttgtatcattatttaagtcggtaaaaaaaaatactttatgacaaaaaaagaatttttttttttttgaaaagttgagtttaggagaattaaaaaaattacaaacaaatatgaaatagaatgaaattattaaggatagaattttttatttatttatttttatcttaattttagggatagacttaattagagagatttttaaaatttaaatgataatatattatttattacttaattagttagatgtatttttctaatgcttctaaatacagtttttttttactatacatatatatatattatttttaataataataataataaaaatattttttttgattgctacctattgtttttttttattagtttattcgatatttttttgattgctattaataataataataataataatattttttagttaattaattaatatttataaaaaaaattaaaaattagataaaattattataagtgattttagagtgttatatattaatttaagtaagaaaattaagaatagaataaataaagttattttgagtgattttagaggtgactatctcatacttttcttatacatataatatatatatatatatttatatatatatattgatatgtatgttttttcttcaataactattccatctattttttttaacaaaattacttgaatctattgatattttgaataataaaaagttttaatcttttttttttcaaaaaaagtttgttttattttatcattattttatttattttttaaaatttttattaattctctacagtatatatattaaattcaattgacaatgttaaatttaaatataaaagtttatttaacacaatatttggtaatttttaattagtaattcttattaaatattatttttttcttaatgtttttgttagtatcatcaatttttccatgtagggttgtgtgggatttaattagtttacaaaatatagctaattagctactaaagttatatatacattataaatatatataaagatttactaaaaattgattaaaaaactgataaacaataataaattaaacagtgtatattttaattattttttttcaattaaataaattttatttttataaaggttttttttattttttattttttacacttcaaaatatattttttttatatatttttacgaaatttcacacaaaaacccttatatcaactaacggagcaacctaaatcgcaactaaaattcgtatagcaa

SEQ ID NO: 124630 - DNA, 1869 bp, Cannabis sativa
  modified_base (1818)..(1833): a, c, t, g, unknown or other
aaataacgcattaaacaagtattgaaattaaatctgtttctttattgataattgaatagaaatgattacattgaaatagagttttatttagggcataaagccaacaaatacatggggtcccagtaacaagaactattgagacaagtttgggagcaacaataggaccgacatcggtgccggaggggcttcggtaggttgttggcatgtgtcttttaaattgaaaaaattcttgggccttcatcacaagctctgacaaggttttttgtcttgtcctgtgctcctcaccccacaaccaagagctaattgttgaagttgattgggagagaaactctcgtggcctcttgaagcaaggctacgggtcgtcatcgtgaaaattggtgaaaatgccattccattttttgaacttttcagtgtcacaaactatgagattccttccctagagcttgtcaattgaattgtcatgggggtcattacctagtagccttgcctttctagccttgtcgtgtttaaagtcgagatacattttaaggtccaccataggctacctatcatcaaaataatgttccatggtcccaccgtcttggttgacaaaatcaatagagtagtcttcttcggccttgggctcaggcatttccatatttttccctttcagggtggttatgtctctatgagcaaaagggcattcaagctcgaaaagcactggtggcattctgcgttcttagagggctgagccattggattcatgtttttctaaagaggtatgggagcagtggggactctaagatttctcatgttcacctactttcctcccttaacacgggcataggtattggtattagcagggctatttctattattctcaacaacaccttcaactgacgggtcttcaacatagcctcttctggcttggatctctagaccttgcatgtagcaagccatgacctttctccattttttagtcaagctcctccttatatttaagttttaggcttatgatagcagcaacactataagtttagacctttcctcagctctcaatgaaagcagaataatgtttaccgagattttttaaaaccaattaattatagcttaagaaatacataaaataataaataatagacacataagtttttatgtggtttgggagttaataactcctagtctatgagtctattgtattagacatacaggcatgcgttgaatattacaagtgtttacagtatgcacataaactctctattcctttcgttcctcttgaaaaagaagaagctcgtaacaattttaacagaggttctctaggttaaaaaattgttctcccctttacatgaaaagtaagggtatttataagaggtttcttgatcaacacgcccttaggtgaaccctactataggagatctgattgtcgacttggtaagtgaccgctccattgtgcagtgaacagaggtaatactagtgttaggacttacaatacgtgtaatcaccctcttaaaaggccactggagaatagacatgtatggtggtgcgcatgcatcatactatggcctgacgtggaggacaaaattgacgttgtactcgaaaaagcatcgtcgtcacttcagcggttgacaagtgcaggagatgaccttctgcgacactgcatgggattaaaacccattatgagtcttttcgctacttacatgaacattatggtggtgcgcatgcatcatactatggcctgacgtgggggacaaaaatcgatgttgaactagaaaaagcatcaccgtcactttagtggctgacaagtgcaaaagatgacctttgttggaatttattttaccnnnnnnnnnnnnnnnntcacaagtatgtttattaacactctaaatatgaact

SEQ ID NO: 124631 - DNA, 1537 bp, Cannabis sativa
aggtgaatagtaattctaagatgaaaatagattaaagtaaaacctaatttagtgatcatctaaatgagattaaaacaataatcatggcattgaacatagaagaacataaataattcaatataatagaaaataataaacattcatcattaaaattaaaaattcatgtcttgggttttaaaataacccttaactaaaaagaaactactctgaactatacattataataaaaatcataataaaagtaagagtttaaggagaagtaaaagaacaatgatgtagaaaaatcgatgacgtaatctccatcttcttcttattctctctctctctaaatttctctctcaaattcgtagttcaaaggtactaaatttcgaaccctaaaagcctatatataacccctaaaaatatctcagttttttttttaaaaaaaagataaaattcgaaatctggtagaatttgcatcctcgccgcagccacgaggagcctcgttgcggccacaacttcttgccaaaaaaatattgtcgcgtgtttagattagtattttggtcataacttctttaacacaactcaaaattggacgattcaagatgttccgcaaagctgaaaacgatatatctacaacttttatatccaactccaagtctagttctacttccaaagtcatataaatcgtatatacgttcagttttgtcaaactgagctcgtcggcttctactattctccactaaaatgtgctaaaatccctccaaaagactccaaatataagattagcctttaaaatagcctaacaaattataatcacactaatcaataatttaaagaatcaatttaagaatatttaacataaattggtcatatttataagataaatatcgacttatcaaagccttccttacttaggcatgctatagtgatttacaaatttctggcacgcctttgctaatcaaagagttttttcgaaacgtgacaaattaaactttaactttaataaatacataactttacataatttctgggatctcgtttaaaaatttacagctgtatccaaaatacatttttctcaaaagtgtcacccagtgactacaaaatagaagcccatgtcatcccaagaccgaatactttaggtctaaccatcctaatatgtacaatcatcctcaagctctatactcattgatgctcaacatctgtctttcctttacctacacatgcaaacatatttgtgagtcgacaaactcagtaaaaaaatcatgaaacatataaacatattactgacttgtatctaggtgcccatacacctatttacaaggcttaacatatgaattaagaacattcttaatagaagtacaacatttataccacatgcactaagtactcgtcacatactaatgttggtagggttaatccgtacctcaagcacaactgagcattataccgcacacactccgtacttgtaccgtactagtgttggtaacaatgtctcatactgttctaaacctaaaggtgttatgtggttttaatatttatactcgcaagtgcacga

SEQ ID NO: 124632 - DNA, 1642 bp, Cannabis sativa
aaaaaagcctgtaaaaagaagagcccctgcgtaaaaagaagaaggaaggccaactgacttgttgtcaaggtccggccaaaggtcaggggctcttggccagatgtattgttaagacgagggtttacacccttgagcgcccaaagaaagtgtagaagatgaacgcacgtggcctagaaacactctccgtactcgcgctcaccccaaaaaaaccaagatttggctagccaactccctggtaggatgaccgaccactagtatcctcaagcacgtgttcctcgccgtccatacacagacacaacgaggagcaagaggtgttggggccagccgacggtgctaagaccagatgcatttacgacgactaactcataaagtgtcgtcacatataatgaacctagccatcccaaggcttcagcgctggtgctgaagcgagggccagatccattgttgatgactacgtcccatacctttatgctgagccatgaagttgatcggaaattgatcctgtaatcgcggcagctaagaggagaccattagtaccgtcgacgtctgctgggcctctggtccggcctggttatggtactttttgttgaggcaggccattttcggcaaagttcactcagaaggtctctgtcatcacgatgtaactacaaccctggagttacatcaaagaaagtaactcgtgccattaaaaactagttagggaaactctaccaaagtagcattcatcctactgggggagtctttccaaaaaagctaccaagtgccttgccatccattggaagaaactgactacccaggagatcataaggcgcatgcatgcatctcttggagcttcccagagcttggaagacacatgtgcatcacttttcgtgtgtgaaaggtcactaggcatacgacacgtcttcaaccctccatccaaaaatggaaggactgcttgaactctgttgcacgcccaaagactatttcacccctttgatcttttcaagcaaagtcgaagcttgaatttttatgcgatgtcagccttccctcatggaagccgaagcttgcttcgtaaaacttcagcatgactctcgcgttcacaatgtttttcatgcgtgaaggatcaccggaggcatgacacatctttaaccctccttcacgaaatagaaggactgcttaaagtctgtcttactccttgtgatgctttcaccctttaatcttttcaagcaaagtcaaagcttgaatttttatacaacttcagccttccttcgcggaagttgaagcttgcttcgtaaaaattcaacatgactctcgcatgcacgatgtttttcatgcgtgaaggatcacaggagtatgacatgtcttatacactccttcccaaaatgaaagggctgcttgaattctgtcttaacccccacgatgccttcaccctttgatcctttcaagtgaagtcaaagcttaaatttttatgcaacttcagccttccctcacggaaggtgaaacttgctttgtaaaagttcaacatgactctcgcatgcatgatattttttattcgtgaaggatcaccaggggtatgacacgtcttcaaccctccttcccaaaatggaaagactgcttgaagtctgtcttgttgggaatattttactaggacctagatttacta

SEQ ID NO: 124633 - DNA, 2212 bp, Cannabis sativa
tcagtccataactccaaacccaatctcatttcattttttttcattggcagagatttgtgatcttcatcacttctcatcactttgttctttgtcgatgctttgttatgcatcaaccaagaagtgaaaaatttctccccaaagaggatttcagcacccctaatttcgaagctactgaacagagaattcattgtggaaaatgttgttattaatttgtgaaattaatttgatcaaatcctaaaatgagcccttgaaacttgaaatagagagagtattagtagtagtgctaagtacgtaggtaggcagtaataatatttgagtttgtgaaagaaaaaaggggcatatttatagagaacgaatctacttatagttccttattccttttaggattaggatttataatagtactgatttttgaattaaatttgaaaaaaaaaatgatatatatacatatatctgatactattttagtttaaatcatacaaaataaataaaataaaatcttaaaaaaattcgaaaagaactagatattgtcaatacattttcattatttatttatatataaattaacaagcccctttcgtcaaaaataaaataaaataaaataacaagcccctcggttaaaaaaaaaaaattgaagatattttttcttatatttaaatcttgtaaatatatctttatatattaaaagtggctataaaacggtaattcttgatttaatgattttttgtaacgtttttatttttttttataaaagaaataaacggaaggttaacgtcaatcgttaactccctagaattttttaacttttttttatttagaatctttagtgtataatcgatcccctccataataggatttgattgtctatccaagtaccaacaactttttttgcgatattttctcctttttttaagactctaaatcaaaaccttctaaagaataggatctgttcaaccggttccttttcaatttcagaatctgtaaaatcgatggcctacacacccatgatatctttttcgttttcttcatcgcctacacactagaactgcacttcgacaccacaccctttcttctaagctttctcttttgaccgattccccactcaacgcttcctttgtgtaagtttttatttttctaccctgcccctttgtctctgattgagtcacactttttttattcttatgtgtagtctttttttattaaagacatatgacatattttgtgattattttgatactgtagcttcagatgttccaatccgatggtaatcgaactccaataaagaaaacagtttttcataattttatcaaaagagaggagagactccctggtacgataacctttgtcgaaccgtcacagatcttcctcttattgaaatgggtgtcagtggtgtcactagcaatccaatggtatttattattttccttctttctatcattattgttcctcacttaggattaggaacatgcatgcacaaatctcacttctttatttgcaatatctaaacaggacgaaagggtcaactccaattattttatattctttattgaattttgtctgatgggattacccctaatcttctttttcgtctatttgtttcaagcaaccccctaacatgtttttttataatttatgaaaataccagattttccagaaagcaaatttatcttctaacacctacaatgaccaatttaggtataagatatactaatataatattctttgcactataagaatcaataacttattcaaatatatcaatggaaaatataagttgcgcaaccaaagaagcaatgtcaatatttcaaatgatatttgctacattaaaaaaatgaaagaaacctagattttgggtgatatcacattggcatagatgcttgttgacgattagaataagcttgaggcctctgggcgaaatggtctctcaatagtaaccagtgttgcttagttctttgtcggtagggttgacactcttattgataagttggtttagaagattggaacacatgaggtccttgatcttccccgaaaggtgaattatttttattacttgtcattcagttttttgagtgtggaattgagaaggtagaagaatttgctcacatatttctaaataacgtagtttggctgcagtagctcaagcgagccgccttagcttactaactttacaagaagaaattttctagccagtgactctgtggtggcctccacc

SEQ ID NO: 124634 - DNA, 1519 bp, Cannabis sativa
  modified_base (206)..(207): a, c, t, g, unknown or other
gattgtcttgcttctcatatatattttctttgctgatttaattatgtgagtttgtggtaatttagtgaaccaactgttcatctctcgtgctgtaagaaataaattttgttagattaattgttaattatacataaattttatttatataagtcaagtatacctgtccttcttggttctttttcatttccttttttttattattattnntatttatttatttatttattgtgtgtgtagattgcgtattctttttattacaagagtaggcaaatttgatttttttgttattttggcatatgattctctcataataaatcttgtaattggtcaattatcgttttctattcatttatttcttttaaaagaaaataattaatggtggctggccggggaataatgaggattatggagtttattgaatacagaagatttgtcttcatcgtttggaaatgacacagacaattcatcaacatatcataaattttaatgaaccaaattaaataataacaaataaataaataaataaattctttgatgattagctaaaatccaaaagttacctctcaattttttgtttttttttttctttttgaatcgaattaatgctgcatttatatacacttgagcacaagttcagtgtgtattcaagtgataaggattctcaaatctagcttaagttgacagccaaaaataaaattataattttttgtgtggaatatattctaaattcttacaattatattttctatatagaaaatgacccaaaactaattaatatttcttttaactatatcgatgtggaagttatacagctttaattttccatctttaataattgcatcctggtcgtgttaaactagtataaaaaaaataaaaaaagaaatacttaaaacataatttacaaaattcagtatatatagaaactataaagagaactctccctctttcgattaattttattttagagaggattaattattttttaaaatttaggagtttcatgtacatatatataaatatatattttgggtaaataagtcaactgtcttctaatcattatggtctcaaatcatgttctatccttgtcttctattttcttatgaattctgataattacatgtatttagcaaatcgaacaaaacatttaactatatatatgtacttctttgtcgaaagtgttcaccaaatcatatgtacaagtttatatatatacatattgagtaccaaaatatatctatattatcttgctaaatttagaagaccttgaaatctacattggttggaaccaattccaacccaaaagctagctatgataggcagaagaataagtgctcacgagtctccggttctatgtccacatcccgaattcttaatctatttatatatatatatatatgcgagttacgtggcttgctacgtaaatattagttttattttaagttcttgtggtttttgtttaaaaatttagtgactaattgtaaattatattataaataatatgttttataaaactaattat

SEQ ID NO: 124635 - DNA, 2348 bp, Cannabis sativa
  modified_base (1627)..(1638): a, c, t, g, unknown or other
  modified_base (1950)..(1976): a, c, t, g, unknown or other
  modified_base (2183)..(2185): a, c, t, g, unknown or other
agacaaatgagccttcacaattggggttattcatgtgagggagggttcggtttaatatgtcgtacccactactatggccccctaactctcacagaaggcctaaaaggattggaatttaaccttaattacacaactgttattcattgaataagcccaatactaattggacctgaataaaaactatcaaaagtgacatttttattttagcaacctaatccattttaattatcaaaattgaatgggctcccgatatgcatctaggcccaaagcaaacatataggcacaggcacacactaatttggatggatcctatcatgttactaggtttatacacaaataaaagaagattacaaaatttacatgttacaaattatttatttgacctgttgacaattgaactattggttaaaatcagatcattggatctatcagcaagttaagcaatttagatcaaacaataatagattttataaaataagtttgaataataaacaatatataaaacacacacatgcaacattttggatagtttgatataagatttatttaattttaattaattaattaattaaattaatttcgaaagatctaaaaaattgaaatattatttttgaaataattgaattaaattaaataattaattttcaaattaaacctataaatttgaaaaattaggtttttaacaaagttaaatatctattcaaaaatatcaactaacttttaaaaaatttatgttatttttaaaagataataaaaattaaatgtctaataaaataaaatgataaataaatatcatttatccaaatttataattaaatttaaataaaaataacaaaaatttgaaagttgataaaatatctggttagattttcaaagttttctagatcaatttattaaaatatatcttattttaaatttcaaataaggttattttataaaattaattatataatgtaaaatataaaatatttgaccatatatttaaaaataagacaaactaattaaattttaaaaataagataacaaattaagcaaaaaaatatttgattttatccattttcaggttcaaaagctactaatatctaaaactacacaaaaaaattaattaatttaaaactgataattagatttgagatttgaaaaataaaaatctaaatacaaactacacaaaaaattcgaaattaatcccttaaaaaatcttgaaaaattgaaaaaaaaaattgtatttggcacgcatggtatgcaatgcataccatctacgcgcgtgtccaggggagcacaaccaagaaacctcagcaaatgaggttaccaacagcctttacgcgcatggaatggggtttcaaacaaccccgtgtgcgtgttgtctcgaacaagtgttgtccaaacacgcgtgacacttgagtgccacgggtgttctgtgcgcgcacgtgaggtgatcccacccctgatatttttccaatttcaaaaattcataagtaattcaaataaaatcgaaattaagttcagtaaataagtgaattgtttaatttttttccatactatccaagaaagataattacagaacgagattccaattattttatgtaaaaatttcgtaaacatcaatcaatcatcaataaacacatannnnnnnnnnnntcacatccaaatcacacatacattgttttaaatctatatttcttgaaagtaaatcatggctctgaggccagttgttggaatatattttaccaggacctagatttactaacaactatgtttattaacatcctaaatataaatttctaaaacaatgaaacttaagcacatataaagtttgagaaatcttacattggttgcagcgaaatataatatctccttccactcagatctctaacccttgttattatcaagatttgagcttgattctacttccgttgtttggaatcttcacagtattacacactatgattnnnnnnnnnnnnnnnnnnnnnnnnnnngcactcaatcactaaggctcaaaatttttatgtgaagaacactcaaaggattcaaattttagaagaagaagaagtctcaaaactctctagttgtctaacaagatgtaaactaggtttagagtcattagtttttggattatgagactattcttttctttttaaactaattcatatagggttcggattgaattatatggaataaaaaannntaaaataatagcaaaaataaggggtaagtggccgaccatatgtgggccctacaataattatattttttgtcattttttcaaccatttatctattatttcacaaatgtcatattttcaaatttcaatcctataaatgccaaaattatttatataataattataa

SEQ ID NO: 124636 - DNA, 1534 bp, Cannabis sativa
ataaaatctatgcctagaagtcaagaagcttctatagattgccattagaaagaaaatgcttctatagttgaattgctgaatattatactaattgttattttattcactgttcttgctgagtctctgtgactcacgagtgatttatggtgcaggtaaagggaaggcaaaggttgagcagccatgagtttgaggtcatagcagcaatgtacatattagtcgcagtggcacggcccaatgagcaggaggctctattttgaatgtattttggaaatgcaaattttatgttgtaaaagcactattaaactagtttgtaaatattacttatcttttataaaaaaaaaaaaagttatatgggtttgttttagttataagattttaattacccacactttcgatataattatatagtgtataaaataagaattttataaaagcacacacatgtggtgtccctattgtacagtgcgttacacttacattctgggaaggagcgttaaagacgtgccatacccccatcgatatttcttgcacaaaaaataacatgcacacaagagtcttgttgattttttttgtagcaagctttggcttctaggaatgaaggctgaagttgctaaaaaattcaagcttagactttgcttgaaaagatcaaaggagaaaggatcacggggcgtacgacagaactcaagcagtgcttccattgtaggaaaggagggttaaagacgtgtcacactcctagtaatgtttctttcaagaaaaaccacttgcacatgagagtccttttgatttttcttgtaactagcttcaacttccaggaaggaaggctgaagttgtgtaaaaattcaagctcaaacctcgcttgaaaagatcaaaggagaatgcatcatgaggagtaagatagagttcaagcagtcctttcattctgggaaaagagggttgaagacatgccacaccccaagtgatctttcttgcttgaaaaaccacatgcacacgagagtcgtattgattttttatgtagaaccctttggcttccaagaaaaaaaggctgaagttgaataaaaattcaggctcagacttaacttgaaaaatatcaaaagaagaaaggatcacagggagtatgatagacttcaagtagtcctttaattttgggaaaggggggttgaagatgtgccacacccccagtgatctttattgcacgaaaaacatcatgcacggaagagtcctgctaaatttttatgtagtaagcttcgatgcataaaaattcaagcttagactttctaggaataaatcaaaggaagatagcatcatggagagtaagacagactccaaacagtccttcaacttatgggatagagggttaaagatgtgccacaaccccagtgatctttcttgcacaaaaaacatcatgcacgtgagagtcctattgaatttttatgtatcgagcttcgacttctaggaaggaaggctgaagttgcataaaaattgaagcttagactttgcttgaaaagatcaaaaggagaaaggatcacggggagta

SEQ ID NO: 124637 - DNA, 1380 bp, Cannabis sativa
  modified_base (1280)..(1284): a, c, t, g, unknown or other
aaaaaaaaaaaaacaaagacaaaacgtccatataacttaaaacttatcataatttatatattatatattttggcttttctagtctttgattgggttgatttagtttgctacgtacgcctacgatcattctattgattttgctcattattatttaagaaataaatcgggccttttatgtatagttttattttgtttaattataatttaattaatttattcaaaaaataataattaaattaatgaaaaaacaaaagagaaaaactaaaaagaaaattagagactaaataaaaggtaaataattttttttttcataaaaaaattataactttattaaatttaatttataagtcttattaaataaatgtaccgataactctaaagaaatctagacaaagaaatcatcatacaatttttatttaaaaaaaaatcaaccaaagaattatctttaaatgttatagtaaataaaagataagcagtcaaagaatctcacacaaaataaagacttaaaaaaaaataatcatatgattttattatcgttgtcctcactatatctcttttatagttctcgcaacattcatagtcaatattaccatggtatttcacttgtggttgtcattactgtccaacctcatattttgtaaaataaattaaataatgagttaactattcacttttatacatgaatcattctattatatttatatatataaaatatttatatattttatatattttactaaaaataaaagaaatgaaagaattaaggagaaaataaatagagctatatattttatatcaattaatatttgtgaagctaataaaaaattaaaaaatgagagaataaataatactaattagagaccaaattttataatgtcacgttaccgtctcatatctctcttttatatatatagaatttatgaagtgaagctaaacttattattttttttttatatatatatattgatttttttttgtaaggcagttagttttttgtaataataataaaatctctaaatagatgtaactctattactattgtgatatggagagtaaattactataaattgaggtgttctttagttaatatttttccgcttgccgctatcacttatcagacaacacggagttgaccattttttagcgtcaacaatatatataaatatatatattaagggtccaaattctataaagaatcatgggtcagggtaaaatttttatttactcttatatttatagagtataaaggaaatagaacattacaaaaaatcttacttttnnnnncaacaaaacttgtgactaaaaataaaaaaattgtgactaattataaattatttttcctatgttgtgactaaaaaatccgtggctaaaggtattagt

SEQ ID NO: 124638 - DNA, 1238 bp, Cannabis sativa
  modified_base (1176)..(1186): a, c, t, g, unknown or other
ttttttttttttttctctaaatttttgagggcagttttatcccatgtgtcacgggatttgaattctgcagcacatggtttgacaaagcatacccttcggttagacgatgtgctatcctgattcaaggaagtgccttcgccgattgtagattgctactttatttatcatgtgtaattttgatcagcgcattaaaaaaactcttcttttgtcttcttctaggtgaagtggagctaccattttctacttgcacaaactaatccctaccattagtaaggtatttggttactgatttattttatagtaggggaggagttttttttggatattaatttttttaatttaataagaaaaaatatttaaaacaaatcaagtttgagtaatgagcaataaagataaaatttaatagaaaattaacaaccgggtttttatatgttatctacaatgaaatatttatgtattcatttacctgctaaaatgttgtctcaagtgaataatatggtttctttttctaatttcctttattattatatgaaatgggtaaaaatgaaaatacatattatattatatgtgtctgaattcagtggttgaatcttgaatatgaaaatgaaatgattgcttggccgattagttttattactgactttctataatgaaactctcctaagagaggttagtctgtcattatcatctcacatcattttagtttctcagcttttcttgcccatagtttatatggatccagtaattaatttatatgcatgggctaaccaaattaatccaattacattttatatattttcttgtcatttcccattttaatattatgaagtttgattgaattggacgacccctcttttttactttaattttgttcatttaaattataacaaaatgcctgttaagaatcactaatattaaaattaagttcaaagtgaaaagacatagaaattctataagggcggcgcaacaagcaaaagcaacgacattctatcataacaaattggtctttattttctcaatatactttctttctttctattttttttttctttttttgattatttgaaatcgctttctttcaagggttttttttcatttttacacttcaaattttttttttttcttctatttttacggaattctatgtaaaaacccatattgcaactagcgctgcannnnnnnnnnnaacaaaaaatcgtatagaaacctctgtagcaactagcgctacaaccacttta

SEQ ID NO: 124639 - DNA, 1652 bp, Cannabis sativa
atattttttttaataatggggtgtatttataagtttaagggtgcaaatagaactccccaaattatatttgtgcactatatattaataattacagcctattattaaaaaaaacaatattaataatttttaaacattactttaatatttttttaaaaaaaaaaaaattctcagagtattatatgttaattttaatacttatttatacttattttaattttttttttatattttttttttctaaaccatatatgtatatttttttatttttttttaaagaaagtttcatttaattttttattttaatttttttgttataatatttaaaatataatttatctttatttattaaatatattttttaagaatataaattaagagaagaaaaataaaaatacgtatacaattaaagagataaatattatataaataaaaattattataataaaatttctttaaaaaaaaattaaagtataaataaaatttccctaaataaaattttgtaaactccttaggtgagagcatcacttttgctctcacttgtgaaagcatttttatagcgtttgatttataatttgatgatagtaatttatttagttataatatggaatacatataggattaataatttttatttattattattgtaacataatatatgttaattaaataaaaaaaacttcaacaggttaatcgaagcttctaagtttctctctcgcgtatacaaaggagtatggtgttctctcttttgcaggtcggcgattacagggattatgactcaactgtctctgtagggttcacagtcgttggtttctcttctccgcgctgtcgacgactggcggagactcttggtctatgaacctttgcaatctgcttggtttcaggaaaaagaaaatccttgcaatgtgctgacaaattgttttcaaaagtgtttggttcttgcctaatattggaaacttagagtattagagtattgatttcgaaagtgttggttctcccctgctcgtttcggtcctgattagtattagtattaggattatattagtattagcattatactagtattagtattataatgattaatttttaatctaagtattatactagaattagtttttttttaatcgtcttgtagtattagtattatactagtataaatgtcttgtcttttgacatggttttataatttttttaattggtttttttttttggtttttggcgttagttactggttcttgttctgagtttgttcggatgtccatgacatcgaataattatcaacgaatggaggcagcagagaaaatggcagggatttttatgccaaaatggcaagtgcgcgcaacctgaaataattgaatttgttggcataaaagaagctttaagctggattgaccgtcattcgtggggccaagtgattttagaaactgatagtttaatttgtgttcataatattcgtactcttctcttatctttaaataatgttgaattgtgttttgtcaaacgatctgcaaacaagctggctcatgttttagccaagaattcttgtttctctccaggtcgtgtgcttcaggtggaagattgtttcaacgtgcgttctattgttattaacgattgctagttaataaagttgctaaattttattcaaaaaaaaaaaa

SEQ ID NO: 124640 - DNA, 659 bp, Cannabis sativa
gaaagttgtcatataagaccaattttaataactatgcatttagggaaaaaattaaatagtattttaagcataaaatttcaaatttccccattacaaataatgcactcatacttcatttatctatttgttttgacatccaatataaaaaaaaaattgacatccaatataaaaaaaaaataaataaccaatataaaaaaaaaataaataaataaataaataaaaaatattaagttaaatttattttttatgaaaattttataatacaacctttgcttaagaggtgcaccgatcgatacattaaatttaaatttatttaagaaaatataatattttttagtttaatttattaatttttattaaacaattttatatttttattggatttttaataatttttctattttttaaaatatgtatttctaaatataaataagcttttcttttttttgctaaatcttaatttgtttaaatatttattacacatttattagatttataataatttatttgatttttcaagataggtgtatgaatataataaaggttaagtatctattctatataaagtgtgcctatataccagaattcttagtttacgagaaattcatgggtgattttttatttatattaaaaataaaatggtttattattaaaaataa

SEQ ID NO: 124641 - DNA, 1652 bp, Cannabis sativa
aatcactcaataatatattagcaaattaacaaattagtttatatagatatataacaatattgatataatatgatatgtgtagtgcacttacttgaagtgaagagttttttgcatagcttgtgttgccatcaccacttttcatgatagggagaacttgttgggcttccatattctattgttcttcctttaattgtgtggatgagatatatagtgggagtaatacatattgataaaatcgatggtgttacttaattatgagaatatgtatgattataccacttgccacgtacgtcaaattgatataataattttaaatattgaaacgaaaaggatcactcaaaaatatcataaattttttatcactactaaatgtatgtttagtcacaaaacttgttacgactataattaaattaggaaaccgcacgctttgcgagcggttgtattttatttaaggataattaagttaacgatcaacaaatgtagtggctcattcctttgcaagggcctctatatctcaccctgatcgccttttcaacttggacactgttccggttaagctgttaccgagtttagtaacgaagttattcgtttaataaatgatgactttcatttttaaaaaaaaaaaaattataaaactgtacatgtcaaaaaaaaaggttatatataaaactgtatataattttaaattttaattttttacatatatatatgtatatttttaatagcataagtaactattttactaaactttcacttttttactcacataaaaattcatcatacaatgataatcatcgtacaaaaaagagatttaaaaaataataaatgtatagaaaattcattatatgattttaaagccgttgtcatcaccgcatcgtaattatatatagtcaccactacattcaaaatttactatcattatcgtatctcatttatatagtcaataccctttgcttcgaactcaccatataactcttaatctaaaaaatagtatatagaaaatttaacttatattacgattacctaatccaaaaaaaaaaaaaaagagaggattaaaaagaataaagattaaaaatgtcaactgttagttaagtgttaattatggtttcatgaacggaataaaagattgaggtaaatcaatggtgtgattgaactgaaattctatattattattggtgaaatttttgttcataactattgtatttatcttacttgaaaattactcatgtttcggttgattgatttgttttatttaggttgtgttatttttagttgttagtcttactcgagggcgagtaaggatttagtttggggaaatttgttaggatatttttagcctagtatttatgttatttttagagttaattttcttctttattatcattttttggaattaaattatgcctattttcgtaaatttcaggttttgacacttagattgtataaattggtcaaatcttacaaaaagatgatatataaaatagagaaaattgtacaagaaaataaacctaaaacttcaagtctaaattagactatgttttgatcaaattttggagaaactcaaaacataaaagttctagatctctcttttatctttttgtaatagcttgaatcgtcaaattctgagcaatatcgagagagttatggctaaa

SEQ ID NO: 124642 - DNA, 729 bp, Cannabis sativa
gtttatcttgaatttgaatttcattaaactaagtgtaattttcttaaattaatttcaaaataatctgatcaaaacttaatttcatatatttcgaaattaattatgttgcttaacatctcagtttttattttttgaattctcaacttgacacaatgaatgtgatcacaacttattgtgttacaaaagacaatctaagatggctaaggactaacctaacttaactcactactacgaaatgcctaattttcatcagtcaacgtgtctcactaaaatggttgaccgaagcaagaaatagatagagattttatactttagtggataaccgaagctaaaagaaaacaattagcgtcagctactattgtgacgctaaaagaggaaccgaggaaagtgaaaatttttaaaattgtctttcacatattgctttggtggaaaaaagaggcaaatttctttggcttcgatttcaaacagaggttaaaaaatttgcgactgttatctaccgaagaaaaaagatttaatttttgtatatataaaatatacaatgggcttcgagtccaaataataaaccctaaattaaaagataaactaaacctaaatatcacacagccatacctccatattttctcgattgaagtgctcatcggagaccatcgagatgcccattgccaatcacctagacaagaaccaccgcacagccaccccaccagtcatggtactctctctctctctctc

SEQ ID NO: 124643 - DNA, 2002 bp, Cannabis sativa
  modified_base (1955)..(1962): a, c, t, g, unknown or other
ttttttttttttttttcttatttacttttttttgccaaaatttaactttcaaatatagccttatagtacatacagaacattgtagagtactcattatctattaacaaaatatctatttaatatttacaattatacgctatatcttttgtttgtatgtttttgttttttttttaaaaaaaattaggaaatagctcgcgtgcggtataagaagatttcacttaactttatggaagagtgacaaaacttgtcatcgtgtgttatgtttgtgttatattttatttgacatatttttatattttgtattaggatttcaagattcaatttgtcacaaaaaatggtaaaattctaaagttatataaatggcataaaattccaaatgagttcaccaaaattaatctagggatattaaagggagtcaatcatctcaaaaaatttcaaaaaggtcattaatctcatgaaaatctcaaaatgatatttttacctaaaaaatttaaaattgcactaaaattcaaagccttaataaattaaatggcattcaaaaagagatcatattcatctcttaatcaccaaagcatcacaacatatgaactaagtttgatttgttcccatttgggatacataggcaacttaattgttgaaattagttacaatcacaaattctcgaaatctcaaacgaagtcattcacctcatcaaattccaaatcaagtcattcacctcaaaaatctcaagtgaggtcatctacctcaaaatattaaagtgagttaattctccacaaaatttttgaagatacaaattttttgaacgtttgcaactacctttaacttgattccaataaaagaatacgtatgcaacttagttgctaaggctaagtcaccgatactggaaaaaagtataaaatacaaatctcaaaattccataaaaagtcatacacctaagaatttttccaaacttttaaataacaatgaattcttgaaagtggtcatatacaggaatttttatattcaaattttaaaataccttatcccgtactacaagtggcttgatccttcataaaaaaaagtatgtaggcagctcgattagttaaatttattgagttcagttgcaaatctaaattcaccttaaattttctcacattatttcaaattatttaatatcatcgtaattagaatcaaaaggtatttccttaaaacaaaaggattgtaattaagagatcattcttaaaatcgtcaaacttaaattaataaactctcatgctataaattcggcataagtgaaattatgttttgtatttatttattttttttgaaggcaaaataatttttattagccagcaaattcagctaccaaataaggtagcagatcagttgggacatccccgaactgaaactacgatcaggatgtaaaatggaagctcttggaagactatgagctactatattagctgaccgcttaacaaaacaaattgagatatttttcaactcttgaagaatacatttacaatctgaaataacaataccaaataatgaaatcatcttcacctgactccgaagtgcttgcaccaccctaaggcaattggtttcaacaaaagcttgctgccttggtcttctcttaaaccaacttagtgcttctcgaactccaattgcttccacaagagctggatctaaggcttcatggaacatttttgtgaaaccttcaatgaagaatccctttgcatccctgactactactcccactcccgctcgattcccatcgtcgaacaacgctgcatcaacattaatcttgacactattctcaggtggacatgaccattgctcagctccatcacccgcctgaaaactaagccatgatatctcaatttgagatttctgagcatttctccattggtcaagatagtttctcgccaacacaacaatatccgaggcacacactctttttgtaaagaccgcttagcttnnnnnnnnaaattagcagttaattaagatttaattatgaaaattattt

SEQ ID NO: 124644 - DNA, 1888 bp, Cannabis sativa
  modified_base (45)..(47): a, c, t, g, unknown or other
  modified_base (1823)..(1823): a, c, t, g, unknown or other
taatacatttagccacggacctttagtcacaacataggaataatnnnttataattagtcacaattttttagcttttagtcacagttttgttgtgactaaaagtaagattttttgtagtggattagatctttttttttttagtattttagtgtaaaagggagctttgaggtagtggttgtggtagttgtagctccggcggccgatattagaagagaagacattgaatctcaacgtctatattaagatgaaaatctaatctttaatagtttatattaaggtacattgcattattttttattttgtaaatttttatggctttaacttgtggaaggttgtgagttctttgggatgcggtggtgtggtcggatttgtggtcggtattggtggctgaattttagtaataagataaacatatagtctttaatagttttgttataattttttttggattggaatgattttttgattaatgaatgtgcttatgttaactaatagttttgttataaatgtatgatttttttttaatattaatatgttaaatagtgtgattgaaaaataaaaagagaaactgaaaatgagataggagagtattgaagcaaaagtttagaaactagtttctaaaaaatatgttagtgagatataatattaatgtgttatttttttttttcaaaatagatgtaaaggctataatttcaatataaaatgagaaaaaaattaacttgtttatctattttttttatgtgcatattaaatttaatttctttttttctattatcatcattcctatttttattttttttactagctagtaactagttactaatttttattaatattcatatatttttattagtaactagttattcattagtaactggttagtaataaattaactaattactcataaattatacacctagtaagtaattaaataatttaatttttaattttgtagtatttctttatattataggttgtgaggtcaatttgcaaggatctgacttatttggtgttgatcactttctagctagctggaggtatacattcactaagttctactattaattaattatgaatggaagattgaagaaaacttatgatattgtggaatgaggattctttcaagagatgttagaggctctaaactttcctattccttttgttgatttggtcaatgagtgtgtttttatgccgaagttttccttattaatcaatggtactttttatggctatttctcttctagaagatgtcttaggcaatgggatccctgagaggagtgacaagggatgtcacctctcggcttagaattcataaaaatagagagaggtgtttcaggatggaacttctcgcatatgatgccacatgggttgtggcatagctccccaacatcccattatagttcacacttaataacaccaatcaattctcgagtaaagtgtgctagcttgtcgtgtgagtcaattttgagcccaataactttataattgagctatgactatgagatacacttagatctgtcttgaaaagatatttctatttcaagttgatccaagttattttgataatcattgagagagttatgtttgttatactgaagggcagtatgtacttttttactctaaatctgaccactaccacatccatgtggcggttctcggccgtgcatgttttcgcacccctcggggtatgttttgacttgttttttgatggtgaatcatatttttggagtctcaggaccccaaaatctcatttcgacgtttgaaactctaacaagagaccactgccagttgtaaataaatacttaagtttaatttttggcggnaataatacctaagttataattttaaaacttttgtaagtacgtggttaaataaattgccacgtggc

SEQ ID NO: 124645 - DNA, 818 bp, Cannabis sativa
aaacttttcttcagctttccatgattgagaaatttgctttatttggaattcaaagtgttaactgactaaccattttcaccaacactttgtctcttcattcctttactatctctctctctctttgaactcttttttcagtcaactacttaattggtgctgataaaattgaagtgtaataatcagaaaagtaaaatgactatacatactaaatctgaaaatgaaaaagagttgcaatacacttaactctaatgttagatgagaagagaataatggagagagagttcattccatcacaaaaaagggtataattacaagaaaaataataataataattccatgcacttacattttggaaccttcaaattacaaaacaataatgtttcaatgggatacaattgtacacaatttatcaagagcttttataaacagcagcagaaaacttcaccatttttagcaccagaagatctctgctcaaattctttgtgaattggcagcagcctcgattggtcggttggctgtttcttgcttgacagtcttcctaatttcttggaatcctttgaaagcctttcttcttagaaatcaaagaacttttgaattgtttaaaagaaatgtaaatccaaagctttgatttgattgatgaatagtagtatagttctctctgtaaccaccaaaaccaaaccttggaattggaaaaagacttgtactgtttttttcatggtgggactctactctttcttagacacaaaatccaggagatatggttgagatgatatatatatacatatatatatgctctctcttttttttttttttaataa

SEQ ID NO: 124646 - DNA, 1763 bp, Cannabis sativa
  modified_base (1688)..(1692): a, c, t, g, unknown or other
ggattggattggatcggataatttgtgaacacccctactaaaaattgaagaatccttacacaaaattgaagcttaaaaaaaagttaatcaataaatctataagaaaaaatatatcatatatataatctcaaaattattctatcattgtcttatagttagaactacattaatttaaaattactgtcatcaccgtatttcacttatagttgtcattattatcatcatacctcattgtaccatttataaacaggttacatgggtcgtatttgaatttcattttttgacacaatattaaatggattgtgttcaacatatacttataatacatgtgttgacacgaacatgatccgtgaatacaaattgtcaccatttttaataagatcggactatcttctaactatttgcatcattatttaagtcggtaaaaaaataatactttatgacaaaaaaattgagctactcataggattgttgcttgagctgcttaaataatttcttttaatattttttattttctcactttcggggaggttgcaaccatgaactggtgttggcattttcttccattttttcccttatcttaatgaagtcacgtgtatcaagggttaaaaaatgtatgtatactatgagaacaaaactaatgttcctaccatagaattattctatatattaaaaattatatttttaaaaacataggttgtttgtctaaaaaattactgagaaattatcggctaaataatggagaatctagttgtacataaatccaaaacgaatgatgagtctaaagtacaattaattcaccattcaaacagctaagtcgatggaagattaggatgaagtttcattatgatttgtttaatttttctaatagtattctatattaagactttaattaataatttttttctctattttaagatgccactttttctttaatttttgctacctaatgtttgctttaaattttacaaaacatatatattgttgctttgaatttttcaaaaataaataataaatgttaaagtcatacattattatgacttatcataaattatttcttcacatcaagaataattatattatgattatgtaaatattacaattaacatatttttttattattaatactaatgtacatattataactttatatacacaactatattttactaactaaatacaataacacaaagattattttaatagaataaattattcatataatcatacttctagttataaaaatctaaaaaaaaaaactttaaataaaactaatatttacgtggctcgacacgtaactttcacttagtaaatatatattagatgtgaaatattatatatattttttaagaaattaattaattgtaatcaatttacaaattactaaaaatataaccttttggctaggaatgccggttcgtatgcaggtcgtagttatagtggggggcttgtccctactgatttgcaagctattattgtagctgatttgcattaataaaacaacctttttttcaaaaaaaaaaaaaagtaaaatatattttaatttcatatgttcatttaattcttttaagaattagatgtgaaatattgtattttttttataaattaattaattaagcaacaaactataatatgtcataagaaaaaaaaaaggaattatcccattactattttttttattttttttnnnnnaatttacggtttggatttctaaagttgttgcagcgctagttgcaataggggtttctgtacgattttttgtt

SEQ ID NO: 124647 - DNA, 1098 bp, Cannabis sativa
aaaaaaaaaaaaaaagaatccttcaattgaatatcactcccaattaacctctaacaatttttgtacagagattctgttaagaaatatatcttcttcaagaattgtcttcttaacattatacctctcaataacttacacagtcttggacttggtggaattttttcagattaatgattctacataatctatttcaatattaatagagaatttggttgcacttatagaaaagaagttaatttcatctatttagagaaaatataaattaatatacacaacatatattattgaatattcaaatatgaaatggtagaatctaaataaataattgtctttaaattttttaatggtagtagaagtactatcataacaaatgaatcgccatctttcttatataaatttggatcgaacctctcgcctaattttctccataaaattatctttaatgtgacaaaattatacataaaattaacagaacttaataataagtaaatagaaaaataaataaagtaagatgtgtataaaaaaaattacaacacttactaatatttataactttgatgtctttttttaaaacgacttccaacaatctcaatcacaataccacataagcttctaataatatttatataatgaaaagatgtggaatattataaagatgaataattgaataaatttaataaatataaataaaatttaataaataaataaatacttgagagtattgtgctatcatctattaaatatgaccacattagagacttatccgttctccatttttcttagtattgaaagacttccatattctccaatctctaattttaaaattaagtggtaaattgaattatagtttaggatatatatatatatatatagaattaaatgatagaaaaaaaatgatcatttcaaaatatgttaattaaaaaaaaaaaagaaaaaacaaagcgagaaaggcaaaaaaaaaaaaaaaaacagaacgatatattaggagttgtgttatttaaaaaaatgtcacgtttaaatattttaattaaaaaaaaaacaacgccaaaaattcaaaaaaaaaacgtttttgttataaatattaataattatgtggat

SEQ ID NO: 124648 - DNA, 1720 bp, Cannabis sativa
tatttaattttgtgggggctttttctactattttaatctataattacaaaattaaaaaaattacatttaattttttaaaaggcagtatttttgttagtgcgggttatagcccccacatcaatcaaagtgggtccgtccctgattaagactaaacattttggctgggtttaatccaggctcggtcaacctgcctagacccgacccggtcgtgtggtaaaaccctttttatgggcgggtcagattcaacccgctcatttttatcatacgggttcaagttagtattctataaaatgctcagatttggattggacccgtacccgaccataacccgccacattaattttttttattatcaattttataaaaccctaaaataaaatctaactttttatgtataatttgcatactacttgtaatcgaagcttttattatttaagattattgtatagttatttaacttttaaaagttttggtgtaatatgagaaattataaagcttttttttcttttatatttttatagtcttttttttttttttttggttcttcttaggataggttacaatttataatttttttctattttaaaatataaaattaggaaaaaaaaaaagagttgatcgggtcaacccgcctaactaaaaatccaccaacccatgacacatgaacgagcgagttcagtttcacttcttttcaccgaaaacccgccaactcgaaatccggtcaactcgcccgatgttcagttctgcacttaatattatatattaaaaattgtgtcaaattgaaccttaaaccatgatttcttttcaaaaaaaaaaaaaaacttaatctatgatagaattttgataattgaataaatgttatatatttgatgtgatttttttttttttttttttaaaaaaaaggtgttatatttactatacaaatgattttataatttatttacgaacattattattagtatttggtacctatttacagagtttttcacaaattagatataaagaaagattaagctaaagaaagaatcaaatataaataaacacaagattttttacgtggttggagcgttaatgaatcttagtctgtgaatcaatagtattatcaatgatatttttcgacacttttgagcagagttttctctctgtaaatataaggtttcgaaccctattaacggtgaagatgatgccttatttataggcagtcatgcaaaataggtcgggctgacctggatccgtaggattactctaagtttaaagcccactaatggggtatttccatattgttatgagattgggccttagacttaaggtccaataccaaaagtgataggtgtgagacactatttgaaggtactcttaagagcatatgtgtccggatacacgtggtcctttggtgcatggggaaacgacagtgttagaatagtgaccctttcaatcccaaggctgattgtaccttttagcaaaaacccattccttagacaagacaaatgtagcgccctaatatttaaggcatgttacatattttttaatcattgtgctaatctttgcaattcaaaaggttgtacaataaaaagtgtaatctttactaaagtaaattgtgtttaaacatttataaatggatcttgtttctaactaaagtattgttggaatatattttatcaggatctaaatttaaatatgaattctcttaaacaatggaattaaacacatataaagttta

SEQ ID NO: 124649 - DNA, 2008 bp, Cannabis sativa
  modified_base (789)..(789): a, c, t, g, unknown or other
gaaatctatatatgccgcacacgttttctatcaacaaaacaaaaacaaaaatttaaatttattatatgaaaatttatttttaattgtttttgaattttaaaagagtaatttgtggtcaagcttttaggaatgataatttgtatttgcggttcgtgttgtgttaaagtttaggtattataagtaaatgttaaatacaaatttgatttatttattaattgtgtcaaaaattaaaaattaaactcaattcgtttataaagagttgattcgacctgtttatataaataattatgtttaattttagttaaattatcaatttattaatatatttataagaaatttaacatgtttagtgtttataatcttctcatgacatatttctaagcatttcaacatgtttatatgtcctataactataaaatgtaataaatataataaatttaagaatgtatatttttatatgtcattttcgggttaaataagtcaactgaaaaataacccatttaatatacgaattagttgtgtcaatccaaaaataatcaaaactcatttattttatgggagttttgagtcgtgttatagtgtctgactcaaattgttactcttatgcactatgtttcaaactataaaaatttaactgacactttaaatttataagggtaaatattattttgaaccatgtgttttgtaaaagttatcaatttgaccctctgttttgttaaatgacaaaataaatactgtattttctaaaattgtaaaaatatgatcctgaattgatttttttgtcaaaanaaaacttaataataatctaatttagagattttataataaaactggttacatttttttgtatatgttcgtgttagaaattgtcttaaagtttgttatattaaaaaataaaattattgaaaattgagctcaatgtcttattttcattattttagaaaatataaaatttattttatcatttaataaaacagaaggtccaatttgtaacttttacaaaatacagagtccaaaatagtatttatctaatttacaaataaaaataaaattgaagaagtattgttacttgaaaaaaaatataaaggagtttgaatcacattatccatttaaaaaaaattaaatttgtgattgttttattatatttcagctaaaattttaaatattcatttggattttattttatgagagtcaactaattaaagaattataagttgggtccattatcttaagttttgaaaataataaatagcagaaatgaaccgaccaatataatttgtttgtttgctattaatgtttttgtttgactttatacgttaatccattgactacattttgctatgggactttactcttacacatgacacatgaggtgttttgttttgttttcttatgtaaatgttgttcaaaaatagtattctaaattgagaagaaggtcacctaaaatctagtatacatccaagtgtttagccttttagggaaaatcaatgtgtcaaatgccaatcatataaatatggtatatatatatatttgtgtctataattagaattcctttttgtctatgtatgaaaattgaatactatagtatagatgtacagggagccttgtgcacctaattgaagttaagagagaaactgaaaattgaaagttaagagagaaactgaaaattgaaatctattctatggtattggaagtaaggatgcatatttttttcatgggaatggctttgtgggaccctcttttcagtggcggaactagacaaagactcaagaaaaggccaaataggaaggtcaagcaaattgtatttttacctttttctttttagaaaataataataaaattaagctatttaaaaattttataatcttgaactattatgatcgtatcataccctttaaaattttttctattaaaacatgtcaatgtagttgatattgttgaccgaggttttcagcaaccaataaaatattataagattatagagctataagaaaattagagaaggatt

SEQ ID NO: 124650 - DNA, 794 bp, Cannabis sativa
taggattaaacactttctttgggagaacctacgaatggttcttaagcaaaagagttggtgaacaagcttcattgaagtgcaatcttgtaattgggatttcattgccatgtttggtgtttggtgcaacaatcatatctaggcgactagaatctagttacttggcagtggcatataggcgaacaagatttggtaggatgcccaaggtctagtgtgttgggttttaccaaaccctcttgaaacgactatcattgttgctcattaactacggggattataatttcttctttaataaagttaggctacctttacattaatattcggtctaatttaatattttgttcataatttgatcaaatgttgttagtaattacatttataaaagcatcatctgatccattagtttttgaattggatattaaattacactattttaatatatttacacatgtcattaattgaatcaattattaattgaattttgaggttgacatctaataatttattaaaacttaacttttaacatgcaatccaattcattgtaattggatatccaatcatttatgtctatatacaaggcaacgatattgagtcacacatgattgtttaaattttttattatgacacagttgtttttgttaatttcatttttggcatatttaattaataaaaatattttattatttattgtatattttggttggtatgtgttaatatgatttccttattttgtgtattcaaacttagaaagaaagttgtctagctttcctatttttggaaaaaaggtaaaaatggta

SEQ ID NO: 124651 - DNA, 1402 bp, Cannabis sativa
cttaaccaattaaattactaaaaattctttgtattctcaccatatgcattgacatgttaggtaaagtattgttgttctatgttatccaaatcatttattattattttaattattattattattattatttgttgttgttatttttaaagtaattcacatcattttatatatgctataattttgtaatacaactataacaattaagtgattaatttgaaaaatatgtatttgataataattttgtggctatttcaattaaaaaattgtgactgtccatgacttaatttttaaattttaaatattttataaatatagtagatatttaataatcttttcactaatttatatttctaaaaataatattcaaatagttaaatgcacacttaatatcttttttttacgataaaataactaaatcgttagtaatagtttcacataaattaaatttttatagtaataaaaaattagaaaaattcaatatatttgatatgattaattaattaaaatttgataactaaaaaaattatataaaaaatagtattaatatcataaaagtaacttcatccttgaaaatataaatataataaaacttaatgttaaaacaaaaagtaataagttttcaattatgattattttattttatttcttttttttttatcaaatattttggtctaatctatttcatattttaataattaaaaattatgagctaatatttcaattatatgttgacaataaatacaatatatatatttttttaataaattttaattagtttcagttaagtgataaatagtaaattgttggccaaaacatataaatatagtataattttgtagaataaataagaatttgaccctcaatactattacaattgtaaaatttggtcttctaaatttttgttctattgcaaaaattctttcgactagaaaaaattgcaatttagagtaacttctgttaccttctattaattttttgatgtaataatgtgtcacaaatatatttatattacgataatctatttatctaactgacattatttgaaatttaatttattaatgttaaacataccaaaattaactcttaaaatactctttaatttttttctctagagcacaatttatacttgtatttttcgttaagacttttgaatcacatcatattaatggcacatcagtactacatcaataaataattttaaaaatgaacgaaatgtaagaaaaagacatatttgctatagttcgagggaatttttgtccttgacggcgcatacacttagaattcctgaaatagatcaagaaaatattgcaaggaaaaggttagaaaatcagctagagaaaatataccaaagtagaagttagtataattttgtgtaatatcaatctttaaacaattccccggc

SEQ ID NO: 124652 - DNA, 572 bp, Cannabis sativa
cccactgcacaaaaattcaaagataatatttttgacagaacacgtgcctccaaaaactgtaaaatagttttacttcatttcccattaggctacattgtgttggttactgctaaacagaaaagttacaacgttgttatgttacatagcacttgggaggtgcatgtttaatttagagaatgacaaattcttgagccttttgaacctgcggaatttacaaagaataatgcatgaaaatagatgtacaaattcatgctgttttatgcagtactaaccttccaacttcaagattcacctcatatcttttgaaagcatccctagcatcagtgttgtagttgccatactccgttttcatattctgcaataagaccaattccaacgatggatatcctttgactcgtttaggtgccttagtaatgagaaagtcgtgatctaggaggattaggggtggtcatgttttaacttttttctctacaatttagtacatgtatttttgaaaagaataacatcaatgtgtgtgaatttatgttgactcaactaatattaatatgtatacatatatattgtacaatatc

SEQ ID NO: 124653 - DNA, 1205 bp, Cannabis sativa
tacaaaagggcccattttttttttaatttgctaaaaccgtcttgggcccattttttttcagggccggccctgctaagatgatgacaccgtattttatataatttattattaccgcatataagttattatttccgtgtatatgtatttgttaaatttttaccccttctgtggatatgttgaaatttctcaaggggaattttctaaaagacctttcttttatattttatttataatttataattttacggcttaaaatttttaattacaaaatatacatgtaaagttttaaaattataaaaatacactttactcagcaaaaagttaaaaacaataactaaagagaaatcaacctcacgaaaattataaatcaactaaaataaattataaaacaactaaaaacaactagaaaaactatttcatgacaataataatacaactataaataaactataaaacaaccaaaataacgatttattatttttattgaaaatgtatttttatataaaaaagtttaaagagtaaaaataaatttttttcaatattgatgtatttttgtaattattttataatttttggtctattatgtaatttttcaaaaaaaaaaaaaaagagaaattttatttacatcccaaaaatttataaagacaccctattttaataatttttattttatatgaaatttatatctttaattgtactaagttttttttaacttttttcttccaatttatactcttgaaaaatatacctatcaaataaaaaataaattatattttaaatattatgataaaaaaattaaaataaaaattatatgaaattttcttaaaaaaaataaaaaatatatatatatatacataagttagaaaaaatttgtggaaatgaataaaataatgtgagaaaatactttaaaaaaatattaaggggtcgtttggtatgcatgttttatttcatgggaataggtttaatattgcttggaaagtgatgaagggaattgtaaacctaggaaagcaacattaccgtgtttggttgtgtacagtagtattatgatgatgcctgagaatatgaagattactttgtttgatagacattggaatgaaatgtgacaattttttttatataaaatactaataatttaatattattttttaagtgttcaaaataatttttatttattatttttcatataattttttataaaaaaaata

SEQ ID NO: 124654 - DNA, 1340 bp, Cannabis sativa
gttgtgctgcagcaaattattgtttttgttttttttaatcatttttttcttttgttttgtttgattgttttagtgttattttacccttgttttgccatgattatttagtgacgtcgattttactgcttttgctcaatcttgtcggaattaatggttattttccggttatcctggtgttgttgtggtggttatgtctgtgattgtgaaagatggaggcctcatacttttgttttggtattgacagtataaaagaaaaaaaaaaaaggaggaaggacagtataaatgtaaattctaccgtgtggaagtaaaattaaaaagtattaccccaagtccagtatttttgtaaaatgtccttaattttttagctagccattctcattcttgttcttattattttagagtttttaataacgtaatttttagttaattatatttttactattatcaaaataagtaatattatgtttataaatattaccttttataataaatatatgttatataactaattaaaatatatatatattttttttaattttaataggagcaaccgttccacttggcttctatctaggtccacccttcatgtatacacataacattactcttatttaaaatctacctaaattgttaaacaataagtattatcttaacattgcagatatgtgatggttcattctcttctattctctttaagttttagaacaagttgaattagttagttaggattagttttggttgttagagacttggatattttagctgatttttctgttacagttggttattttccaactgctcctttcttgttgaaccgagctatataagccactctcttcatttgtaaaatcaagttgagccataataaaatttctgctctgtttcctctcttttctcatatggtatcagacgttatatagcccacagcttcaatggcacggccttcgactcgatctcaggatggtgctcctctatcgtcgatcgacaaccaagctgcagaggttacttccgatcctgttccagctccaaatccctcaacaattcctcctcacaatccacaaatttgggttcaaactcagaacacagatcctcttcctcaagatcattccaccattgttgatgacaacacaaatcaggcactcacttctcgatccgtggctgacgatcactccagccccttcttcctcaacaccggtgatcacctcggccttgtgcttgtctccaccatcctcaacgacaccaattaccagccatggaagcgaggaataaccatggcgctcactgccaagaacaagatcgcattcatcaatggatcccttcctcgcccagaacctggtaac

SEQ ID NO: 124655 - DNA, 732 bp, Cannabis sativa
accttgttgatataggtagtaccaatcaatccattaatttaagccctattcaactgtatagccacacttccaattgggtgaagactctgatactaatgtctctgcttcaagtctgggctaccaaaaaataagatgcaccttgttgatatgtagtaccaatcaatccatttaagcatctttaattgtgtagccacactttcggttgggtcaaggcacgtcccagtcgcttcaagccattgggcccttacacccatggattcatgactcttatacatgagtacatcactctggctgcttcctcacctgcacgcttcttggaaaaacttctcaggaggtcacccatcctgaaattactccaggtcaagcacacttaattgtagagttctttcgtggactaaaaacaaaatacatcttattgatataagtagtgacaatcaatttatttaagttatcttcaaatgtgtagttccatacctacacaattttaaaatcatcataattagtaacctttcccaaacggtatggaaccacacaacttacttgatatttttcttcactgataacagaactacttacaatcacaaaataatttgatgttaataaaaatgtaaaaaatattacatattatttggccaggtcatcgatttgcaaaaatttgggaattttattctcaattatagtttatttataggggtttttttatttttacactttaaaataagtttttttttt

SEQ ID NO: 124656 - DNA, 1439 bp, Cannabis sativa
ttatgtaattattcaattattcctatttttatatagagtttttataaaaatattagattttgaataaaaatttataatattgctatcacatcaaattttttataaaaataacataaaccaaccgtaaaacaataaaacagaacaattaaaaacaacagtagaacaactaaaaaataactgcggaacaacagtgaaaacttaacatggtacacagtataagacttatacagtatttttgaagaaaaaaaattccgccccacaataaaaaagaaaaaaaattagaaatttcagtatgtggtataaaaactcctatttttatttgggttgcgtaaatcctttctagaagtttgaagatattttcattgggtcagattaagggtatttatttagtagggggtcctagactttcccacatattctttgttgataagttgatgcttgcgggaagaactaatattggagaaaccaaggccttttggaattgtttggaaagattattttcttgttctgagcaacaggtgaataaattgaaaatgacaatttttttcaatcataacactacaccggctatgaagcgaggtatcaacgaagcgttggacctcgaggggatgtgcgtcaacacaaattatttaggccttcccctgttttgctcaaggtaaaaggattgggattttcatttattttggataacatctcctctaaacttcaaggttagaaggctaaaaccttgattgaggcagggaaagccactctcatcaaatcagtaggcatatccatctatttgtacgttatgcaaaccatcaagctttcaaaaggccttgcttcaaaaattgatggattaattatgaatttccagtagggttctaataaaggtaataagggtctctcttcttgaaatctttgttgaaaaactttgttgaaaagccttctcggtcactttgtttctctctaattgcttcatgaaaagtgtgaaaatccactcctttttatagctgaaaaaggataaaaaagatagaaaacatatccaattttcgaattcaggggcgggcattaaccctcatttttttaggtagtgagctttccacgcctctttgcctcaaaactaaggtacagtgttgaggcgcgcccatgccttgattagaatcgatcctctctgctaaattttgcccttttaatgtcctgacatgaaattgtagtgttgaggcgctactctattgttattatttctttgccttaagagctccatatgcatagaaacttttggatttctttctcgaattaattttctggtgctcttgccccaagagttgatttatttgacctttttctcatattttttcaatatttctccacttttcttctacattaaacctgcaaaataacaatcaccaaaagtgtaaatgtaacaccctaactagcataggcgtgttaacgtgatt

SEQ ID NO: 124657 - DNA, 1541 bp, Cannabis sativa
tcaagctctacattatgttagtacatgctcttaatctaacttagagcttctttgatccccaaagctcccacaatctcagcagagtaagtacctacgagggtgacatgtcttgacttcaataagcttacccaaattatctctcactactataccgaagccatacaagatcttctgataaaatagtgcaacatttacattaatttttatgtggttcgtatttggttttatccaaaacttgacccattatcactatttttgaatgatagtgatagttattttattatttaattaaggtagttgttataatttcctttttttttttgaataaatatttttagcgttagtagttggggtttgttgataatttagttgagctacatccaaataaatatttaaatatagtggtgaaagtttgactctataatgaagttggaattttgactaattgattgcattgatactcacatggctcattatttatatcgtggtcatagttctgaagtccaaacttaatattttaatacactgtgttcatagttaagaatatattatgaaaattaatatacatatcttttagaatagtataataatattttacattttctaaaaaatatcatctaccgaagtagcaatatttgtgttatttagtccctaatcaatagatctaataacacctctcctaagaaatcttaagctgttttcagccaccgatcctagcgttgctttcatcttgccagtcccaaggttcccctggcctctgtcgacttcatgttttgttgttcgtcctggagctttcgaccttgttcttggatccctgtgggttcttcgacggtgccttttgtgcactcctatgctcacgacattgctaggtttcaaagtcatagatatcatcccctcattgacatacctatgatgggtgaacctgttgattcattcaggttccagagttgttttctagtttacgagtttgtgtccttctaaccttgcttctttgtcgaattcttatgttgtgggttcttggtttaggcttgtcgtgcacgagttgagggttgtgttgttggttgtccaattgccatggttttttttttatttgttttaggtttctctttttggcatggtcgatttgatcttcttcctttttttgtagtcggttttgctctggttgtgagctagttggttttgttgagttttggaaggtctctccgatgttattagggcttaatatggcttgttgcatgttctcttcaagttttagagggcttgttggttttgttgagttttgtgcgtggttggaactcgttagaggttcgtcgacatgactgtgttgctgatgttggtgctttcctagttgtacttctagtggggcgtctctcttactcgtgctatgcttggtatctcttgagtactagaaaattaaactttagaggcagttttttagggcatacaacgtcagttttggtaaaattcgccacagacgctgttttagggtcgctaatgttagtgtgtatgccctaaaaataagtatttaatggataatatat

SEQ ID NO: 124658 - DNA, 960 bp, Cannabis sativa
ttttgttgtttttgtgcatttgtgtaattaaccctttaaaatatctgatgagtgtttttttaggggacatatatatggtgtttatataaatgttttgcaagacagataaggatattattgctacacctatatatataaaaaataataacatatttgttagtacaaaaataatatacccaaaatcatatactatattgttatatgtaaccaattctgattagttaataattcaccctctaaaattactcaataatttgtcatggtttcactcaaaaagatgcacaaatttaacatatatagtaacacgtgaaaaatataataccaaatagtatgataattttaaatattggaataataaacctagaataatggtctgttttaaataaaaataaactacttaaatgtatctattattcatgattctggattgaaaatatgtggtatttttaatacaaaattaattgattaagacccactcaaaagcccaacaagataatagactaggactatatatacggaaagatgagtctctcaaccatccgagatacaggaaatatacgcccagaaccagatatgtctttagatccagaagggtgcctcgccccacttaaaaagaagcagtcaagaccctcctgatgagcgtatgggatacatccagaagggttccccaagagacgccccgaaagccaggctgaagctgacgcgacaatcctctgacactgaatcccacaaaattagggagttgtcctctatgtcagaccgtgagagtgcgcgtaccaccaaaagaaacatctcttttgtactacgaccactattatgacactacaatatgtaaaggcggtgcacacacgacatctatcgacctcaagtggtcctctgttatatggagcataactgcccctgggctaggcctcagtccgtggggccaatatcagtgtattttatgtatttaccccatta

SEQ ID NO: 124659 - DNA, 606 bp, Cannabis sativa
aaaataatttccaacaggtttttctagccttatcataataatatttactcatggattagaggtcgttaatcctttaaaaccacgtaaaaattcatatatcattctttgtttatgatctatttctttagttttattatatattattataattattaagtgactccatatagattgtgtaatgtcattgtgtgagtataacttacatcactttagttttaataattaattttataagagtacacctttttttattattaatgatagaaatatcataaatagtttctctattttattgtttaaaaaaataaaaaaaatatatattttttttagatatgtgtaagtttaaatttgaatcacaatattttttttttcttaaaaaaacaacatttttttgttatagtacatttaataagggaaagatatatatttatttattgacttttaatatatactatgtgtaatcaaattgaatcaatttttaattaaattttaactgatttcattatttgccatctaattcaatacaattaaaattcagtgattcaaatttaatctaatcataattagatattcaatttattataattagattagtttggtgtaatt

SEQ ID NO: 124660 - DNA, 2163 bp, Cannabis sativa
catcctgctcggtctattattcccaagcaaatgctccaagtggactccacgtgtcaccattctcgtgatgtcacgtcagagtgcaaaatttgggataacacctccgaatagacaacagtggcgaatatacctctgatgaattttctaagtatctccaacaatgccacatatgccatcaattcacatgtgcaaatacgccacaacataatggagtagctaagaggaagaattgcaaccttgtagagacatgtcaaagcatgctacatgcaaagaacgttccagagagattttaggcagaaggaaaaaaaatagtagctcatgtcatcaatagacttcctcaagcaaagttagagtttgttttactctttggaaaactatgggttgtatacctacagtaagtcactttcgagtatttagctgtgtgtgctatgtattcgtgccaagtcacttacataacaaattcgataaaaaggcaatataatgtatctttgtaggatacgacagctaacagaaaggatggaaatgttgggaccctacaactggaaagcgtaatacatcaaggaatgtggtctttgatgagacaccatcatggtagtcattgcaaaagaaagcattaccagattctaaagaaatggaagacgaattgtagaagaaaatgggggagcaaattgttaaattacctccaactcaagatatagattaagaagaaaacaccaaggatgaggcacctcagaatccatggcaaacaggtgtgcatcaaagagcaaaaaataatgtaaatgatggccaaccagaactttaaagatcaacacgagcgcgaaagtcaaatcctaaatatgccaatgcagttgtagccaaagaagagaagtttagagagtcgaagtcatatgaagaggcatactagaactcgaagtggctagaagctatgaaagaagaaataagcgcgctagaaaagaatcagacttaggagttggttccaaagccgaaggaagtgaaacccattttgtgaaaataggtctacaaggtaaaaactcatcctgacggttcaattgagagatacaaggctcgattagtagcttgaggattctctcaacagtatggacgagattatgacgaggcatttagcccagtcattaagattacaatagtacgggttttgttagcacttgcaactcagtaaagactgaaggctatggaagatggatgtgaagaacgcatttctacatggagaactagattgatagatatacatggtacaaccaagaggatttgaggatagagctcatccaaactatatttataaactgaaaaagacactctatgatttgaagcaggctccgagagcatggtacggtaagattgctgagttcttagtagacagtggttacgtcatgacacacgcagattcaagtttattcctcaaagtaatggaagaaaagattgtagttgttctagtatatgtcgatgacctaatcattactggcgatgatgaagcagagattcgtcaaacaaatgagaacttatcagtttgcttccaaatgaaagagcttggagaattaaacacttacttgaattagaagttgatcgagctgaggaaggtttatttctctgctagcaaaagtacgctaaagatttggaatgctcgagtgcaaacccacctcaacacctatggaagctaatgctaagctatgtgctcatgttgggcaagacttgcaagatggagcaatgtatcgacaactagtaggtagtttaatctaccttacattaacaagatgaagcatctcctaagtcgatatatgcagcaaccaaaaaaatcgcatttagaagtagtaagatgaatattgaggtacgtgaaagataccattaactatggtctcttttgtaagaaaggggatgaggttaagatcattggctactgcgatgttgattatgctagaaatcatgacacacgacgatcaacaactagatatgtcttcatgcttggatctgaaatagtattttggtgtagtaaaaggcaaccaaaagtatcattatcaaccacaaaagtcgaatatagagtagtagcaatagtaactcaagaaagtacgttgttgatggagttgatgaaggatctgttgggttatgtgccctaaataaaacctctttcaatataatcagatttac

SEQ ID NO: 124661 - DNA, 965 bp, Cannabis sativa
aaaaaagtaaaagtacaaattcaagcccgaatataaaaacgggctggcttgtttaagaaatacgggccggcacgagtaaattatgacacgaatccgaatacagtatgaaaatattgggcctacaggccatatgccacgacacgatacgacctatgttttttctgtggcatgacacgatccgatccattttttaaaaagtacgaataaatacaaatcgagccagcatgacacccacccacaaacttacaaatgacgttatattattattattattaattaaattaatataagtataattcggtattttataaccgatattacgttttattaaattgttctattatcatttctcatttgtcaatttataagtttagtaatagactggctgagcccaacaaagaagtaacattcatttcataaacatccaaaatacaaccaccacattcactaagctataaacacaccaatattattgcttcatcaaaagctatatcaaatcagttataattaatttcaaccataacaagataagactacaccttgtacctttgtacctcatcaaattacagatataacatgctctcaattattatcaatttctcatcacaacatattacaaatacatatatatatataaatatgtatatacatataaacagaggtcaaaaaaggtttggcaaaggtggacacaatcactactcactactcactactatatactatcactacagactatagtgatcactatcaccttgtacaatagatagtggagaatagagatccatagataataaataaaaaagaataatttacgggtttaattctcagttatataaataaatacttaaaagtcatatttttacaagtatttagacccactaagtacatgataatttctaattggtcaatattattaaatttttatcttttatttaaaaatttatttaattatataaataaaaaaa

SEQ ID NO: 124662 - DNA, 985 bp, Cannabis sativa
ccccaaccacgtaaaaatcttcatctcactttcttacagctctttagtataatcatattctaatagttgccgaaaatctcggtcaacaatggtaaattgacgtcactgcgttcaggtcatataggcttgctgacctatcattgcattgaatgctgatggcacatcgatcactataaactgaactatcagtgtccttgttatgactttctccaactgtcagaggcagtcgaatgtatcacaaaggtgcaaggctttggcaaaagaagccatacattagttatgtacaaggtgctagatctgtcaatttgagccccatcttttcaaaggttgatttgaaaagtctgtttgatgaggctccattgttaatcatgcacatgccaaccatcatgttccctatttatgcagttatgaccaggggtcattatgagggaacttgacctggacagcatctgactctataagggatatggtaggctctctaagcttaagctacttggaatctctttcctctacaacaaagatgtcattttttttttctcatgatggagggtatgagcatagcactccttggccttacttgttttgcttgctatatgggttctgcaaattacgacccctaggtgacccgccactagcaatggcattgggtctccattttaggcaccttgtgcctaagtttggtcgttctgcacatagcaacacagctgaggattattttttcctgatcaagaattcaatctccatcttcaaatgcttgcattcatttgtgtcatggtcgaaatcattatgaaatcgacagaatttagaagtgtccctcttgctgatgtcctttttaatgggaggaggcttcttgtacgggaaaacaacttaggtggccatgtatatggttttgggagtttttattaggagggtgatgttgggatattatgccctaaataaaactcatttcaatataatataatttattatcaatagaagattagaa

SEQ ID NO: 124663 - DNA, 991 bp, Cannabis sativa
ttatagatttttcttcaccaattatagatattttgttatatttttttattaaaatttaatattatacactatttctcaaaaattaacacaattttcagattcagttaaattaactaaatattctgataccgttatattttcagattctatatcaatcacagattcaattttttaaaatttaaaaacaatttatacatactaaaccaatcacaatttcaaaatatgttttcagttacaaaatttaaattttcatttcagaatcacaatttttaaaaagattgtttacaaatcatcaaccaatcaaaccgtaaatttttatttacatttttggtgtggtggaaacttgtttttcttatatggaagttacatttttatggatgatttttagttcgagcagataaaaaaatataataaattttattaaaatacttttaaattgagttattgttaaattttattttgacaaaagtttaatataaagtattattttgtactctatttttagaatacagagtctaatttattatttattaatataaatggtcaaattagttatttttacaaaatagggtccaaataatatttacaaaaaaaaaagccatttaccaagcctcggtttatattagggatgttcactaatggatttggttcggatttttaattttttcaaaccaaaccactcttacgatttttaaaaattcaaaaccaaaccagatcaattaaataccaaattaattaaataattaaaccaaaccaatcaaatccattcaaaaatagattggtttagttcaaaaccatggtttgtatttcatatttcaatttttttttacaataattattttttttttcggtaactttatttattttaataagtttatagtacctaaataacaataaaaaaattattatcataattgtggtatagtttctccaaataaaaagattttcacaatcattatttctggaaagttgttcactcgatcgcggttgc

SEQ ID NO: 124664 - DNA, 653 bp, Cannabis sativa
tctcaatcaaagctagtaaaacaataccaaatcaactacattactaagaaaatggatacctgattttgaaactgctcatagatagccaagtcagatgagttggtggttccattattagtcacattggattgatcattctgcgaatcagtgggtggcagtggtaccctctttctaccaaacttggcatcataaaacattttaaaatcctaaaaataaacattaaataataataaatccacaaaattgttaaacccaatcaatctactaatctactctccattacattacaaatcactattcattcattcccaaatctcaaaaagttaaataattcactaaaagaaacacagatagtacagcaatgtgaatcactcacgccaaatctaaacaaaagacaatactaagcttaaacaaagtttgtggattttgagagtgaagaaagagagagagttaccatgaaggaccagcgagtgattgatggttcgtcgtcggccattgatttgggataaatcgagagagagagaaagagagagagatttgtaaaatttgttctctcttctttctttctttctctcttcagtttggtgtttggagttggaatctacaaaatacttgcaaagaatcaaataatcaaataataattttataatttt

SEQ ID NO: 124665 - DNA, 3640 bp, Cannabis sativa
ataactaatcagattgtaaagaattttatttagggcataaaacccaacattttccttggcaaacatcgggtgcacgtattctaaaggcagcaaaagcaggagaaaaaggaaaagacaaaaagagagggggacataagtttgaaaaccgtgtcacactcttaacagcccctaagcaaaaaagtgtttgcaaaataaaaaataaaagaagtagcataacacggatgaaaagatacgccatccgacgaccttcacaaaaatcattctaccgtagaaatcaaatacggctctaccaaaaactctgccctaacatgcaaatgaataaaaaaaacaaaatgtacccagaaaacttacataaaggtaaggaattggaagttgatgatgatcaacggtggaatgcggactggcaacgatgaagaaataatagtaagaaatctatggtttctgaaattttctcagagtttcttgggttgaaatggcgagatagtgaaaataacccaatgaagagaaaatgctggcttttatagaccagaaggggtgcaaggcagctaagtttcagacaccatcgtacggtgggaatcgtaatcgattcgcattctacgaatccaacgggtgagattaatgggtgccaggggcggttgaaaacgtttgagtactcttctgatacacgggttaaatgcgccggtttctcaatggacgggaagcgaatcgttgcctgtaaaaagaaataaatattaatgatgaccatcataaatacagctcacgcgcttaaagcatgggccattagatcatcaagcaaattggaggcatcaaacaagcgtcattcacccttagctatacgaggcttgaagagtaaatgttgcctttgatttttcccaaaatacgtgaacgcggatgaagatgacatgcggatctgaaagaaccatcgctcacgaaaataaattaagtcttgaataagaggaacaccacaaggaaggtgcctcctagagaagggcataagacacatctttaccctctgggaggctagggccatgataaggcatgtctgggaggtaaagagattacttgaacaatcacttcgcatttaatagcgcatgggggaagacgtattggaacttccataaaatacgtgacagatggcgtaaacccctttttttttatgtcgattacacaacaatcgatgagtctagtgacagctactttatgaggaatcacatcagtcaagaggggataaaaaattatattcacctaactcctaagatacctgcggtgtaggtcatgtatttcctattttgtatctgatgggaatatgtgcccctatgaagctaacacaaaaagacaagtgatccattcctagggatccccccagaaaaacaccataaataccccacaaacagatggaaaaggggtcgatcgattttatttaaggaatcgaagagagaaaataggagagaaatccaccaagaacattctctgtaataaattctctcataaatacaaaagactcatggactaaggctcattaatgccacaaccacgtaaaaatctcctgcattaaactttctacagcccttctcatacattatttaattggttgccgaaaacctcggtcaacactaagtaataagcttatacacttagcttattttgtaacaattttgatatatttctaaaataaatatatggctatcacatagtacttaaaatttaatagaacaaccaacatcacaagttactctatattttttagaattaattacatctcagcatgtaaatatcaaattgtttagggaattgttgttgttggttatctaaaacatcatatgagttacattaaaaaaaaaaataacatcaatgtatcttaaacaataaaataacataatacagtttgaaaatataaaaaagaaacaaaaaagtttcttttaatattagttgtcttttttttggagacagaaaaacatatgtttctcacatattaaaatggttattttattatttatatatgtataaaattctaaaataaattttttaatggaaaaataatcaattgatatcttattcacatcaaaagtaactagaatgttacttttttcaaaactcccaaaaagcgaaaatttcttaaaacaaaaatttctaattttttccattttcgttattttttttttgaaattcagtatgtatgctgacgtgacacaacagtatttgtgcaaataattttcttaaaaatatttttgtaaataaaatcatttttaagtataatatccaaaaaaaacccctaaaaaatgtctaacaatgacaattttttatatttttttattattattttgtcattttaataccaaaagtgtaaaaaatgatgtagaaaaaaatatattatttttcaagtgatttagatgtttatgaccccttgaaaattaccactatttgagatgttttaagggtgtatacgtagacttctcctatagttttatatccattttcattggagcgtgccctttacttttcttttaaaagcgtcaatcatgagcctctttctctactactcttgtatgtttgtttatttagagaccttcttgaattcatcctatttattttaactaaatatacagaacaaccacgaaaccttactactttaccatttttaccgatttagttatgaattacataatagtctctaatcatttgagctaaagatctcaaatacaacccatttttaccattgtgggttttattgaaatattttcgaatttatacttatccatcaaaattttaaagtgaaatttctaaattcatcaaatttatttaggagtcactgttttaaaaaaaatactttgtgtgcataatcgtataaaaaaatcataatcttaccacttaatcgcatatagtacatggggttggaaaatacactgtcttcacaatttatttatgaaaaaaaaaatgatttagcagttcaaaaggttttgaggacaaatctatatcaataatgtgttagtgtggaaaacttaaaaagtgaacttacttctagtagtaataatttacaattcacgatcaagaaaacaatcagtaaaataaaattactcccttaaaaaaagaagaaaaagtcagttgaaaattttaggccaaatggttcttagaacaaaaagaaaaataaaaaatcaccttttaaaatatgtaaaaagtaaggaaaaattgtttccccaattatcactttcactatcattaaggaataaaagtcatactcttgtgagaagtgttaagatcttccattccatattagtttttacctttacatatatttttaaaaattatagacaaattggttccaattaggtttattagtattagctacaataggcaaacaatttcgccttgtaatggaggcatattattgagttgaattacctataaatagaagaagattatgacacaataatgatagtgcaaaaatagttgattattaagttatcacaaaaaaaaaaaaaaaaatagttgataattatggatttgatgtccaaaggataactatttattcctcccttttatctttaaacaaagagtaatttgcggcaaaaccccctcaactatcaatttacttgtaaaaaaccatccaacctcatattttggtgggaaaaccctccaaagt

SEQ ID NO: 124666 - DNA, 1365 bp, Cannabis sativa
aaaaaaaaaaaattaaacttaatagtattgttcgggtatcgggttaaaacccgaataaaaaaatacattattttaaaacccgaacccgaaacccgtgttgagcatttttggattagacccgacccgactacacgggttttaaatttttcggcttttttcggcagcgggtcggggcgggtggtcgggttttcggatttgcgggtctaaatgttcagccctagttccagtagttgtcatgcaatttaggacctttatgatctgaaaagagtttaggttaatttataatctgtcatcacataggaggacgaagaatggttaattagtgttagcaattgggtaatcaaaacaatttaaatcatctccctaattcaacatccattgttaaatattttattttttttatttaatttttcttagtttatttagttcaaaatttatttattcgattgtcaaatagaaaaaagaatttaattgattggtacttaactacaattctcgtggaaacgatctcacttacttaaattttacttgttaaatcgatacgtacacttgcatgttaaatttatcacaacactcaccagacaaatttaaatttggtcataagttaattctcatcgttttaatatatatatatttttttcagtcttcaacttatgttttagagaaccaattgaacacacattgtagtattgtacactctaataattgtaaaataagtttgtacgttcgtttaatcgtcagttgttaaaaaaagaaaaatggtatgatgtttctatatttgtttacataaataattttggataattctacactgtacccttttaaaaatgatgcattaatgtatttatacttgttttggcatttagaagaatttttaatcttaattttttcatattcgtgtatgttatagttattttaagatattttacaaaattttgatgaattcgatataatttacaatacagaaagcagtgctcaagcagtatattttacacgcatataaaataaaatagtcacactagcaacacactgtttgaatcttgttttcgacgtgttaaatttcttcgaattttttaaaattttgcagaatgtcttaaataactataacatacatgatcatgagaaaaaatttgactaaaaaattatttcagatacagaaataaataaaaatacattggtgcatcccttttaaaaggttgcattatagaattttctaataatttttctcaagactttgtttcctagctttcctaccaagtggccatttactcttggtattttctaatataactttcacatttatatgtgttgttaatatctattctatataaagtgtgcctatataactgaaattcttggtttatg

SEQ ID NO: 124667 - DNA, 754 bp, Cannabis sativa
tcttgaattttagcccaaaaaaattagatcttttgaattattattgatattaaatatttcctctcaacattagagaattattagattttttattaaataattaataattttacctccctaataataataataaccactattatttttgtcttccaacttttaccattgctaaattatgtcttttttatttaatagaggttccaaaacattttgaaacaatactctatttcaaaaaatatatatatttttccatttcacaaaatttaaataataattttattatgatattaatatatttatttgataaaattgtattgttatagcttccacaggaaaattgcagtttggtccctaatcaacatttttggataagtagtaaacgcattgtaacaccccaaggaattatttctggtgcaggcatgtattcacaactcattaataaattttattatattctaattaattttcatcaataaagtataatcaaataatataatatatacttttatatataaattgtgactgtttaacttttaatagtttaacaaaatattttaagaatataaaaatattttattaaattaacattgtaatttttaatttcataaatatataaatattaatattatttattttagattaatttcaatataaataaacattttttaaaaataaatatatataaatagtaatattatttattttaagttaattgaatttataccaatttaaatttatatataaatattaatat

SEQ ID NO: 124668 - DNA, 1116 bp, Cannabis sativa
tttgaattattcctctcacttggccattgttgattgttcatggccatttcttctaacaactcatatgcatcattgacattttttctcataatttccccactagctgctacatcaatgagtgcgtgaatagtttcacccaactcattgtaaaaattataaaatagcatccacttttctatcccgtgttgaggatacttttaaatcaagtctttgaatctttccgaagcttcatagagggattcattgtcaagctggtagaaattgttaatcttccccttcacttagtgacatttactggaggaaagaattttgagagaaatttcattgctaggtcattctaggtgttgaacgagttaggtggtaaagacaccaaccaactcttagctcgttccctcagtgagaatggaaataacctcatgcgaatgtcattgtcactaactttgttcattttaaatgtctgacacagctccatgaagttagacagatgcatgtttgggtcctcaaaaagtagtcccccaaactggacagtagattgaaccatctgaagaatggctgacttaatttcaaagttgttggcatcgacagcaggtggtcttatacaagactgaacctccatcattgtcggtagcacataatccctcaaagttctagcaggtggattctggccattagtctggtcttctactgcacccccattattaccattacaaatataaattaagaagagagagtgaaaaaaaaggaaaaaaataataatttaaatactacatatgtataaaatgttattaaatatgtataaaaggcaaagaactagcttattggattgaagaaagtattttttatattaaaatagaaaaagaaaggtgtgatttctcgtatatataccacatttttaatactccattatagatgctcttaggtgggctatatattgtggattatattttttgctatgtatgttttagctttgaatcacttattgtatttccactagagatgctctaatgaaatatgtgatttttcgggggcttattttaaaaacatccaaaaacaaaaaaagtttacatttttacaattttttttttattttttacgaaattttacatagaaaccatt

SEQ ID NO: 124669 - DNA, 794 bp, Cannabis sativa
ggcattaaatgcaatagagaaattgtgtaactcgggcattaaatgcaatagagaaaaaacattcatccattaatatttgtatatcgtttcatcttcatcttcatcttgtttttgggtttaccttaaatttttgggccactaagttagttgaaaagttctcaccatcaacagtttagcgtcgtctgtgggaatgacaagctcaagtcaagtcatttctttgcacacaatcattacacaatgaccagacactcttattgtcatcaatagacatgactcaccttgacaaaacccaattgatcgcatcggagcgagacccactaccgcccatcatcagaaaaggggaggtgaacgtcagcatgactcaagtagatggaggagaccaacaaaaagcacttggaaaagtccccaaagtgttaagagacgtcagaacgatcataaaagagccttgcatatgaggcatcactcgtagggggagagataaatacacctaagaggcaaggcgagaacctcacgtctggagcttagagcaaagacctccaaagaatttcaagggagaaaataactcagtcacctttacagcggaagatacaagaggagtatatttcccacataatgactcgctggtgcttacatttaagatggctaacaccagggtgcaccgaacattggttgataatgggagttcaatggatatcctatacgtcatagccctaaaggagatgggactgggtcttgaggatctgaaacggtgtgcataaatcgatcaaatccaatgagaaccgaccgatccaatt

SEQ ID NO: 124670 - DNA, 1644 bp, Cannabis sativa
aaaagagagacataatattaatataaatataaatttttacaaaaaatagtttctactatttagattttatattttaacatatattgtatatcagtttaaatcaaacatgttcgaaaaatggtcttgattcgagtttgggtctagatccaggccaggatttgggtttgggttggggtctggggctggtttctgagtgcggcttggggtcggggttggagtccaggtcagggtttgaggtccgaggtatggggtcggggtcgaggtccaagtctgaggttcagggtctgaggttcgggttcggggttgagttcgggtttgggtttgtggttggtccaggtccagtttcagattgtggtctgaggtctagatctagatagaggtttggggtcgggggtctggtgtctggttctgagtctaggtacagtcggggtcggggtccaagtcagaggttcgggtcctggtctagggtttgagtcctagtccgatgtttggatctgggtctgagtccggtttcgggtcatggttcgggtccgtgtcaaagttctagtctgggtcggggtctagggtctagggtctaggatctgagttcaagtctgggctttgggtttggatccgggctagggtccaaggtttggggtccgaggtctgagtccagatctgggtaaagggtctactctaagatagaataagtttatgtcctggtatgggtatagaatattaattttttttttaagtaaaaataattttaaaaattttgagtcaaatactattaaatttttaaaataacaaaaaattattttatattctcagttttaaaaatacaattctaaaagttgaaaatataaataactttttatattctaggcaactctttttcttaccacatgtgactttggttgatagtaacaaagtaacaattatttgtaatgttatttgatagtagcaagactattgaattgaatattgtacataattgtttatatacacgtgctttaatctataatagccctacttctctacgaattttgtgaccaaaaataaatgtagtaattaattattggaagctgttttctcacaaatttattgttcttggataactaaccatatctaaagttaaataattattaacaactaaaagtaattttattattattattattattattattaattaaggcacgtggttcacaactctatttcatagcctaaaaaattattggtatagcagtttagcttcattaatctttttcattaagcatagtttaattataaaaaggttgttaattagttcttccattccataaatcaaaattaatgaaacttttttttaccataatttctttaaatttcttaaataaaaaatatatatataattaggtatattctttatttctattttgtttaatataatttaattaatttttaatagtgtgctagtttggtaatgaaaaaaaatgctataataacactaaatggtaattaatattaggcattgggtaattaatgtttaaaagacaaaaagtaattaattagtattaaaatgataagattaacatgctgtagttaggtatttggattatttaaggtacgtaattattattatttttttatcaaggtacgtaattattaatatattattattat

SEQ ID NO: 124671 - DNA, 506 bp, Cannabis sativa
aaaaaatcttgtcccggtccgacacaatggagcggggaaacccatgtagcttgaccacatcgcgcacaaagacttcagccaccgtagaggctgtatacgggtgacgcaagggaataaagtgtccatacttagacaaacggtctaccaccaccaatatggagtcaaacccgtgagacatgggtaagccttcaataaaatccatagaaatatcgtcccaaacgtggtgcggaatgggaagaggttgcaacaagccggctggagtttgagcgatatacttgttctgttgacatacaacacattcagccacaaagcgttggacatctttcctcataccaggccagtacaaatcagcagccacccgctgaaatgtcttgaacactcctgaatggcccccgatagcactattacgatattcttggagaaggagaggaataacagaagaagatgagggtagtaccaactgttggaaattattttaccaggatcttaagatcggaagagcggtt

SEQ ID NO: 124672 - DNA, 872 bp, Cannabis sativa
aatggttaaaaaccgcaccacccgcaccgcgaacacccctaacaagcatataataaatatatatttatatattaattattatatgatcttaactaatattgttgttattaatgggagaaattaaatactatccactatatatcaatcccatcaatgactgtcgacggaaaactctcttttgctttccaaagaacaaattacaacctttcacttgtgttttatttgatcatgatgcatggtatatgtatatcactatcaccttttcaacaatattattattattaaactatttgtttttttattttaagattatatatccttagctcaaaaatcaagaacaaaaggaatattttaaaaatatttttttatatgttttattaataattttactgaaatttttatttataaatatacaattttaaaattataaaaaaataatttttttaacaaaaagtaaaaaaaaaaaaaaattagatttcaacctcataagaattataaaataactaaaaataacgaaaaaattcaacttcataataattacaaattaattataaataatttataaaataaaaaatatatatggaataatttattaaagttcatatttttataaataaaaaaattctgtaaaaataaaaatttctcattgcatatttttcctaatttttttaaatttttgatacaattaaaaaacataattattttattttataaatgttatataattctttataatttcattaaaaaatattattaagaaattctataatacaccctcttaaaagagatatatggatacatctctatttactttagcatttaaaataattttttagtcaaattttttttaaattatagttatttaagatatt

SEQ ID NO: 124673 - DNA, 2105 bp, Cannabis sativa
  modified_base (846)..(864): a, c, t, g, unknown or other
ccagcctggcctccacatggggcttggctggccaagaggtgccctacaagctttcctagacacttctacacgtggacaacaacatatgggttgcgaattgggccctaaaagcccaatagaatggctaaataatatttagaatcaagggcactttggtcttttgtaaatatctaacaaactatgcaagtattaaggaatttaaactgtaacctaaggttttaggcttcctatataaaggccttaaccatagcctaaaaacctaagttgcatctaagtctaaaacttgcctccaaactctatgtgtctgataaactctccctctcttcctcacttcctctctcacacgcttaccctagcaacatctcatacttgagttttgccattattgattcatactttgtaatcctaagggtgctatagcagatcccatctatagtgatctagatagtatttctctcggtaaaaatacaactaaaatgggagtaggtcattacccgctatcacaagggggccgaacctttataacaaatctattgtctattgctttttattcttatttgtgtcaacacgtggcaagcatcagatccatacaaccccgctgtcatttgatcactttttgaggtcgacagttggcatttaattgagaaatttaactgttgccttgaatttgcaattagaattgaagtgaaaggggtattgctaccaaaataaaagataaggggattatgtgtatacaaattaaaacataaaggtttgactgcaaatttctctttttttttttattttttattttgtagatgttcccttaatggaatagaaagttggttttattattattattattannnnnnnnnnnnnnnnnnntattattattattattataaagttttattatttagttttctggaagaaattctttcttgtgtcagttgcaacataaaagttgtggtctatagattgactaagtattcccttagaataaataaacgatgagatttttagatggaagaaatctctctattgattcgtaactttgttaccttttatctcttaaccttcgttaaatatccaaaaaaaaaaaatagccaaaaatgacaagtccatatttatcttataaatatggccaaatatatgtgttaatattctaaaattaattctttaaattatttattagtgcgattttgactttttaagattttagaagactaatcatgcatttggagtcatttagagagattttaacatattttggtggaaaatagtggaagctcaatttaacaagacaaaacataattgtggattttgatgactttaaattatgaactgacttggagttgaacatgaagttatagatattgttctcagcttttcagaatatcttaaatcgtccaattccaagctttattgaacgagttatggtcaaaatactgatttgagcatacaacatgagaaactcgggaagtagcgcctaggcagcaagagtccataagagtctgtacgatttgcaaaaagagtcatatttgagttaaaattgattgtatttttaggactttataaataggacttttaaaacccgtttttgacaattttttactacatttttgtaaggaagaactcaaaagaaggaagaaatcattcttttaaaatatatctcacacccatgttgtaattttgaatatttcaagtagaagtttcatcaagtgccatttttttcgtgggtcacccaaaaacaattcggtagacacgattcaagctccaaaatttgacaatcaccatccaaagtctttttagccattagataatcatcaatggtcaaaattagcccataaatattaaaaaatcaattttattcgaatgttaattgattaaatctagatttgtaacttgaatattaaaacagaaagtaaatcaagaacaccaaatttacaagttaaatccaatcttagtaggcgactattgcttggggttcccttgaaccaagtaaagtaactttcactatgaaatcaatcaagatacaatatccaattctgattacaattcaatcaaagtaaacagaaatgaatccatacaaaagttacccaaacacttgattccaaatcaagttt

SEQ ID NO: 124674 - DNA, 1917 bp, Cannabis sativa
aatttttggtttagggaaaattttttttgattttctaagtatagaaaatcaaatttcccattatatattatgttgtttatgtggttacacaaaatttattatataatctgcgaaaattgctaaaaaattagcaaatattattagcgcctaacattttactccatgttatattgttatttatgtaattaaatattaaatcaaaataataacttctaaaaaatattactaactaatatcacctaaaatcatttacactaacataattatatgttgtaattttcaaattacaagtggtaactaatgtgttaaatctaaaacctctaaactaattccaactcaaaaggcaaaaatgataaagaaataattacatgataaagtgcaaaaattattacataatggaaccaaacaaatctttataaaatttgatttgcaatgcattaaacctacatacaatgtcatctataatacatctcaaactcaaattgatttaataaaaataatgcaaaatcatcaatagaacaaaatgtaataaaccaaaaaagatagcacaaaaatcttgaacaaacatcatttaatctatatagcttctttcttgttcaaaatttttctcagtagttagtactctagctagtttgttcttggggtagcccattcgactcgaaggataagattatcataaccatatccattgagtttattaatggctcgctgagcatcttcgcgattaacaaagttaacaaacccgaaacctctgctcattccagtcttttgatccacagcaacgtaaacacggctcacagcaccgaaaggtcggaagagctcaagcaagtcaggctcacgagtatcttctgaaaggtttgtgacccgaacagagttctcatcgttccttcgtctcatatcagtgccgcctctctctgccaccgctcctcctctcataccaggaggaacataagttcccttccctgaactaggagcggctcctggagccgctccatcagatggaccagccttattatcaacaaacacttcagatggggctgcgagatccttgtaagggcatctcgaagtccaatggtcacctttcttaccacatgttctacaaaccatgagaacagcaccacctttcgcactcaacggatctccagaattcttcgcttcttctgccttgctacctatattattccaattttcaaaaacaaaaatttatatatgtaaatccatgaatcgaaatagaatcagttgaatcatggtagaataataaagtaccgggagccctaggtcgctcgaggatgatctcctcagtggagaccatggtgagcctgctgccaacatcttcttgcaccgcgtcgccgaacttgggccaggagcggcgctctacggcccgcttgctgagacgagcgttggctagctttctagttcttgtgatagtggtgatcttaaccttattaccttcgtcattgaatttatattcaacgaccttcttgattccattctcatcgggtccgatgacctgacgaggaggcaaaagaaagtcaaggtcctcgccatcgtcttcttcaagctctccccaccgaagcttggcaggctgcgcaaggtcagttctcaccatcgccctagttatcgagtggtgttcgactgtgtgcgtgccaatgagataaaaaagattagggttttgatatccttatcacattgatatcaatgtagtttacttgcgtgctataatttcaaggtattagttaaagtaaacttgaattagatcaatggaatatctatcggaggggaacgatattgaacttagagacgatatattaaacttattataatatctatttaattcaatatcacatagttgattttagatcaaatgatctcaatcttgagatggttaggttttaattcaattatattatttatgtt

SEQ ID NO: 124675 - DNA, 1137 bp, Cannabis sativa
agaagataaaactcacatcagcaccgccattgctggcacccattctaacgaatactattcttctaagctcatatctaacacacaaacaacataaagttgggttgaaccgagatgagataaacattttaaagtgtattaccttttaatataataaaaaatacctaacataaaatttagtgcctcgcacgtaactttttactagtatttatatatatacaaataaatgcttaatactcttatatatgtcgctgtcgctaattagctaatgatattttcaaaaatatattatattaaaatatataaaattcaatacttaattaaactaagtgatataagagtacttaaatagtaagtaccattacaaccttttactatttctcatataaatagcgcctaagcctctaattatataataattgaataaaaggaataataagtagtaatgaacagcacaaaaaataacaataaaatatttagataaattagaaaaacaaaatacataatttacttctactcttcatgcatgtgaacacaaatcattgcatatcgatctacgggtccctcatatttcaaagttgtcattacttttgtgaatttctttagctaccgcatataataatatattataatcacgagttggtctagtcaacggaatattgttattatttcataaaaaaatataattaaaagaagaagaagaagactctgatgaaataattctccaacgccatacaagcgctagatcaatttatattaatctgactttcatataaactttctaagcggtgttgaaactatatatagcttgagacacgaagtttctgcgctacaatatacacatgaatgaaattgaaaggttcaatataaatatatataataatagactaatggaaaattttactattgcatgtacacttttaaaagtagtgcacagatgtctttctatcatttgtggtaatttgtgaaaaaatttagtctaatttgttttaattatttaaaatattttttaaaattttaaaaatttcaaaaaaatttaatatgctgaaaataaattttaaatagtatgttgattttttttttttttttatttttgacctaaactaattaaatattattttttattataaattattttta

SEQ ID NO: 124676 - DNA, 1658 bp, Cannabis sativa
tatatcgctatgtttgattacatagtttactctgtattgaaaaaaataaaatgttgttccaacgataacaaaaactagtaggtttattgacatatataatgatagactatatacaatgaaatgaattgttgttccaatatacgaaaataaaaataaaaatttattttaatatatgctaaaataaactaatagatttattagcatatacgatgatagactatacgaaaaagctactatgcaaactaaaaaaattaaaatttattttaatatgccaaaataaactaataagtttatttggcatatatgagtataggtatatataccaaataaacttatgagcaaggcatttcattcatattcaaatttttgcaagtacatatattgttatccatgtttattatgtaagatatgttacagtcatgtactttgtatacaactagatttgatgtctcgacggaaaaaaaaaatagactaactagtttgttattttataggcgcacattgcgtttgaaacaaaaaatgaatattgttgttctaatatacaaaaaatagactaataggtttattgacttatattattatgtttgattatagtttactctatattgaaaaaaaataaaatgttattttaacaaacagaaactagtacatttattgacatatataatagtatgttatataaaataaaatattgaattgtttgttttaataaacgaaaagaaaaataaaaatttatttcaatatactaaattaaaataatagtattagcatatacctatacaaaaaggctactatgtaaataaagaatgaaaaatttatttcaatataccaaaataaactaataagtttatatatgctaatgtagacatatttggtctgatcatatgtttttttttgctaatttgtttagaaatatttgcattcattatcatctttaatcttcacagttatcaataaatgtatactttgttaataaataaaaatatctaattataattatatatatatacatttgattagtgaatagttaattaaacatactgattgtagttgtgcactatttttcatgaaaagattaaatctttatatactttatgcaacataagataagtaaaaaattttgttcttagatgttatgttccgaaaaaataaaattgatggcaatttattaagttatgttcataaaactgtattattttcaaaagtatattaatcaatattcttgtttcgtgtactaattagtttggatattaatgtattttaaaagttgttttttgtttcagatttttgattgaattgctatgtcgactgtttggttgatttttcggtttcattgttgaagctttgtaattcacaattgaagcttttttgatcggttttaatggagttttccgatgaaggtttctagtttttattttaggattgtatgatttggcaaattaattggatgatatttaaagatattaattctattgttagtcatgcagtaatttgaaaataagaggtggcacctttgtgtggagattagttgaccatttccttctctaattgcagtaagtgtatgttttgtttgacgttataactttgctgatgtgtcacaaaatttatgttaattattttgagaacgttatttatataattaatttatttcttacgta

SEQ ID NO: 124677 - DNA, 1598 bp, Cannabis sativa
aaaaaaattacaaaaatacgcatgtaggaattttagatatttttacgatttttatgattttatttacaataaatacagttttttgatgtatttttatgttgtacatttgttgattttttgttatttgtatgttattttctgttgtcgtttggattttatttttctataaattttatgtaattttcttgttgtttttctgttgtttaaagaaaaccgtaaaatgtaaaaaaaaaaaaaaaaaacaatctttaaacgtaaaaatataaaaattttacaaaaaatagtattttatgtaactatccctaaaaatgatatatagggagcttgtgcaatgaccctagctgccatatgcttgggccgaccttgtggggcaaggtgcctagtacttttatgacatgtcgttttagaattagttaacggtttctttatgatttttattaaattaaaataaatgggatcgatccaatattgaattacaccaataatgatattatacctcataagagtgctaagcaccataaatgcctataaaagtttttcccagttttctcacattgataattcatatttgttattcacctattgtgactatacatagtttggccaaaaatattttcaagttttcagaaaaacttgtttaaatagatgaaatatgcatatttttcttagagatatttagaggttgtttggttgtattataagttttgagaattgtacttttaaaagtaaaaatagaaaaaaaaaattatcattttaaaaagttaatggtatttgactaatattttctaaaagcaatttttaaatattgttatactaaaaaagaatacttcaatattctacactataccacgatatgaagcccagccccaccttgcacttgggatccaaccccagaccctgaccccagaccacggggctcgggacacgaatccaggcccaaggcacaaacctgaacctaggaccccacctcggccttgccctgggacccgaaaccagacttgtaccccaaaccctgaactcggactcggcctcggaccgggactcagatcaccgaccccgaccagcatagatccaaacctcgacccggacccaaacattgacctgacctagagacccggcacgcaaccctaccccaggactcaaaccgtgaacttggaccaaaatctgaatcccaaaccccaacccggacctcggtcccggtctcgaacactggccccagacccagacccatacctggatatgtgagagaaaatataaaaaagaatatgtgtttgacaaaaaaataaaaattatttttgaaaataaaaaacaacactttactattttctaatttttagtttttttaactctgttttgagaaaaaaaaatttaaaaaaaatttggccagatgctccttattaatttttaaaagttattttctagttttagaaattaaaaataaattttaagttatgaagtcaaacatattccttaaaattgtagaactctaaaaaaattccaacacccaaaatatttaataaataatttatctactactcaaatggtaatactgtattattctactacttaagagcatctctaatagtagcattctttaa

SEQ ID NO: 124678 - DNA, 510 bp, Cannabis sativa
ccatattcacttggaagacattgaaagatcatagaaacatgatcacgagatgaatagacttttctaactgaggtaagaagatcaattaggtatttgactttcaacaggtacttagttctagagtttggttttaactcaaccacattagtagagacttgaagagtaaagtattgctcgagcttggtccaaatctgctttgaagtttcacagccaaccatgcacgtgagaagtctttcaaacatggatgagagaagcaaggacatgaggagctggtcttggacttccctgtcgaggtaagtagaatttaaggtacctacaacacaatctaattcagacctaaattgaaatggatgatcactttttcaaatatcattggagtcgattgcaacgaatacttgttgtttttagagcaaaaagttatgatcattcagtcgaatagagagattgtgtgagagtagatagagagaactgtaacgttcccgcttcaagcctccattgggtccttacacc

SEQ ID NO: 124679 - DNA, 847 bp, Cannabis sativa
taattactgtttttttaatttttaaaacaaaaaataaaagtgtattttgtaaatttaattttttatctttatttgagttaggtttggggtttggagtctagggttcgtgttcctggtctggggtctagtgtctaggctctgggtctgggtccaaggcttgggtcgaggtctggggttggggtccgaggatggggccagagccaggtcccgagtctagggtcgaggtctaggctgctgagtcggggtaaggattcgggtctggggtttgtgttaacgttcggggtcagggctagtttaaggctggggctgggattcgagtttggggttggggttcgagtccagtttttgggctgggatttgggtctcgggtctggagatggggccgggttctgcatccgggttcatggtaggggccagagtttgggttatttggagtccgatattctggtcttgatttagggtctaaatttaagttgggattcgagtccaggtcgaaattaatagatctacatgtaaacaatccaacctcataattatgtctcactttcgataataaataaaagtttcaaaatgatgccaaaaaaggaattaataagaagattgaaccaatcaattattgaattgacttctcaacaagttcttttatgtattcacgtggcattatttttatccattaatatatttttttatttttatgttttatttattataatagattatctatatatattatggtcggtaagagtagtaaattaaaagaaataagagcccgtttggttggaggtaatgaaaataatggaataggaataggaataggaataaaaatggtaatggaatggaataagaa

SEQ ID NO: 124680 - DNA, 1633 bp, Cannabis sativa
taatattcttactacgttacttttttttttttgactaaagaagtgaaattcattaatcaaaactgaaccaatacaaacccaagccataaccaaccggctccacacaaaacctgctcaaaaaacctgtagaaactactcaataagcctcataaccaaggcttttttcagcatgtatcttcctccaattctttaaactatacaatctatacttgactatttctttaatgttatttacaattctcaacttggtataacaacaattattatgcacacaaaagttcctatttttctacaacatatacacagtggcagcagctaaatgaatcctcacacctgctttcgagttggccaaccaaaccttccatctagtgaagtccgaaggccataattcagccccacaccagctggaaacctcctgtaacacctccttagacaacctgcaattgaagaaaatatggctatggctttcttcttccaagccacacaccgggcaaagacaagaatcaagagcaatatgtaacttaacaaagttgtctctagtaagcaagttaccatgaaccacctaccacaaaatgaatcggtgcttgggcaacgaaacattgcaccaaaccgacttgaagaagttatcaatgcttcgttgaattgtccccatatatagccgagctgctaaatttcccctttttgacagcagctatcacattcaacctagtgtatctcttcctcaagtggcatatttttctctaataccaactaacatcaccctttaaatcatactcccaaaaatcaattcctttcatatagatattattgacccatttgacccaaagaatatcatgcttatccatgatagcccaaatgaatttgccaagtatagacctattccaagtaggcccatttttgaagcctagacctccaaaaggcttaggcaagcaaactaaatcccaagaagccaaatggattttgcttttctctcctttgatgccccataagaatcctctatagagtttctcaacctctttgattacactttgaggaaggataaagatactcatccaataattgcgaagcccaagcaaaacaagtgaataagctgaacacgccctgcataagacaaatgcctcgttgcccaagttgctaacctcatctttaccttcttaaagatagtctcacagtcttcacgtctccatttcgtttgtcttaaaggaaccccaagatacttgagcgggaatgttccttctcccatgtgcaaatcttccaagatcacctttttatcaactgtgaaaactcctccaaagtaagcaagagatttatctttatttggaaataaagccgttacctcagagaagctttccaaagcaatcttaagatgatgaacaaccataggagaacccttgctaaataggataagatcatcagcaaagtagaggctcaccaaattaagacttttgcacataggatggaacctaaaggagttcttggttctttccttcttcagacgtctagaaagagactccataatgagaaaaaacaagaggggtgttatagtgagatttttcctcacctagaaactcgagaccagactcctgtttgaaggacacgtgtactcaatttccccaaggaaagctgagatgtc

SEQ ID NO: 124681 - DNA, 1187 bp, Cannabis sativa
  modified_base (53)..(55): a, c, t, g, unknown or other
gaaagttcatatttagggtgttaaacaacattcttgtgagtagatctaagatnnnggtaaaataaatatccaacaacacaaggagtcatggcaatatggttgagacttgaggtggtcacggatgtcaaaatcctccaaatccccatggacgcggcagaagtcgtggtagattccaaaagaggatgttatgaaaatcaaccacatgctcctcaagattaggagcaaatgtttgcagaaaatgcatgccctaattaatcagcaagattaagagattcaaaggatgagacaacagggtcctcctgctatgcctcctcagccaatgccagcaactttggtgctagtggtgctagcagaataattattgctcgtaatcgcatggagcctttataagagcaattttgtaaaaaaaaagcctccaaccattataggagatcctgatgtcaagaaggcaaaatagtggctaagagttattgaaaggatccttaattttatgagtgtcaccaaaaatgacgatgtaacctttgtcttgtttcaatttcaggatgtcgcccttatgtggtgggaaatggtgtcctttacttgggacatcactacaatggcctgagaagagtttcatgatctatttaatgataaatagtataatgaggtaatgcacatcactaaaataaaagagttcactcacactactacaaaaagtataattcccgtcggtttctaagtgtcatttaaaaaatttacgtcggtttaaaaaaccgacatatataccatagtcgcaaataattttttattagcgtcatttttgaaatgacgcaaaaaataattatcttcatttaaaaaccgacacaaaatatacactcttctttttaatcttgtgcgtcagtttagaaatgacgcaaaattatttgtggcatttcgaaaccgtcacgaaaaacttatactgtcggttcaaaaatgacacataaattgctgaaatatttttttttcacctattacgtcggttatcaaatgaagcataataaggaaaaaatacaatttttcatacaatttttcccacctgcattattaaattttaaaataattttatatcataataaatacctaatacaaaaaaagttaaaataatgtttacaaaacttatataaaattagaaatatacataccgaaaaaatgagtataaaaaacacaag

SEQ ID NO: 124682 - DNA, 802 bp, Cannabis sativa
ttttttttttttgagaaaatacaagtaaaaaatttattaaaataatttgtaaaaatattaaaaaaaaaatctgtaaacatataaaaaaaaagtaccattttaaatatccttcctaaaaatttcaaatatatataacatatattttcttatatatggtcggataaaatgttaagtatccttagctaggcctgcctatttacatgggcaataataatatgttctaataaaggaaacttacacggtatactgatttttgttatttttacaaaagtgctgccagatagtatgttttaattttttaccgtgtatttttatgagctttatactgcaatatactgtgtttatttttttttttatttcttttagtgttgttttacggttattttacataatctatttttttaatgtcgatttcactgttcttgctatgttgtttgaattaatgattgttttctgggtaaactcgtggtgctatggtggttctatccgtgtgtgtgtaagatggagactataaaatatattttttcttccttctctatagttatttatggttttttcttttattttggttctcctaaaaatacatttgacgagcttattaaaatttttttttaaggtgtgtggtttttttatatttttttgttttgattttttatgattggacttgcaaatataactactatcgcatttggtattgaggttgtgcaaaatattttttttagttttttttaatcatgttctcttttcttttgtttgatttgttttagtgttgttttacagttattttgtcatgattatttat

SEQ ID NO: 124683 - DNA, 793 bp, Cannabis sativa
catggtccaccctatggcttctttggtccaccctatggcttctttgtgactctctatggcttctttgtgactcttaagaacttgtaccaatttctcttcttgtttcttgtctaacacagttgcgatgataaaagggaaggtttctgactctcctaggaatgcatattttagatctttgggtaaaacctttatatctaacttttatggttcagggagtgactgtgattctaactggagaaaaggttcaattgattcaactttggtgttccactcttctgtatttattaatggcgtagactctaataaagaatttacactatcaaaataactctcaaaattcataccaaaatgacttacacaatttttgaaagaattatctttgttgagcatgaaatcatgtgtgatagaatcaataaaatttacctcatatacatcatcgcattcaacagatttattagcagcattaaaaacattcaacttaacagttatatttccaattgataatttaagaacaccattacgataattgatgattgcatttgatgtgggtgaaaatcaacccaaaatgataggaatttgagcacttatgtcttcaataaaatgagtatctagcataatgaatttaacaggaaagtaaaatttatctacctttatgaaaacatcttctatgaaacccctaggaatttttacagaacgattagctaactgaagtatcatagatgttagttttagttcccctagaccaagttgcttataatcaaaataaggcaacaaattcacactagctcctaaa

SEQ ID NO: 124684 - DNA, 703 bp, Cannabis sativa
cacatcaattaaatccaaaataataataaaaaaaaaagttagcaaatattctttttctaataagatttaacaaataaattaaaactgaatgaattaataaaactaaattctttaaggagagagaaaataacacagctttcttctctgaccacgggaatccatcgatcgacaacgaatgccaatacaagttccgtcttcgccgactacaggaacccatcgatcgacaacaaatgccaatacaaattctgtcttcgttgaccacgggtattgttcgaggttccatcttctcagaccatggccatttgagcaagctgagatttaacagttatgactaagaaacgaatgggacgatgggtatgcgattgcaaaccaccacaagaagtcgtgattcgcacctcaagctgagatttaatttttgcgcggtttggtctttcttttctttgtctgatcttttcttggtttgagttttgtattttattattaatccctctttcttattaatagatttatgggtttttattctgggtaaaaaaaattgcttccctaactcttaatttgatttttggatttgggttttgattttgtaatattttgaacagggttgtgcaaaataaccccatccactcaaactaggggtgtacgtcggtcggtttggtcgggttatagcatatttttattaacccaatataaatatcgggttgca

SEQ ID NO: 124685 - DNA, 1402 bp, Cannabis sativa
gactacaaagcttagtatatccattactaattttgtaattcaaagaagcaaaactttttaaatcaatgacaagaactagactatcttttaccttgcatatttgtttccaatacaagctgctatttccaggagctttatatgaccaccaatcttccttgcctatgtaaacacaatgcacccatttgatccagaggttgtcctactttgaagctaatgcccacacaaatttcccaatcacaacaatatttcaagtaataatgtccctgaatcctaatctatccattgacttcggagcgcaaagcttactccaagcaactttccctgcatcattagactcttctattcctttccacaaaaaactcttgcataaagtatttattttttggagaatcctctttggtagagtcatgatttgggcccaatacgtatgaatcgcaatcaagactcgagtaataattccaattaagaaagttattatgaaccatactattacttttctcatctcgaaccttagtttccaaaagcaaagcaatcctaatcttattcaaccgacaaatatttaaaatagaaatttacttattgaatttattcatacctataactttgcaacaaaggatgttacaccaatccatcaatcatagacaaagagtgagatcaatctagatctttggctcttagagagcctcaaaggcagtagttgtagcagcttttgtgtcattactgtcataccaggctgagttttctaacctttcctatgagaagtgatccattgaccttcagaatcttgaggttatgcttccactattctattttcacctggttcattactattgactgtctcctccttttcctcaaaaaacatcaaattctccttatgttctcctacaccagaaattgtatcaggaaaagaagtaattggatcagatttaaccataggcttattcttaataactttcctcttgacttgattagatttaaacttcttaacccaaactaatcatttttctttagcacaagtgctaacattttgtcccaaaaagcctacaagctgcacatgtagttgacaaccactcatattagacgagttattccgttaaatggttcttttcattcacaaagttgatgctagtaggaggttttttgaaaattggcacatccacaagcacccctgtaaatttgatcattggccggtctctagtgactttgtcaatcctaataggaattcttatagtactcacaagagcacttatgatgtgttaacacagattttcgttaaccaaataaataattcttttttacaataaatatactacagaattaaatgataataaataatacccgatattttacatgattttatagttaaaatctacatactacacgagtccttattattagggat

SEQ ID NO: 124686 - DNA, 790 bp, Cannabis sativa
  modified_base (40)..(44): a, c, t, g, unknown or other
aaataatttcataaataaacataaacaactgctaatttcnnnnntaactaagcgggctttacagaaactatgtctgagcctctttgtccatataatattcttctgaggggaaaagagaaaatttctgataaggatgctcctttttagtatcctcacccacctgccatgactttgttgaatgtccctcctgttaatcttaatatccctgctagtggctctttgggtttacctattaggtttccttcctttctcaactttaatgctacttctgcttttccatttactcagtcccagcagactactggcatcatgattccaactcctattaaccctaatctgcgtgagatgactccacctttcaacaggtctgatcttagtttgtctctgagtaactttgcttttagtccttattccactgattctgtgatagtaactgccactcttcctatggctagttctgagcctttgatggagggctttctgtctcaagcctctattccgtctgcccaggatgggagtgtgcctcttaattccaatcctacggagatggaacttggtgtcaatgtgagccaaccggattactctgctcgtggtaagggtttggcttctgcttcacgggtcaaaagaccttcctttcagcttcatcaagctgttattggtggctctttgagatctaccctgaagggtgctcgagctggtgatagtaatgataattcttctgctgcaactccaaaacatgaacaggcgggtgatgttgagcacacccgcctagaaaaatgagtcttttgag

SEQ ID NO: 124687 - DNA, 1445 bp, Cannabis sativa
aaaaatgttaattattttataacaaattatacagatgtttgtgagcacaactcttcagatctattgtgcttacaaggctggtcttggacttccactaaactggaggtgagttattatgttaaaggaaatattatataggattatttacaccaaattttaattttttttcttttacttttttaatgtgagtagagttttttttaaaaatactgtgtattatgttaaatttttactgttgttttttagctgttctactattgtttttaattgttctgttttgtgctccattgttttataaaaacacagtatttttgaaaataaaatctcgtgacagtattttataaaagttaatctagtatttttgtaagtttcctagtatataaaattaaaggaatattcttcgtctttctgctaaacaaaatgtattgaaatcataattcattagagattttttttttttttaaatgtcaattaagtattgtaactaaattgttgccggttattcaatcatttgatgaccatagtgattctttgataaatgatcactatgagtcagactcaatagaatttggtcaatcttttttttcttctatcgttaaggcagaaaattgaactaaaaactctctttccttaccatcaatccaatcactattcaagacccaaaattctattttattatcaatccaatcactgttcatctcctttcaaactcaacattatattgatacaatatttttcataatgagtgatttattagctattttaagtctcaatttcataataagatgcaatgcatcggtcctgaaatttagtggcacaggcctagcccgcctataccaggtccggttataatgcaacgagtttctcttcttattgtatactaattggtattgaaataaaacctcatatattttaccataacattttgtggatgatgtttaataatggttttgttttatgaattgtgattgtccagccctgctttttgtttgctcgtttggtttctttcattgattgctgttaccatctgcatcggcaaagatctttcagacattgaaggtgaccgcaagtaagtttatatcaattataattaatctacttttgtctttcattgtttttcttttttataatttactataaaactaaacaatatgaggattatttataggtttggtgtaacaacgttcccaactgaatatggagcaaaacccatagcacttatttgtcatggacttatcctcctcgattatgtgggtcttatggctgcagctattatttggccacaggtatttttatatatatatatatatactagtatattgttacgcgcgatgcacgtatgctatcttttatattaagtgttaaattatgagttctgaaggaaataaatgaatcaaaaataaataatatttaatttagagagatttgaataataaatttaaatt

SEQ ID NO: 124688 - DNA, 756 bp, Cannabis sativa
atatatatgagaagactagagaagcattaaactctgttttgtcatatattaaccagaattcaattaagtagtacgtactgacatgtatagatagaaatatataattaaattttatatttatatttatatgataggtaatcactagagacctcttctcaagccaagtcgaacactgcaattcaaagttgctgaacatatatgttatatatagtcttaaaacttcaataattgactgctttatatttatgaatttgtaactgcagatagctatagtacaaaaatgtgcacgtactacacgttactttagtgacatcttattatattatgtttatgtataagaacttctctccaatataactaaaataagtgagatacgatcaaaagttgaagcaaatttctatgatgtattaaacataaaagattaaaaaatcatgatatatattcgacaaaaaaattagtttttaaaattaatgcataattgtaaaacataatgtaaatataataattatactgccatatatatggcagcttttacattttttacattttcttatttcattcataccgttctaagtttttatcattatattgatactttatttttttttgtttttgctcgagaaactcgttcacacaatttttgttaggagttttatttttacactttaaaatatatttttttttacatttttatagaattctacactaaaactcttattgcaactagcgctacaactaaattgcaacaaaaaatcg

SEQ ID NO: 124689 - DNA, 2017 bp, Cannabis sativa
tttactacttgtaacgatacgtatgtaacgatacgtacacttgcgtgtgcaaaatatcacaacaataagcttcaatattttatcctataaacacttagctcattgtaaatgaaatttcagtaaactgttataattactgaaatgagtactccaccatttaactctttagccaaggtctaaggaaattattgtttcacttttaaataatcatagaagctatagatgtccagatctatggttaacactcccactcaattgaattatatcgagttctcaagatgtaaatgcgagctaaatcaatgggtaagctggtaacgaacaactcaaagaactcaagcaatttaaagtttaaccatctcaggattgagatcaaattgatctaagataaactgagtgatatttacttagaaagatataatggtaagtttatgatatcttttccactgtcaatatcggtccagtccgatatatctatacatccaatacaagtttactttgaatgccttgaaaaagacattccacttatctaagtgtaagtaaatcacatcgtcgagtatcacataagtgtaaatccagtgcactaataaatctttggacttaaatagtttgaagtatataatcacaaatatttttcactgtagcgtcaacattatgattgtgaataactatatgttcgtgattaagtataatttatatattaaacaattaatcataaaataaacatgtgaatcaagcaatagacagtagtcaaaagtgatcttagatgtttcattaacagatgaataggattacattgaattattttttatttagggcgtaaaaccccaacaaataatttattgcttttaccatcgagatctttcattgccatagatgctactatcttcacaaccaaagatacttacttcctgagagcaacaccttgctttcttttctataataaaatacaatttcaatgtaatgaataacaaagttatttaaggcataaaactccaataatttttataataaaatatataaacaaatatgaataacaagtaatgctaaagaaaatttgtaattatatattaattacaaggttggtgactggtgagtaaactggcattgaagtcactgcaattgttgctttttattctgaaatacaacttcaacaatttacaaccttatatgactgtattattgttagggttgagcatcggttagtttggtcaatttttttctatataaaaattaaaaattcgatttttggtctggattggtgtaattcgaaaatcgacccaccaatccagaacttatcttaaaactgaccattttgaatctcggtttggtcagtttaaaccgcccaaactaaacttttttcttttttaaaatatgatccaatttataatataagcacattattttacattctacaactacaaccgtacaaattaattgttcaaaaactaattgtcttattcttttaattttaatattaataaaataataatatattattatatattatgagtaattacaatacatcaagcaaaaaaaaaacttaataaattaatatatatgtataacagtcagttttaattttttcggttggtttattacccaaaaaaaatcgaccgttcaacgatggttttaaccgttagcagtttttttgattttcggtttcgctggtttcgattccaacggtattcggtaggtcagtttgaacgggtttttatggttttctagatttcatgctcagccctaattattttactcaatacatttcccaactagattagagcgaaaggcatgacatgcgacaagtccgaaaagcacgacacaacatattaataataataaaaataatttgcaacattaatacctaagtttaactcttagttacaaacaaatacctatgtttaattgttggcaataataattcctaagttctatttttggaactttgtagatatctgactattaaatattaagtcattatccacatatcattttcttattgatatatttaatttttttt

SEQ ID NO: 124690 - DNA, 1507 bp, Cannabis sativa
  modified_base (1457)..(1470): a, c, t, g, unknown or other
ataaaatttgtaactaaaaataaagtagttataactaactataaatcatcattcttatattgtgattaaaaagtccgtgattaaaagtattagtcacaaaaattataatacttgttgtatgtgacaaaatgtattagtcacaatacttattgtgactaaaactaaataagtgccaacttgtatctaaatactaagttttagtgacaagtaactttttgttatgactaaatatgatcacaataaaattatattatgactaaaaattgtcactaaaagtagttgttttttgtagtgtattttactaataagaaaagaaaaccaaatctacaataagttcaactaatgcaatgtcatagtccatgtcatgcaattcactttaaaatcttgttatccttctctaaaagcttaaaggaacaagagtgtttaaatatcatccccgttcttactccattttctatttagacagagaatctctatccttattaacgacggggccctacgggatccatccctatcaactacatctaataatatttattatacatagatttctatactagctttaacttgtcctataaatacacttccctatatacatatatcatcaagaaaaaaaacatagaaacacatatatatttctagaaaacgatgatgatgaagagtttgatggtagtatttgtggtggtgatggtaacaatggtcaataatatggggttgttgtgccatgggactagagtagcatatagtgttactatcattccaagtagtaatgatgaatgtagaatagaaaatcaatactgcagtgccttaccttggcaagccaaatattgttgtgaagggcttacctgcgtaggatttctgagtagcgacaacaaatgtgtgaaggattcaagttgtcgcccacgtgtcggtgatggttgtgcccttttgtcaccttgttgttacccaaatcattgcagtggtactactaggggttcaaaatgtttgggccctggaaaaacttcttctacttctacaccatcatcaatattgtcactagatcatgttgatgaataattatatatgtgtgttgtttgtttttgaattgtaataagaaagtacctctctatagtacttatacaaggatatatgtcaaaccacgttattatatacataatgtggaaatataagatgtataccaaaattggtactttcatatgaataaatgcatgtttgttcaatatatctctatatgttatttctcatccttctgaattatatatatatatatataaaggataagattatagtagagatattacttttgttctattgtttgagatatttttcgcttgctttgatatatatatggagaaattataatatttaaattcattttcagaatgatgtcactacaagaaatgtaatttttaccagcatatagttcactactgcgctggtaaaagtaacttttaccnnnnnnnnnnnnnnactgcgctggcaaagaggtcaaagttttaccagcgta

SEQ ID NO: 124691 - DNA, 1532 bp, Cannabis sativa
ttaaaaatattaaactattaaattaaatttaaatctaatagtaataacgaataataaaatagaaatttaaatttctaggaaccaacaagaatacaatacatgcacataaaatctatgatagtgatgatcatggttttagaagaaactatcttaatttatttgttcaatcatagatacttatattaaaataatatattttgttgtatctattcttatacacacatatttttgtgcaagtgcaacaacaaaaaaaaatcttatatgtatttgaatttactttttagttttaagtatatatattttcaagtaataaaaatatgtatttggattttgtttacttttttttttcctttttctttttatagagatgtatgtatgtatttggatttgttcctttttttttaatgaatcatgttttttttattattatatatatgtatttagaattgatttatgttttaaattatgttagagtatgtactatgtatgtttatattggattttgtttctatatattttagttatgtgtgtgtttttttaataaaaaattatatatagttgatattgatttttaattatgtgttttaaagtatgcaatgcaagacatataatttttttttaagaaaattacactgcatattttttttaatttgatgtcatattaatatatactctctcttttaaaatttattgtatttacctcttttttcaatcattttactaatttcatttctatcactttatgtttacccattatgttcattattttttaattaaaattttgcctcaactttcctacaaacctacacatccatctacaataaacacaaatatattatgtttgaaattatatcttagttatatgagtgtgtgaggataatttaagtacaatactcataaaaaaatataattaaattaacttttatttgagggtaaatttaattgatgtataagaaataaaaatattcttcaattttttcctttttttttgaaaaagagtattatgggactcaaatccacacaattatgaaatttgtcaacatcaaacaagttatgaatatttattgtttacaatacacttaattttatttaaataaaaatctaattataaaaaccatctttttttttttattttgggctcttaagaaaagtgtggccctagacatatatatgctcagcctgctaatgcctagggttgtatgtacatatattttttgatttggtttttgtttttttaattatttttctaaagtacatatttatatatatttggatttaatttctattattaaagaatttacctatgtattttgattgagtttctaatcatatatatatatatatatatatacattatatggagtttctaatcagatttaaagcatatatatgtatatttacacatgtatttagatttagtttctaatcatatgtacatatattttttaaggagtttctaatcagattggttttagaaaagcctttgctaatacaatcactattgacccaagcaaattactggcaagtttatt

SEQ ID NO: 124692 - DNA, 1915 bp, Cannabis sativa
ttaaattactaatttttttacatttaaatagtaattgtattcaatggagaaaatgacagccagaatcaaaacttggagtttgaggaacttttcttatgtaggaagaatggtccttatcaactctgtcttgttgtctattaatacttattggtcccaaattgttattttgcctaaagctgtaattcaaaagattactcagatttgtcgtgcttatctttggaagggagtggacatgagcaatggtaatgagaatgttgcttgggatgatctttgtaaacctaagaaagaaggtggcttgtgtttcaaagatatagtcttatggaatcaatgtgttattggtatgtgcgggctattactatcaagaagaacaacttttgggtaaaatggattaagtgtatctcaaaattaagattggtgggattaccaagtctttttggaggctgtttggtattggaaaagaatagttcaaaccaagataaaaggataaaacaagtcttctcccaagaaaactttcgaaattattagttttccatagctgatatatacaccaagatgccttatgggagtgttgttagatggcgttatgatggcatttgggatagtttttgcactccaaaacacatgttcataagttggctatctttgaagaatcgtttgtctatcttggacagactttgtcagtttaattatacaactcttccttgtgtttgttgtgtggtagtggagtggagagtgactcattcttacctttttttttttaatgtatttacaacagtttggtggtttatcaagtttgaatttagacttgtatttcttgtcgaaaaatagagctccatgatgtcctaaaatggattcggaaggcaaaagtttctagaggtaaaaaaaagttcttttgagtgtcattacagctacaatttattacgtttggcatgctcaaaacaaggtgttttgggattaaaaacttcctactgtaaaagtcacttttaattgtattactaatagtgtttgtgctagagtgaactctatgaatactaagaatttgaataaaataggtgagtgagtgaaagctttaattaaagctttgtaagtaacttatcttgtaagtgttgttgtttgagcatgaataaacttttttgattttccaaaaaagaatagtaattgtatatataacttcttaaaattttatataaatatgtgtggattggatcagatcggctacttttacatgtcaatcaacatctaatctgcataataagtgtagattttttaattttcaatccaatctaatccgcacaagtggtgattacaactacttttagtgataattttttagtctcaacataaattttttatgactaaatgtgacttttagttacagtaaaaataagttacttgtgactaaaacataataattaaatgcaagttgtcactaatttagttttattcacatcaagtattgtaactaaaaatatatttagttacaaaaaattataatttttgtgactaatacctttattcatgaactttttagtcacataataagaatgatgataagtagtcacaattttttttttttattttagtcacaagttttgttgtgactaatagaattaaatttttttgtaatggatattaacactttaaaaattaaattgaatcgtgcgaatttgattagattcattattttatgaatatccataatttgtaccaatataattacatattaaattagcttaatcattttgttgttcattttttttcatatttgctaagttttgtaattgttttttttttcttctttctaatgagttactagattctaattaaaagaataaaaacaatagaatataactcctcaaaaaaaaaaaaaaaaaaacaaaaaaaaaaaaggggggacaaaattttttttcctttt

SEQ ID NO: 124693 - DNA, 972 bp, Cannabis sativa
aagacttacaataatacttatctttcgggattctatggcgttaaattgctcattgttatacctgaagttcagctagcacatcagaggaggacacctgtcaaattgggaagaatacaaaccagcaaatggaattatatttgaaaatggaataactcattaaatgtagaattcacaagagtatatttatagcttgctgactgaaaggtcttacgcgagatatatatatacaaactgttgactcatgcactgacaagaaaccatacgacatcagatgcgcaaaacgaggcatcaacctcgctatggaggaagagatgaaggcaagacatgagcgaggcatgatggttgttaaggcacttgacgtataatatacgggtaaacctaaactactaataacgaggcatccatctcactataggaaggcgtgttcatggtaccttcactaatcagctttagacatctttcaatgatattcacagtctcgtcgaattagttccctcagatagaagctgacatacaaatgatgttgactgctgaggttcaccttgtcacaaaaactgcgatttttcagatggagcattatgtcttcaagtgcagaaacaatgagacctatattatcaaccacggaaagacatgtgaaaagttctagctcgctaccaaggctattgttgctacgttcccagcgagatatcccagaacgatacggtgacatcgtatttagtgcacatttacattaatccggtaaaagcggacatatcacaactgtgtgattctcaaatattagccatatttattttacgtggtatgtgatcaaatcccatgactttaggggataatttttgtaaaatatcagtcaactagggaattaactgcactcctatgtaattataaataggtgcaggatatactagaaaggggacgaaaaaaatcattagagaagagacctaagagctgtatcaaaaatctaataagatt

SEQ ID NO: 124694 - DNA, 1062 bp, Cannabis sativa
tcaattcgatcgtagtttatagttaagaggtaatttaatttctctctttgtaataattcataatttgttctattttttttttttctattataataagatttgtaataaatcattattatcttttatatacacattgttgcatgtttttcagggtaagaataatgaaatgttttgcaataaattaatcacattattccatagagcttgaaacttattttgtgtaatgtacatgaacatcagatgacaatatacataattttgctaaattttcatgaaaatttgatgtgaatttaacgtttttgattttttttcaatgataaaaatctagtaacacgctatatttaatgacttttcttttggtgcagataaatgaaggattgtcatagaggaagaagaagaagagcagaagtcaagagtatcttacattataggaacatccttttatatactcctatttgaaataaatatgtgtgtaaacttagtcacctgtatatatagacacacatacattcatcattttctacttctttcttcttattttttagtgaataataaatttataaattgttaagagattcatgaagcaaattcatggtgttatttggaatgtaataaacattgacaaaatgaactaattctaattttatatatgttaatttgctatatgtcaaaattcttgttctataattttcattcaattcttttattaattggttgtgtatttaaagtattgaaaaagtgtaataaaatgatttttccctatgttaactgttttttgacagctcaacatgtggttatgcttgtccctaactgtcataactataaataccagctctaagttaatagtgtccaagattgagagagagagcttctgtaataaagagagaaaccagagaaaaaaaaactaaggggatcaccatgattaagtttacaattttttttcagttagatctttgagtggattgagggtttgtaaatagagattgtttaggcatggcaaaaagatccattcattcggatcggatcagtgatccgatccgacggatcattactgatctgaaa

SEQ ID NO: 124695 - DNA, 704 bp, Cannabis sativa
gagcatgcatatgaggtatcgtgtctagactgtatcttgcaagcagatactcggagtcaattccacatgtcaccatcgtgtgatgccacatcagagtgtaaaaattgggactacatatataaatataaatagtaaatgtacattttttttataatataatctttctctctcttgcaaaacaattaagagttcttctcctgttattttctatcttttaaatgattaaaaaagtagtttattggttttggatgtagattattcagagttatttatgaacgattttcatattttaataattatagttgtcttttcattattttgttgtttttttttttatgaatgagatagctttttgttactccaaaaatatctttacaaacaaatatcgccttcaatcaaagacctatagaaatagtcaatatatagttttttaaaaccaaacgttccaattacaacttagaaaatcagtttgtatctataacacttactttcctaggcctaaaacaattaattctgcctttgacatcatttttaatcttatgtttgcaatcaaagaatccatggcattacccgagttccacatgcctcatttctagctaacacgccaaatttgataaaccaacttacccggtatttccccttacggattacgggactactgactgtcacaatcacccccgccccttatggggtccgacgtcctc

SEQ ID NO: 124696 - DNA, 686 bp, Cannabis sativa
gtttcgaaaattgagtttcatgctttagtttttgtttccacttgattatcttcaatttgtgtagctgctgtatactttgatttccatgctttgcatttttttttagcttaaaaaatttgtcatacgaggggtaattgatatgttttcacgttgggatttatctaaaaaaatttgtattggattcatgtttacctgtattgaactttagcagacgttgaatgagcatgttggtatcttttttcgccagttatttactttgttttgtatattttacattactaggcttagattgtggacttgggtttgtcactataagaaccatctttttttataaaagaaattactgtataataagacaatcctgaagtggtgattcttgggtttcaagtttaatttgtcttgtgttttggtgatacttgttgttgatagatatggacgatgatttacctgctggaatagaaagtagtggccgaagaaagaacagaaaaaagaggaaaactggtagtacattgggcactagggaggaggctacaccaatagagaccgcggtcaatgttgatacaaaggaggcagcggagatcgatgttaaagcagaggaggctaccgaggtcattaatgacacaaaggaggggatgactgaggccaaagttaatacagagttggtgccaacttcaacaaaaaagaaa

SEQ ID NO: 124697 - DNA, 4009 bp, Cannabis sativa
  modified_base (26)..(53): a, c, t, g, unknown or other
tattgtgctgtcaacacattggaaannnnnnnnnnnnnnnnnnnnnnnnnnnnctagatttatcagacacagggttagactacggccacgacacgaatgagagcaatagcttgaaccgagaaattgaattcttaatcataaagcataacctgcacttgcataaatatgtcaaggtcaaccaaaatcaaagggccgcccaaatagacaataaccaggatttattgatgccccatttaccagtagattggcatctacaagtcattatcaggggcccacacccagctggagacttgggcaaagctcgggaaaagtatgcccgagccttacaacacgagcaaaaggaaatagttttggccgtagaggaaagaaagccaaaaataccacgggtaggggaacccactataatcttcacaaaagtagatgttgtccacgtccacttctcacatcacgatcctttcgtcatggaagtgcagatagccaacaaaacagtggcccagaccatgatgaacaatagagcctctttgcacatcttgtttaagacaacatacgagaagatggggctctaacttaaatatttaatcccccgtacccaattggtgtatggttttttcggccaaagtgttgcacctttggggcaaatctgtttacccctcagtgttgggcaagctccaaggagcataactgtgatggcacaatttttgataattgatgttccatcagccttcaacgtcatgttaggccgaccaaccctatatgacttgaaagctgtcactttagtttttcatttgtgcatcatgttcccaacaaaaaatgggatagggtgcctcaaagggaattaaaaaattgtacgggaatgctataagcttgccctgaccaaggtcaaaaaggagaatacctccagccagaattcgagcaaagggaaaagtattgcccaataggaagtcacccaaggcggggacgaggatgtggatccccgacttggggaaccaaatacaaatgtagggctagtggaagaattggaagagatagaaatcgacccaattatcctgaccaggaaactcaaaattggcaaaggtttcctgctcgaagtaaaattagccttaataaaatttctaagagcaaacctagacatttttgcctggtcacacgaggatatggtcattattgatccttctgtaatatctcacgccctaaacatcaatcaaaactttcatcccgttcaacaaaaaagaagattattggacaaagaacgggcacagacattaaaaaaagatgtagaaaagttgcgtactaacaagttcatcattgaagctttctacccagcttcgttagctaatcctgtactggtacccaagtccaacagaaaatggctattatgtattgattttaccaatctcaacaaggcatgccacaaagactgttttccacttctaagaatagatcaactcgtggatgcaatagccgagcacgagatcctaagctttatggacgcctattcggggtataatcaaatcagaatgcatccaccatactaagaacatataaggttctgaacagatatgggtctatactgttataaggtcatgccgtttggtctaaagaatgctaaatctacctaccagaggttggtgaatcaaatgtttaaagactagatcagacgaaatatggaagtatacgttgatgacatgctcgtcaaatccaggaaggctgggggcatatagaggacctagacaaatgctttgaaatcctcaaaaaatacaacatgaaactcaaccccttaaagtgctcctttagagtcagctcgggtaagcttcttggttttattattaatgctcgaggtattgaagccaatccagagaaaatataagccctcctagatatgaaatcgccaacaaaaactaaagaagtccaaagcttaactggtcggatagccgcactcagtagatttgtttcaaagtcaacatacaagtgtgttcctttcttcaacatactttgaggtaacaagaaatttgaatggacggaggaatgtgagaatgccttgcaagagctaaaaagacaacttgcaaaacctctcgtactctcaaaacccctggacggagaacaattaggaatatacctagttgttatagaatatgctgtgagtgccgtgttgattaaagaagagaacaacattcagcatccacactattatattagcaaaagactcattgaagttgaaggatgttacccattgatagaaagcttacttactacctaatcttaccaacaaggaagctaagactttatttccaggctcatcttgttcgggtatacactgacaaaccattatgccaagtattgcaaaaactcgacgcttctagacggttactcaaatgggcagtagagttgggtcagtacgaaataatctttcaaccccgaacaacagtcaaaggataggccttggtagactttgtagttgagtgtgccgacaaaaaagaaagtagctgcttaaaggacaacccggagccagtacaagaatccataccaaacaacaacgaagacaaacctacctagaaattgcacgtggacgggtcaactacagatcaactatcttgtgcagggattgcccttatcacacctgggggacaatatctgcatagagtagttaaatttggattcaaagcttctaacaatgaagcagagtacgatgccctcattactggcttgaaacttgcttgggagctacacgctaaacacatcgagatctgtagtgattcacaattggtagtgaatcatgtgtcgggagagtacgaggcccagggggagaaaatgatagcttatttaagaaaaatacaggatatgcttgcacaattcaagggttatactctcaggcaaattccaagggaagaaaacagaactgctgatgccctagccgacttgtaagaagcaccataactgataaggcttatttagtcctaattcaattcctagaagagcctagcatcacctgtgcggaggaaattgaaatgatagacacaactctgaactggatgatgcctattgcagcctacctcaatgctggagaacttccaaatgatagaaataaagctcggaagataagaaggaaggttgtacggtacatcatcgtagaaggagtaatgtacagaaggggattctccatggcattacttagatgtgttacaaaataataagctgcacgacttctgtctgaagtacatgatggattctgtggcaaccacgcagccgggcaaagcctatcaaagaaaacactaaggcaaggatatttctggccgaccatgatggaagatcaatggcctatgtaaaggaatgtgataaatgccaaagattttcaatgataccccgtccaccacctaacgagctaactcaaatgcaaagaccttggccatttgctatttaggaattgacctgatcggataattgcgtaaaggtaagggtggagtacgatatgcaatggtcgcagttgattattttacaaagtggacagaagttgagccattggcgagaattacatctaagaaagtattggacttcgtggtgaaaaatataatatgtcggtttagactcccgcacaaaatagtctcagacaatggcaaatagtttgacagccaattgttcttagatttctacgcaaaccatggaatcataaaaaatttctctgtagtggcacatcctcaatcaaatggtcaggtcaaagcagtcaataagacactttgaaaaaaacgacttgaagaagctaaggggaactagccggaggaactaccaaaagtattatggtcataccgcacaactggacaaactctttttgctatggcctatatatgtctatgaagctatgttgcctgtagaactagaaccttcgtcccacaaaagattgacctatgatcgagaagctaatcattaggggtgttcattggatcaaatctaatggatttggacccatccgatccaatccaattatttattggatattggattttgccatccgatc

SEQ ID NO: 124698 - DNA, 1335 bp, Cannabis sativa
aaatgtataactaattacaatattgatgttatagtctctaattattataaaaaaaaattaacttataatttaggtcaattataaataagaataattatatttttataatatatataaattataaatttatttattttacactaaattgtaatacatgtataaatattatatttactaaacaataattttactatgatataatattaagtattatttattattattgtttacattttttttttttttggtatttttttttcgtctacatctatttaattataacatctcaattagaatataatttaattgatcataattatattcttagataaaaattttactgtataaatatgtaataattattttataaaaacaataatatatctagcaattttacaataaggattttctttttctcacagataagagtattttaattttagcatttaaaaaaattattttatgcaatatatattataattatttaaaacacctaaataatttaaagtgtgaaaaactactcacatatgaaatattcaaaccaaggtattatatgcatgttttgactacattataaattattttagaaaattatgtaatactaaaataatacaatgtacatagtcatataaatcttgtcgaaaatacaaaataagctctcatgaagtttgttttatacgtgtgtcaaataaaatattttaaaatttattttttatattctgtgtgacagttagtagtctcgtgatctataaggagaaatactgggtaagttgtgcaatcctacattgcttggaaaaggtcaagtggaatgattctaagactgtgtaggtatataattacacaattgaagagggcttaaatagattgattgataccacatatatcaacaaggtgcatcttattttctagtagcccatcacgaacgaactccacagttaagcatgcttgatctagggtaattccatgtgacctactgggaagtattcccaggagtgtgtgagtgaggacaaagcacactggaaacactcgtgttggtttgtaggattagtcatcagtttaggaagcacccagagtgacatactcgtgtataagagcgagccatcattttgtgggtgtaaggacccaatgaaaatttaaagcagcggcgttacattataaattattttaatattttacaaacattgaaagaggttaaataattacaatgtaaactgtcaaaaaaaatatttatattataatttttctacgtgacagtttgaatgtggaaaacatgtctcacacaaaactattttcaaattccaatatatctatgttatattaaatgtgattatacaa

SEQ ID NO: 124699 - DNA, 1381 bp, Cannabis sativa
ctcttgactgtgatgttttctcctcctcaggatgctttgctggagaagtatttcactaaaggaaaattcactgatcttgagcatcaaaagattaatcgacccaaaaaatctctaatagtaagataaaagcttcattatgctataaactagaccttttcttttggagtctaatctaaggtgtttgagtcaggttgtcacttgttggtcatgtctagtagtatacggcattgtgaagctcattcaatggtcttctctactgtcatcatggcaaggcattacatattttggagctttcttggttcttgttaccttcactatgcaaatcctcatccaatcatctgagtcagagcgatccacacccgttgggttaccctcacaagatccaatgaggcaagcctttattcagaactatgcagagaaccagatatttgacaacacttcatagtgtgtcaatgttaaactagaattcaatactgatatcaagtatcaaatttttacttgtggagattgattgtgtctaataaatagcagtagtctttatgtatttattgtacatttgtgggtaaagcatgtccaaatcatacaagacattccatcaataataaagggacactacaacaataatagcatataggcatgttcacgaatggcacgatccaaagtagtgccaaccacagagtttattttggctcgacacacttaatgtggtaccttttatttatttttatttttttttttaattttggtggatattggcgcgacactaggaccaataggcgcgaaaatgttgtgccaatgatcttttgaaaagttgtcgttagttcgggcgggaaatttccctccaaggcaggttggcatgaccacgtggggctcagaactctgacatggcgtgccattaaatttttattttgataggcacgactattagttgcacacttagtcgggccaaaatggtccttttttttaaaaaaaaagcagacttgggtattggcccattcaacccttcatttctttcatttcattttccctttcttctctctatttcaaaaaaaaaaaaaacctcctttcttagccaaaaaaaagtccaaccctttctcaaattgctcacaccatcggagagaagagggtgttgatcagagctggctgcaacagaacaacatttcatgtggtgcctctgatttggtctccttttgagttcaaaaacaccttcgttaaattctctaaactccgttttatccctctttcttcttcttcatcactatttgttttatcttcttcattctaaagttggtcttttttttggtgggattttgtagactgctcagattttatatgtaaatatgtatgtatataagtaggggtgtgcataaatcgattcaat

SEQ ID NO: 124700 - DNA, 1550 bp, Cannabis sativa
ttcactaagcaagggcgaaattttcactaagtaatcttgaagtgttacaattaataacaaatttgttcatattgttttttttttattaaaaattatttttaaattttgatatttggagtaagttaaattttaaattaaatttaaattttttgatagtttaacttgatgggcattgtcattaattgttgaaaataaatttaggacgaatagtaattttttttttaaattactattaaaaagtataatagttaaatctaaatataattaatccacctaaagtgttacaattaataacaaatttgttcatattgtttattttttttattaaaaattattttcaaattttaatatttggcattagttaaattttaaatattattttaaattaaatttaaatttttttataatttagcctgatgggcattgtcattaattgctgaaaataaatttaggacgaatagtaacttttttttttcaaattactattacaaagtataatagtaatttttgtttttattcaaatcactattatgctttaaaatttcaacaattatcactgtgttgaatattattaattttaaaattatgttattaaaaaataactgaaaactaaaataacactaacatacgtgacttgtcacgtaacatttatctaatttatctatacatatatattattaaccaaaaaaactcaattgtactttccatatatttggattttttttttaaagtatattttttaattttaattgtttgatcttttgttattatgtgtattctctcaatttctaactgccttacatcttattcattatttttttctctcttcataattgttactaccattcattttcttttttctatatagcatcaaataatattttctttctattcacaaataattacataatttacatgtatatgttgaatttcacaatcaaatattatatagcaatctctctctgtaatggatctctctcctaccgagtcctagcataatttatcgcatgaaaggccttcgacaaataattgaatgaattgtaacacttatcttggtttcataaaactttgaggtttttaattttcgtcacttttttcttttatctaacaaactgattatatctttaaattttctttgaatgaaatatttaaaaatgagtgctaattacaacctcctattacaatctcttagtcaacctccacacccgaaatcatatgccagaatatctttttcatagcggtatttattttagttacagtatcatgcttataaattttttaaaaattctggataatttacaatgcctaaaacaaagtttctgatattcttatttttggtactgtaaactattcaaaagatttcaaaaatttactggaatgcagaaatagaaggcagtgacatgttattctaaattagctttattctactctatttatatctccttaattctcttattattttttttaattttttactaaatatataaatatcaattgattaattaattaaaaaaatctaaataagcaaatattgttataaatattaataa

SEQ ID NO: 124701 - DNA, 526 bp, Cannabis sativa
gagagagagagagagagaaatccactaagggatataaattagtaaaagtaaaatgcaagggatatgaagaacatgatatcttttgagttatatgaccaaaataaggtacaagaaataacttttaattgctacattcatgaacctttacctttatctatatagtttctaataagtttgaaaaccaatatttgttatctacggttatattaattccatatcttttgactgtgccatgatgttgatgttgagagtcaaatatcttaattttgataatcatcatatatataaatgaatttcgtttattagaactaaaatatgaaatctattatatatacattataatcatatcatatcatgtatatattaaaaatattttttttttatcaagaaggaacaatttcattaatcaacaagcaattccaaataaagccaaattgaaaaagaaaaaccagctgctaacaaaacaactacttacaaaataaatactctataaattttctctcatgtctattcaagctctctcttt

SEQ ID NO: 124702 - DNA, 1480 bp, Cannabis sativa
taccttttagtgacacactttagtgacacgcacaaatgtgcgggtcactaaagagttaagggtgagctttagtgacacacacaaaaagactctgaaattcaatgttagtgtcttacaatgcttgtcactaaaaatatgaagtgtcactaaagaataattcccataatttctatttttttttttaaaaaaaattaacatatagtgacgcgccaggtatgactaggtaaacgtatcccaacatgtttggcgcgtcactatatcataattctaaatttaattaattgtttatggtaataaattaagcgcggtactctaggaaaatattggggtccactagaaaaagttaatgctgaattaataaaaaaaattaaaaaaagaaaaaaaaaaataaagaaaagcaggtcccaatgtcccatacgcgtgtatattgactctctctccttttcattctttttttttttttaattttggggagagaaagaaccaactgcgtaaaaatggagagaactctctctctctcagagagtctaaactctctccttttcattcaaattgcaacaagaaaccctaatttttttttacagatatctctctttctcgcctctttctctctaaaataaatttctttcagctagccaagccagattcgcccttctccctttcctgagtggcgtcaacctctgtccgttcaccataaccttgtcgtcgatcctcctcgtgcgcctaactcctcctccgtctagaagcatagccaagcagtccaccatttctccaatatttctctctcccgatctctctctctctcttgctcatctcccactctaacttttagtcctaaatctaatgttttttccttctcaggtgacttcaggattggattgagaaacttccagggtttgggtgcgcgcgaggaggatcgattactgatataggcggtggttttgagtttgtagacgtggtgggaacttagaaaggggatttactgaatctgaaatttgttgttttcccttgaattttattttttaaattattttttagggttagttttttattttgtgttcatatatgttaatttttatgggattagctagatctttaatttgtattgtatttgtttatctctgaaattttattggttttttcatttatgatgaatgaaattgatgtttataccttacaataattaatttggaatttggaatttttatttagttattttaaaattttgccccaacaatagaaataagcaaagaaaaaaaaattattaatatcagtacaataaaaataaataaatatttttaaaaataaaaaaataaaaccctatgtcaaaaaaattatcaaaataaataaacaaatcagtacaataaaaacaaataagtaaataagtatttataaaaataaaaaaataaaaccctatataaaaaattattaaaataaataaataaataagtatatatagtggcactttttgtgtgtcact

SEQ ID NO: 124703 - DNA, 1242 bp, Cannabis sativa
gtatactgcaatatgaaacttatagaaaaacacagtaaaaaagtaaaaaatactgcctgacagtattttagtaaaaaaatagcaaaagttagtataccatgtaaatttttttatatgtatttatcccattagtgggccatgtttacatgcaaacccctaaacccttcaaaacaccagtaaaaatttaacacagtatactgcaatatgaagcttataaaaaaacacagtaaaaaggtaaaaaaaaataccgcctggcagtaattttgtaaaaaaataacaaaaattagtataccatgtaaatttctctatatgtatttaccccattagtgaacaatgtttacatgcaaaccctaataagtctcagtatatccatacctggatcctagcctataaatactacattatacattcatgcaaatggtaaaaaatttattactcaaacacgatagaagaaagctaaagttcttaagcttgtcaagaaaattgatgtaatactttaaggttacttagcctaataccatttacttcatgtggattagggttcattaatacccgaaccacctaaaaatctttatctccatcttgtttatttgattcattttattagcttttattttattatattgagttttttttttttttttgaaaatctcggtaaacatgttggtgctttcattgagagttgagaaaagatttgaagctacgttgtatctgcaacaatggtggctaccattctgtcacaaagcctactgctcatggtcaggacgctataatggatgacgttaagttgcatcccgcggtgcatgcctaaacagggaaacttccaaagttggcagctgtccagccaagaaattggttgcccaacaatgaagtcatcataacataaatcagcattcattactgcaaaaatgtatttttgcatcagtcaacacgtcgtcaatgccaaaaatcgacacaaaaaaactacaataagattttttgttagtttagaaccaacgccatattcaacatttgcgacggtttaaaaatgatatattcaacatttgcgtctgtttataatagacacaacctagcgtctattataaaccgacgcattaaatgaaaggaaaaaaaaagcccaattaataacacataaaaccctacatatataaactaaataatataaacgtaaacctaaaacccaacagccgcaccccatttctctctctctctctctttgtctctctctctctctctctatct

SEQ ID NO: 124704 - DNA, 986 bp, Cannabis sativa
tccgaacagatgctccaagtagagtccgcgtgtcgccattctcgtgatgccacgtcagagtgccaaatttgggataacaccacctaaccctaatttaaaatatccaaaatgccctttcttccaactcaagtaacttataggcttaggggtaaaatagtctaaaactataatcccgcctaaacttgatattccaagtatctcatacattttctccctataagaattaggttctaaacatacccatgtgactctaatagccatctatcacattttctatcgtcaccgaccgaaaatcataaaaattgcatattatatatttaacataaataatacccttagagtttaataaatctccaaaattgaaaaattataactctaatgctcatctttaaaaatagtgcccacaataaatataaaatgtcgataattgatgctaattgtctttactaattcataatctaattatgcggtcattacaagattcaagtattaaatgtttaaatgttatttaattttattagacaattctaattaaatatttatgtttccaatgattccttaatgaatcattaatcatacatgattagaatagaattctatatccatgtatatatttgaatagtaattcatacctctcaattaaatctcatttaatttttaagtttagtactatagaatcaaaaacatatttttaatttattataaacttaattgtagaaacattgataagtcactataaaaaataattacttatgtattatttagtcaaaataaataattgaaacatttaaacttaattttaaaattatactatgagcattggagtctttaattaactttgcacacataagtttgcaattaaataaactttattaaaaaaaatataaactattcaaaataaaattattaaaataaaagggaaatttgcggtaaaagtccccaaaaagttcagtttgatacagataagtccccaacttccaaaaata

SEQ ID NO: 124705 - DNA, 4109 bp, Cannabis sativa
agtaggatttattatttagttattggactgttaatttctatttggcactaccgttatttcagctggtagttggtagctataacaactttttgttgttatctgctactggtttttacgcctatataaggctttcttgtatctttgttcattaatcaataaaatctttccttttgctttctttcatttccgcaacagtccatttggtattcaaacaattatacttgaaatcaacaatgtaagctcatatatcaatcccaaagctaaaataaacacatataccatcaaatcaaaacaaagagacatacaaaattctcgattcttcgcaaaacacatatagtttacaaacctaacagacgtgtaaccttaaatttccctaattcacaagaaatgaaacctaaacggcaaaattcataaattgaaaagcacgagcatgtatacataattcaaataaatagactcaagaagaaattgagagattacccacgaatcgcttttcgaagaaaaccttaccagctatgattgaaagaaggcatataatagagaatcaattagagaaaattagggttcctaaccctgaatgccatagctgaaataatgagatagaaagctagaaagagacataaatattaaagcaaagctactgaatgagcattgagctcttgaaggagaagaggaaggactcgtattgagctattgaccgaagacaaagtatgacagaacaattaatcctttcaaaaaaaaaaaaacaaattaaccagtcaacaaagggcaaattgaccagtcaacaaaggacaaaattataaatacctaattttacaaagggcaaaaatgtcttcacaactatcacctcattaccacacttttataatagtaagaaagatacatatggtttgaataaattaaattaaaatttaaaaaatatatataacaattgatataaattcattgaaaactcattgtatgattttaaaattgatgtcattactgtatcttatttgtagttgctattatatttaaagtcattattatcatcgtacctcacttttagttgttactaaattcaaagtcatcattaccgtatctcacttgtagttattgatatattttataataggtttgaatataaatctataaaaaactctttatataatttcaaaaacgtagtactctcatttataattattactgcatccataattattattatcaccgtatctcacttgtaactgttattattgctaagatttaaataaataaaatgctatatttgctaaatatgaatataataaattattaaaataaatgataaatatttttaaaaacattaattaattatcaatataattatatatattttaaaactattattgagggtaaaatctacaattacaaaatttgggcatcagcaacctgtcaagaacaaagagagataaaagttcaattgggagcaccggtggggtgtcaaccaaaggaattttgacgctcaagtcagtactattgtagtaaaaaataacgataacggaaaataaatgaaatgtaaatggtagccagacggatgagtggacaaacggacagacggactaaaggaacaactacagtggtgaggcttaagagaaaagtttagaaaggacgactgtctgcttgagtgagtagtgtgagtatcgaatgttcgatgccctgtgtctaccgtatggtttcttttatcatgtgtcttcagtactgttgccttccgtccacgtcacccattggactcattcaagttggttgcttccctaattttaagggagtagtatccgtctttctgagttcaatatttacttgagcttcaatatgtatatttttgttttgtctagccggcattttgctttctacatgtttttgtttttggtgaactcgctcttagttcagtacttttgttctaggtgggttttttgctatgtctatcagcaaccatggtagttgtgccacttcatctaataagacgactagttcatctaatgatacttcaaacatttctactggtgtggtaggttatgtattggatgatgagtgtgaggatatggatgtccatcgctatgcatttggagttggagtagacatcgatcgcactatgagtgatagtgagtcggacgatattcttttggatattaatcctaggtcagaaataatcttgaacaacttgccgaaaatttgtcgtcattacaatattcccatacacattagtttgtatgctccggctagcagggaacgagctgactggaagatactggattggacgtgtttgtacaagctttcatttaagtatggttttagatttcctttccctaagttaatgtctgaattatgctcctatcatggtatctctcctagtcagttaatgcccaatgcttggcgtattcttatggctatataagtgttgaccgaaaaacataacattacatttacggttgtcgaagtcttgcgtgtctactacttaaaagagcatatacataataagggtaggtatcagcttactgtcaaaaacagtagtgatcatctgattcttagcgttaaagaagctaagcgatcgaaggaggatttttctttgttccttttgatgctctaggattatcagttgatcgcgggattccccatttgtggtctcctgctattgagtgtcatagttttgatattgaattgcgcccttatttgttatggtttattgatacacgtataattggttgatttgtcttctttgtaggaaggattgaccttccgtttagttggggtttagagtttaggatttagggagagttgatcaagttcttcaaatttcggaggaggagcgctattgaaacattctattgtttgattcttctcttcgagacaacattttgtgagatcacattccacgtgaacacgaaggtatatctcctcctaagaatcgtgctaagtctcaagttgttatactctaaagaagttttgagatttcggagtgtgaacctttatttctacctgaattgacgtcagacgaacgagattttgcagatcgattcatggcccaatcttctttcactcttcctctggctggtgacgatgctacggactgtttacgctcgcgcgaacagaagactgggacgactcccagtgctgagaaggaggttgttactattgttgctccttcttgtccttctgtgagagctcagaagaagaataacaagagaccatctccggttgaatcgactgactggttgagtaatacagttgatcttttttctccatcttaaatggctgcgcattctgagtttagtctacaccttggtgaggccagtaagctattatttccagaggatcgagctcgatttgagaatattggggaaataacttctatggaattgtccatctctcgctcctttcaggtctgcataaatttttatgttacgatttatgtatgaaaaaactcatgatattattgtgtctgaccattttgatactttatattgtatgatagggtatggaagggcttatgtacgctttggataagatcaagaacatgaatgagccaatgaaggttatgaggtctgaacgttatgatttatgcgaggagattaaggagctgaaaggctgcaagaaagagcttgactgtgtcaaagaagagttacgaacttaactggatgctaaggaacaagattctagtcgtttgaagtctgccttggctgatcttgctactgcccaagctcgtgtggacatgttggaaggtcgattaatcgaaattggactggagactgagatccattgtcgtggaaaaatggcgatggagtatcgagacaacaaggcgagtcttgggacatacccaagtacattgctgattatgaagaattgctgcaaatgagggccgagaaagatgctcgaactagccagttggctaactcgtttgaagggatgactacgaacgatttcccgatggatgacacacgtctgttttgtgttaactatatgtttgatgttttatgtttttaatattgtaatatgaacttttgtctggttggctgacttgcatgggtctggtaccccattttccccttagtctaaatgtaggtcagccgagttggatttagacttagtatttc

SEQ ID NO: 124706 - DNA, 1692 bp, Cannabis sativa
atcttaccataaaaaggaaaaattattttgtcacctaacttgccaaaaaaggactttacacaaatgatcaattcgaatttagttttggtatagacttgggatatatggaacaaaaaacaagttggctttgaagcagcagcaaatcgaaaatcaatatgaaaatttgagtgaaaccaaactgatttagcatgtttgcagctaaataaagcatgtcccactgatgcccatatattttgacataaactacaagtaacagatgtgatgattttctgtttaaataatgcagcagcaacaagaatggagttttgaatcactctccaaccaaatattttgactttggagggaaggtttaagccccaatatgatctccaccattgttcttgagaaagagatgaagattcattggactccaaagcaattgaacaagcaaaatgagatgaagactctgtaaaagaatatttttatatacctcctatttattttaatatctaaaatatattaaaaaaaaaaattagattcatttattttaataatcatgtacgtagtttttttttaagagaacctacaaatgagattgtttttatttttatagtatgataaaaaaactatttaaattttatctttgacactgtaaattatttatagtattttaaaaacacgttaattacaataaaattctcaaaattatcactttgcttgcacttaatccctaaaattcaaattttagcgacaaaacccccaaaactcatatttcgttagcaatttactatttccatccatattcaggtattaggtgtcatgttagactattatgtgtacacaatgtattgtccatgtggacacagagtacacatgacacaattttattagtatacgtaaataaatattaaaaaataaaagaaaatttatagtaaattaatttaaaataaaaaataaaataaattaaaaattaaaataaatgataacatttaaaaatataatttttttcttttccaattttcttcttctttttcttctttatttttcttcaaaaatatcatcacacccaccaccaccataaccatccataacaaccgccagcctaaaacacaaccacccaccactaccaccacggtaccaccacctctattatagatcaaaataaatatcaccacctccagccccacgaccaccacaatcacgacaccgccacctccaaaatcacacaaaaataaataaataaaaataaaatcaaagttagatctaacaaaacaaacacacacataaaaacgaaactctcagatctaaactccaaacttaaaatctatttctaaaagagtgagagggaaaaaatcgtgactgaaagagagagactccgatgagaaacttacagcagcaaaatgggaacgaaatttttggtttgggggtttcgggaggtccagagttcgatggtggcctttgttgcaccgtcttgtggccggagaaggcacaatcgcatttgtctgagagatcctgagtggagaaatacagaagatgatcttcatggggaggagcaaagttcaaggaattttcgtggtggagaaggagagagacggtgggtggagagaagaccagatttaggtttttgtggtggagcagaggtcaaatgagttttaaatctagttgattttttttttctgtgttaccggtggtggtgggggatgggtggcagca

SEQ ID NO: 124707 - DNA, 1320 bp, Cannabis sativa
tttttatttttattattttatttatttttttgtttgaaacctaaatctcaatcaatttggctttaaacaagtttttgttggtcaactattttaatgtcttgaattattattatccaaaagtaagaaagaaacaaccctaataatggacaagccgattttatcacttatatatatcttaaaattatatataattaattattattattatatatatgaataatatataatattatttatacattttttatttttttttactttaaatacacaaggatataaatataatgataatcaaactgaatttttaaaattaattgaacagcagatcggaccttatataactaatttttttattatatatatatatacaaggatataaaataagattcaatattgtttagaggcttaatatatgtatcactaaaaattaaaaaaaaaaaaatcatgaattggtcaactatatatagaacttggaagacatatataataaatttaaatttaggcgttggaatctatatctcaattagatcttaatctacttttactctactctaaatatgattagtgatttacgataatggattgactcgttagattgttataaatttgggttttttttttcattgaatttaatgattgctaatattaaaaaagaaaaatgagtgtactcaaatacacatagcatttaaagctcacgatattgtcaaaagagttttgttttaattaatttttaatttttaaaagaaaaatgagtgttttaatttattgtgtaattttttttaaaaaaatgaatatttttttacatcaatcaaatataacatcaaatgaatgggactcatggcaaaagtgattctaatctcctacaatacaatatattttagtggctataaacctccatttatatccacaaaatgcaatgaaactcattttattttaaatccctacatatagggtattttttaaattctcagagtagaagagtcatatatatatataaaaagatgataaaaaaagtattttaatataggaatcatgtgcaatggcctaagctgccatatgctttggctgaccttgacaccaggacactgcgactgtaccatttgttgttgtggcaatgtggaacctaagttggctaaaagtaatgggtattcaggaggctctaaattggataaaggacaaacaatagtcggcgatggtgacagattgtatggtggcggttgaggccattcacaatcaattaatgatgaattctccttttgatttagttgttaatgattgtaaacatttgattaagggcgtgtttggaagtaactgtgtaat

SEQ ID NO: 124708 - DNA, 1139 bp, Cannabis sativa
  modified_base (45)..(48): a, c, t, g, unknown or other
  modified_base (1096)..(1105): a, c, t, g, unknown or other
tgatctatattaataagtaaatttaattatattaaaatgagtttnnnntagggcataaaacccaacaatgcgggcttactgtgagatcgatgctagtcgaacattgtcatttaccctgtccagatgctccaactttttctttaaataagctatttgaggaataacccactctagacgacatgccaaggaggtatcacctgtccaagtcttaaaatgttccatgtgtcacctagatgaacatcacatcaactggtgcaaaatttgggacaaaattttcccccaagtctgtgtgggaactttttgttcatacgtggacttgctcagactacatactaggtgaatggggagacatatgctcagactacgaggttggtaaatagagttgtcctttcatatttttgagcatttaatgcttcacctcaaaaaatgtgctttgggtcgcgtgctagcagttggacactccaatgtgtattgattgcaccttttggggagaaaccccaaaatttaaaatgttaaattactaaaataccctcttaaaaacctactagtggattcactatagttgactagaaccgatcttggtcaaagttactcgttggttataaatcatcactatcgggtatcaatcatcgttgcaagtccatttccataatgactggggcattttaggaaggctcgtgcgatcctttatgcatccccaatcgtctcgttgtgactactagtggattcactataattgactaaaaccgatcctggtcaaagttactcgtgggttacaaatcatcactatcggttatcaatcatcgttgcaagtcaatttccataatgactaggggcattttaggaaggcacatgcgattttttattcatccccgatcatcccgacgagactactagtggattcactatagttgactagaaccgatcttgatcaaagttactcgttggtttcaaatcattactacggttatcagtcatcgttgaaagtttgtttccataattattaggggcgttttagaaaggcacgtgcgatccgttattcatccttggtcatcccagcatgactactagtagattcactatagttgactagaannnnnnnnnntcaaagttactcgttggttacaaatcatcactat

SEQ ID NO: 124709 - DNA, 644 bp, Cannabis sativa
  modified_base (60)..(61): a, c, t, g, unknown or other
tttcattgttttagagatattcatatttaaattgtgaatcaacatacttgttagtaaatnnagatcctagtaaaatatttctaacagtgttttctttctagagtctggcttccatactccagtttctgtcttgtctttttgcgagactctgcctctagaattggtttggtcacaaggccttgaggcgtggtttccttttctcttctgttgaggttggtcaacaactttagacttcttaggctgtttcgcagaaggagccttttttggttcttccacagcgattcctttacccttgtatttccaagtgcatgaggtttcgaggttctttggatctgctttcttaggtgcgtctattgctggaggagctagtgcatcaagagataattttgtcagggtagtcatcacagcctccattctggtcatcttgcgaagtagcaactcgttgaagtgatcctgccgagttaatatgttttcatccagttgaagttgtcgcgccatgatgaccacgaggtgtaactcatcaggctaacgcttctcctcagcgttgtcctcaacaactttgtcttgaggctcatatttatgttgggttttgtgccctaaataaagcacatttcaatataatcagatttacttactaataaaga

SEQ ID NO: 124710 - DNA, 687 bp, Cannabis sativa
  modified_base (640)..(654): a, c, t, g, unknown or other
aaaaattgggtattgatgtttgaagaaagaaaggtgaaatgggagaatcttagatgagatgtcatgtcaatttccaagtaactgtagtgttgtgtagtgtgttgtttagtaagaatggtgagattctgatcatgctgggtcctatctctttcaggtttaattttgtaaattagctttacacctctgctgtcaaatttcagttctagctagtactattttatatatataaaaaaataaatatatattttttgtatttatagagagatggtaatatatatagtacttaatgggtacaggtacttggctctcatagtaaatatatattactgccttttcacatgaacactgtacatatatatatacatgcattcattaataatatatatgatatatcaacttttcattaggtttctaattaaagtagtacatatattagggtttaaagtgttgatatttgtgttaatagtagtattttatgtttttcatatataagatcttctagtatgtttttttacaagcatatattaattattaattataacaataactccatacctagcttatggtatagtcgacattgtaacgtcgcttcaaacttctattggtccttatactcacagaataatgactcttatacacnnnnnnnnnnnnnnngctgcttcatggactaacgactgaccctacaga

SEQ ID NO: 124711 - DNA, 982 bp, Cannabis sativa
tggcttaagatttgagtatcaagccagacaaactatatatattattaatactaattagttcaaatataatctagaccattgtattaaatttataattttttcatagcttaatttttgagtacttcacaattcacacccaaaaggtcaaacatttatatatcttttagttgtaatttttccactaattaaacactaaagtgatcattgagctttacctaaaatggtgtcttaataccttttcaaaaaaataaataaataaaaatggtgtcttaataccaatgaaaagataaaataattaattcattattttgtatgttgatttgaggaatctaatgctccttactagtcttttttaccctatattaattttttattttctaaaaagcaccgacttatttagtataaacaaccataaaagtacacgttagaataatcttaactttcaccaactctaaatctagtaagaactggagcaaaccatagattaaatgataattaaacaaagaaatagaatatattctgccagcatcttgaatatctgtgttatgtatatttttgcttatatattaagttttgtaaaattgttaaccgtgaatttatattatagaaaaggattattatattatgggttgattttaaaatgtgaatgagggtatcaaaatattctatattttgtttaaagccctgcatgcacgaaagttaatgtcattgtaattactcaagatttatgtcattttgttgataatataaattaggaaatttctgtaagggatgttttgatagaatcggcaccaatttttggccacgagagaatcagcacgacttgttgtgcctatgttgaaattattatagtagactaatatttttttggaagaatatagtagactaatatgattatagacatataattttattagggaaatttgatattatatgcttaaaattaatttatttactaaaaatatactagcatattttgcat

SEQ ID NO: 124712 - DNA, 2049 bp, Cannabis sativa
ggacaaagcatgctagaaacactcctttggtctgtagggtcagttgtcagtctaggatgcagccggagtagcatgtccatgtataagagccatgagtctatgggggaaagcccaatggaggcttgaagtgaggacgttagaggtacaaatgtatttccaaagatggattggtagggtttacatatccagagatgtgatgcttaatgaagcaattttcccattttctcgtgcagcttagtagaatactacttcacaaaccacaatgtccaatgctctcccttctgtagttgttcagtatcctcttgctccaagatacacaccatctctatcccatatctctaacaattctccatggcctgcaatacttcctcagtcaccaacaatatctgacaatgctacagctgcaactgaccctgcctttgttccatctgttgatgttttactaaatcttgctcctgcttcatctgttgcaactttaccagacccaccaggtgcttctactcagctacctgctattgatatctcctctgagacacatgatgttccaccacttcatcaaaccaatgaaccaacaagttcttctactgaacccacagttacaatcaacaagaattctatgccaactagagccaagtttggcattagaaaacctaaggttctaatggccccactctatcccggcaccattaaacaatctctacaatactctaagtggttttaggctatgaaagatgagaatagtgctctcattaaaaataaaatcttgtatttggttcacttacccctggtaggactcctattggatgaaaatgggtagaatcaaggaaaattcagatgggactatgcctaagtacaaaacaagggtagttgctaaaggataccaccgattacatgctagttttgactacaataaaactttcaatctagtagtaaaacatgtttatacgcagtcccaaccaaaacagtttctaacaattgaaccattaagaaacttgatgttaacaatacctttttaaatggaaacttgtaagaagatatctacatggttcagccacctggctttgtggatcctgattttttagacaaatgcactttatggtcttaaggaggcaccaagggcctggtttgacaaactttcttttatcttatttacttttggtttcacctctgcaaagactgatcactctctatttgtcaagatagatattacagtattctctatgtcttagtgtttgatgacatactcataactggaagtgatcactctcaagtgtccaatcttattatcattgctctcaaggatctaggtgacttgcattactttctagggattcaagtcatccaaacagccactggtttgcttctctctcaacaaaaatatatccaatatcttctagtctcatactttctcaatatggcaatgaccctgtcgaagatcttgccaactacaggttcatagttggagcgatgcgcagtatgctaccatcacaagactagatatagcatacagtgtgaacaaggtttactagttcatgcacaatcctttgcaatctcactggattgctgtcaaaagaatctttagatatctggttggaaccattaattatggtctacattttttaccaactcaatcgacatatcttcaagctttttgtgatgttgattgggctacagatccgaatgatagaagttccactggcttctacatcttccttgaatacaatcttataacttggaagaccagaaagcaaacaacaatctctaggttctcaactgaagcagagttcaggagtactttgttggtgtgtctgagctcatgtgtacaatctttgttatttgaattgcactttacaagcatttcaactccaacaatatggtgtgacaatgtgagctctgttgtgctagctgtcaatccaattgtccatgccataactaaacacaattctagctaagaaaattagtgttattcatgtctagagatggaaattgggcggttaatgtacggggaatgcaatccccgcccccatccccgctacctatttatacccc

SEQ ID NO: 124713 - DNA, 2752 bp, Cannabis sativa
tttattaaataaattttttattattattattattattattatatatatatatcttttttaattactaattcatcttaacataaaaatacaaattcatctatagtaaccaatcattgacctctcctacaaagaaaaatattattaatttttgctctctcctaatgttgacctctctctctctctgagtctctgtttctggtggtgttgggtttgaagtgttcattgtgttttgtttctcattttttgtcctagacagtgaaaagttaactgcgttacaatataccttggatgttgatgaaagtgaggataccattcaaggagatttagatttgtctatcatctccaaagggattgagagagtctcaaaattattagtgggctacgttatttcagcctgatccccatgattctatggttttggctataagaaatatgtaaatccaatacgattttttataagttcaaacttgatgataatcaatgttaagtgcttaatggggttccttagattcttgaacatactttactactcttggctgaaccaattggtattggtaattattcttttttgaattttaatatggtatctttttgaatccaactacattattttccattaggatgtcttgatgtggacattggtagggaggttggtagattgattgggtctgttgtagaggttgatcctcacttttttttggggataagtttggtcagtttctttgtgttcatataaccgttgatgtttctaaatctctcccaagggctctgcgtgttggtattattgaaggagaagagaagatgttggtggcgcttaaatatgaacatctctctgatactatatattaatgtggcacacgactggaaagttaatgtgcatggtattggtaatactaatttggcatgtgatggtgggtctatgttagataatggagatgtgactttgcacgagaattttgatcacatgattgagaatgagagtgtttctttttcatcgcagcaagatatgatttttgggagtcatatatatattcagtcttctatggggatcttgcctgtccctggtatcaaatgacaatccttgcctgcttttttcttaggtggtatgttgttgggatcttcctctacatcggggaaatcctaaagggtctttgacagtcgtaagtattcgttttatggtactaaattaggtacaaatcagaataaatatttctgattattattgtatcatatgcctaagattaacatatgtatatatattaaatctgaaagtaaaaaaaatgaaaagattgtttacctctcgaagcctatcaatgtatcattgagtctttttcgtatattgtatcctcaggacggtgatttaaaaactcataccttgatcttcaagatcttccaccatatacaaagattagtgtggactagtaggatacaaagtgtatatgaagttcttgtattctacgtgagtaagaacaattttataatattttttgagagaaaagattaaatcaagttaatcttttttaagctttccaaaaagatacgttaaaattctttctttttcttcaaaatttttgttatatggtatatttaaataaatttaataaatattttatttaattaattatttaaatttaaattatttattaaattatatttaattatttaaataaataatataacaaaattctattatagatatttattttctatattcgatcagggaatatctcaactacttttcaaattcaaatttaaatcaatatttatcttttgaattaattaattaattaaaccaaaaaaaatctagtggggacacctcacattaggggcgcctacagtgtctggaaacagggccgaccctgagttgaaatgggccataggcagtgtaggtggcactttcatctgtcttagttaagacaagggttgtgtcttttgtcttgataatttttgtctaaccaatttatttaattttatattggaaaaataaattatttattacaaaataaataattactattttgacaaatcaaaatagatttttcgaacttccatatacaacttttgttcctccccttgatagtatttcaaggtggcgattcagggaccatggacctataattataaactataataaactagattatttattgaatctcatcaaccaaacaatccttgtaatgagcgctttagtaatttagattagtaaaggcaattagcactaaaatctgatatttttataattatttatgaatttaattattgtgggtcccattgttagaaataggcattagagtcataatttcttaatttttgagattttattaacctctaggagtattatttgacttatatgtgaattatgcaatttttgtaatttttgctcgatgacagcggaaaatacgatggatgactagtttaatcacatgggtaagtctagaaccttatattttagtgggatgtgtattgaagaaaataaaatactggggttgagcagggttatggaatttgaccattttacccctagtcttgaaatacctaagttataagtttagaggcattttagtaaattgtcaaagaggaggtttaatggctgcctaggagagtgacacatggccattctaatttcagcaaggaattaattttcctaacttttattcaattagagaaaatcaaaggaaaagataaaaaaaaaaaatagaaaacactctcttcccttccctctctctttgaaccagcctagaacaaggggaaa

SEQ ID NO: 124714 - DNA, 1439 bp, Cannabis sativa
catcttgtgtatacattagaggattttagtgtcatagcaacaatagaaaatgtcaatatgggaagtatgtgtatttcttatattgtgatgctctaaataaaatatacaaatcttatttagtgattaggagtaataatgattagtatataatatgtgtgtttggataattcataattttaaaaaaaaaattaacaaaatacaccaatacatattttttcaaaaatttatcaaatttattaaactgaaagtacatacaacaactcagtaagaatatccctcccattaaaaaagtacaatttatattttaaaatagaatgtaattaattactatattataatagtataagtgtactatctaataattacacatgtaacttctaaatatgtttcaaaaattattgtcaattacaatagtactcactcgcactatattgttacttccaaattaaaataacttcaattgcttgtaattaatgattccaatatgtcctctcaaaaacccaaaaactaataatgttcccaacaatggagcgtggtgaaattgtgtttaatatataatcatatcaagttgtgatgatgtgagaaatcattaattattatttgtttgatcattagtgagccaagtctctaaaccctgtaaatcaagcaagaattaattaattgtcttttctttaatcttaaaaagataaggaaatacattattgtagaataaatcaattattctaatgctaattattaataagcaattataagataatcttatatttagcataagttaagattattaaggtcttaataatatgaggtagattctaagtatagtatagagttgggcactatctctttttgctttgtagctttagaatgagattctaagaagtgtagtcttgaagctcaatatttaaaatttgaatattgtttttaaatatatatacaataatactttcttttctaaaagaaaatcaatttgtaacttttaattacttcgtactatatattaacttggccaactactaatttgagtatatatgataatacctaatataaatgagaattgaacttaagatcttataaataataattaatgacttattccaccagaagattaattttagagcattgatattgggtatcagtggtacataactctaggcatgtcgccttaattagaatggctagtgatactctttaaaagttattacatattaaattttatgggattcgatatttaattagaccaataacaataatggcatgagagtgtgctaggcaccactaatgccttttaacatttttctttattttacccttagttagagcccaagtactagtcttttggtatagctctactttgaatatataagtgaatatagcgtgattgctacgtgttacgtgcagtctatgatggcacgttacaagctaagtgatgcccacaagtt

SEQ ID NO: 124715 - DNA, 773 bp, Cannabis sativa
  modified_base (53)..(61): a, c, t, g, unknown or other
  modified_base (685)..(690): a, c, t, g, unknown or other
tagccactacaaatgtacgctggtaaaactttgacctctttgccagcgcagtnnnnnnnnngcgctggtaaaagttacttttactaacgcagtaacgaacagtgctggtaaaagtgacatttcttgtagtgatatatgtggattttcatgtctatggacccctaataataagagcattgttaatggtactagtgggcttaacaccttctaaacgtattgtcttgtgattgattagcgatataacctaaaacttattatatattaaattacatgcaataaggtgttagacactaatacctttaacatttctctcataataacgagaacacaataaataagatattataagtatgatctttttataataaatattattgtcttgtttagataaaatagacaaaataaattcaccactatcacctcatttattacgagtatatacctaattaaagaacctagtagtagtactgttattataaatagaatgcttgtaactcatcatacacaataatttacaccataagttagtgagattatatataccaatatggcacagatgaagatgaatagcataataagctttattatagttgttggtattgtgtttaatctttcatctactacttttgcaatttcaggtgaaagagctttgaataacgtcattcaacttcactcatctgatcannnnnnatctgaaatcaacagccaagatggaaagatagtgactattatcgaacctgcttctctagaagaagtattgttcgaaagtttgt

SEQ ID NO: 124716 - DNA, 1359 bp, Cannabis sativa
agatgacatttgtcacttatttatcaagagagtgtaaaagagagtacaaaagagagtctccatagcactcctctattttttttaaaagggtaaccgtttttagagaaacgaagagatttcttccattcaaaaaaaatttactatctatcctaaaccaatttatgaatcgcaaaattaacattatgataaacatgagagaaagatgaccctagaaagctagacaataaattttattattatcagaaaacttcaaataaagagaaaatatattatggaaattaaagttgcctccaaaaatcaaaaacttcatgtggcgtgctggtgtgggttgcctcccaacattagtttagcttcgaaccaagcatgttaatgtaagctttctctgtctcttttgtcattccaatgacgagacaatcattcattgtttagtcacctgccaggcgatcacaacttgctaaaatagagtggggattggcactgtttgtgcacctgtttcctcctttgtggactggtgtacttcagtcttcaagtaggttaatacaaaaaaaaaaaaaaaaaagtaccttgttgcacctgtgtgttgggccatttggagcgccaaaaatgatgttttggaaaggaaagacagtccgagcggatgacattattgtgtttgctaaaaattaccttgatcaatgaaataatgttcacaattctgtcatagttaggcttattatgatctgatattcagacaaataatggtgcagagcattggtctccacactcgctaacaatataaaggttaatgtagatgcggctttgttcgatgggggttgttcatttggtacgggataagaagggtatactcactgaaggtcgaaccatataggcacgattgaacctattttggctaaagcgataagtgttaaggaagctataacttggacaaagagcaaccaatatggcaacatataactgtggagagtgactgtcttgggattgtgcaagcattacgtagctctatgtgcataatatctttgtttgatcaagtaattcaaagttgtaaaaatttgcttgttgaattatgtgacgttgctattatttttattaagcatatagtggctcgttgttttgctagaatctctaatttatatatattctgtttggagtctattcctactgagttgttaccatgtttggtgactgattttgttggttaataaagttaatatttttcattcaaaaaaaatatagtatcaagacaagaagaataataaaactaaaagtattatgtgactgagttaaaactccttaaaatatataatatttgttataaatattaataattatgtggatgtccaaatcttttatttattacca

SEQ ID NO: 124717 - DNA, 3031 bp, Cannabis sativa
  modified_base (52)..(85): a, c, t, g, unknown or other
cactctttccctacacgacgctcttccgatcttagaaagttcatatttaggnnnnnnnnnnnnnnnnnnnnnnnnnnnnnnnnnntcctggtaaaataatttcaacactcataatgtcccaatgtttctgaaaaaatctcggacccataccatcagggccaggtgctttgtctggatgcatctggaatagggcagttttgatttcttcttcggcaacaagtttcaaaagttcttcattttgagcattggttacagagcatctgacattagtggcaacagtattttgcaaggaacaattagcagtaaataaatttgaaaagtaagagatgataacctggtcaagaccgtttccccaatcggtccaagctccatcagaattttctaagtgcaagatttgattgttcctttttctggcactagcagtgacatgaaagtatttgatgtttttgtccccgttgtgtaaccaaaattgcttcgacctctgtttcaattagatctcttgttgagctaaaagttcaaagtaattattttgttcattaacaaactcaactttcaagggaaaattgtggtgctgcttcagttgtgccattttctttttattggtagaaatacgacccttgaaattaccagtgagatccgaaccccactttgtcaaattatccctacaaatttttattttatcaaagagggataggtgtatgtgcatatcccaacaatcttttacaatctgtggacaaattggctcgagaccacacgttctcataacgaaaatgaggagcagtgatagtactatgatgggcatcaggttgtaaaatgatgggagtatgatcggaattagaaaaaccaatgttggtgagagtagcttcagtaaaagtgtctaaccaactaagagagaaaattgctttatcgagacgaatttctacacaatggcctgtacctcgtccacgatcccaggtgaaaggatagccgcgaaggtctagatcaataaggttgcaatcatcaataaccgactggaaaccatcaataagagaagttgggtatagatgcccgcctctcttgtcagattgggttgaaatattattaaaatcatcgatgatacaccatgggagagatgactcgttgtgcaatgaacgaagaagagtccatgtttgatcccgttgtcttctgtttggttcaccgtagaagccagttaggcgccatgtcgacatgccccttatacgaacttcaacatcaatatgatttggtgaaaaactgagtagattagcttcttcataaattttccaaaacagagccaagccgcctttccttccggaacatcgactgaaaaactgccttcaaacccatgtttgaccctcaaacgctctaccaaatcttttttacaaagtgtctcacataaaaacaagaatttgggcttcttttgactacacatgtcttgtaggaattgaacagcccgtgggttcccaagcctaggacagttccaactaattatactcatggtgattagtgggcctgagcacaagaacccaccaatttgccgttttttgaaagcccatcagaacactcagtatcattactgtcttggtccatcaccttagatatatcatcagacccaccatttaaagttaggcccacccgtagcctttttaattctgaaatagataattctatatcagagaaaaacttgttattatttttctttaaaaagacaactggctcatgtatgtcaagggttgactgcatggcaacattttcctattatatattgttatttctaacccttgaacaaatatgtaaattgtaagaaggattgtattgtgtattactgtatttgtaaaagttcaggaaaatatgaaaagaagatgatgaatcggtgatacattcatatttattacttctcttagattgtaatttttcaatcatttatatcttttattcaaaaagaaagtgaaaataaaaaaaattatatattacattaatttaatatttataagggtaaatagcggcataagtacctaaagttttgagtttgtaagcggcataaacccaataattttttttagtggcataagtacctaatgtttgtaaaactgtaatttttctctatttttgtcagtacaactccattttaaatttattaaaaaaagatttggaagtaactgatactatatatttttcgtccagaccaaataatctaaaatttgggtcttatatgtgtcatgtttaagacaataatagagtctgtactgatgaaactgaaagaaaattacagttttataaatattgggtacttatactactaaaaaaaatcattgggtttatgcagctgacaaacctaaaactttaggtacttatgccactatttaccttatttataataacgcgcaactacattgactagtttcctataatcttcagcatgggtttatttttaaattattggctaaattataagcataaaaaatcaaattttccttagatgagaagatatgaaaagttacctataacataaaaaatatgatacattattttcatcatgattcagtggtcaagaaacgagtattattaaccattaagttctgcaatttaacacggcattgttagaattattattgtggactaatataatcgtgaacttaataccataaacacaatcattaactatgtgcctaatatttattcacaaccataatgggatggttaataattaagaaatgtatagagacacatgagagcaccctaaaactataattggcccattaaattatagtccactactaattatactcattaacccaataagtctaataaaaccccttagggttgggtgttggatatataaggggttaatatgtatcagtatgataatgagagagagtgcgtgtggtgataagaaaagggcttgctttcataagttcctcttctacctcctcttctaccatcttggagacacattcacattgaagattttggtgttcaaatggaaaatgccaatatgggaggtatgtgttttcataagtttgtgatgctctaa

SEQ ID NO: 124718 - DNA, 509 bp, Cannabis sativa
caacaccacaacgacattatttttggcaatgatagcaccaacgaccccgaatctctacatgctacatccacaaaaatagtaacagtacccgcgggataaataggcaacaagtcatcgattcgaatttatcacaacttcgatcacaaatttattatttaaagtataaagaggaaaggagattttttttttttttttggttattattaaaaaataaaataaggaaatttagattacaataaaaacatcagaattcaagctatgaatttaggaacaagttcatcaagaaaaatatatataaattaggaacaaattaaaaaatggaatgatgcatttgagtgtgagccatgcaaaggtgggaacaagaagatagaaaagttgggccgtggacgacccggcggggttgatgggccatagtcagattggactgggtcatcagtgctactaaatatcagcccacattgaactttggactgggcctatttttctatcaaaagcccaaatttgaaaaa

SEQ ID NO: 124719 - DNA, 722 bp, Cannabis sativa
cataaaaaagctcactattaatgagttgctgggcactcgcccagtcaacagttttgccgcgctgagaacaaaagagcgcaataggttcttgcaactcttgagggaaaagtctcagcgcggtgaaacagttaacctgactgatgagttacctaagctttcgaacaacatagtttcacaaatgattttgggtacatctaatgatggtgactatgctgatgaggctaggattgtgattaaagaagtgactaaggtttttggagagtttaatttatctgattttgtttggtttttaaagaatgtggatttgcagggtattgggaaaagaattgaggctacttttaagaagtatgatactttgttagagaagattatttcagaacgtgaagagctaaggcgaaaaagaaagaaaatggtatcatcattagacaataatgatattgatcaaaattatgaaaatggggtacttaataataataataataatgtggaggtgaaagattttcttgatattttgcttgataatttggaggaccacaaagaagacatcaaattgtctagggttcacatcaaagccatcattgtggtaagtacttctactttattatttattcttcttaattgtttaattaattagtacaattttcatcttttgtttttttttttctttataaaaatataaaccaatctaaccacaatttgtaagattttactgattagataaa

SEQ ID NO: 124720 - DNA, 1555 bp, Cannabis sativa
  modified_base (230)..(234): a, c, t, g, unknown or other
atcatgtcagtctaaattcagtgaactgacaaattatgggaattaaacttttgaatatataatcatgattatattgtactttgctgaaaacaatataatcatgaacaaatatattcatatttatatatgttctagacttaatagaatttatacattaagcataatcatgaaataaatcatgggaaccatgcaacatagaatcaatttctgatcttatattaattagtaannnnnattatattgaaatgaattttttttagggtacaaaacccaacacaccataccctgaagtgtggtttcctttcctcttctgttgaggtcggttagcagctttagactttttaggctgcttagtggaaggagtcttcttcggttcttcaacaacgattcctttgcctttgtctttgcaaacgcttgaagttccaggatcttttggatttgctttcttaggggcatcaattgttggaggagctattttagtcagggcagtcattacagcctccattctggtcattttgccaagtaataactcgttgaattgatcttgccgatttagtctgctttcggccacttgaagttgtcgtgccatgatgaccacggggtctgactcgtcaagttggctcttctctctaacgttgtcatcagtaaccttgtcttgagagtcgtcttcctgcataccctccggtacatctttgacattaacttcagcgtctttagagctaatttctccaaattttgtgtctttgatgataggatcatctcgattttgatctttgtcctgatgacctttctgacaactagtcacctcttaggggtcactaaagtctccacctttggcaccaggacagtaaaacaaagaccagacttggtttgggtgagagccatggttactcgaacgtaatcttcaagtggtctcactgctttctttagctcttaacgaaagcaccaaaatatttaccgagatttttgaaaacagaatataaatgataaaaactaaagaacaaataatcaaaagataaagagtaaaatagacaaataatttttttacatggttggggcattaattagccttagtccacgagtgagtattatttagtagttctttagcttgtaaatgtcttcgagaatacaaaaaatatatgttcacaagtttgcctgagcaaagtttgtaagagagttcaacccttaattcataagattcgtagggtatttatagtagtttgagaattacattaggttttctttttccttctattggggattttacagtaaataatacgcttagactgtctcatgagcccacaaacaagatgatctgttgactaggcagattgaatttggattgatttagtcaacaccgtgtgcactgattgtggactattaatctgtaaattaattgcataagattcattttaagaagttttctaattaatcttgatatgatactcttgttggaatttattttaccaggatcttagatctaatcacaagtatgtttattaacatcctaaataagaactttctaaaacgacaaattaaacacatataaagttta

SEQ ID NO: 124721 - DNA, 2422 bp, Cannabis sativa
aaaattttgacatttttgccagcgcagtttgcgaaatgcgttggtattacttttaccagtacagtaacgaactgcgctggtaaaagtgacatttcttgtagtcacagaaaacgtactaagcttaaatcatcacaatctaacagtaaatactttaatttttctttcattgataacaaattagcctatttacaacaggcagtagtgactaatatgagtttattttacaactaacatgtacagataagccttttacaatcatcaccaaacaagagaacaaggctcgctctcatctttcgtctatataaaacttcccaatttgaagaataaaaagaaggaaaaaaaagacaaaatatgttacaaggaagattaagcctaccatttaacatccagtgttaaagcctcggatggaacaaggggagatgggaacttggtaaatgagatgttggacaaattgctccatgcaactgtatctgccacagcaaaaggtactacttccttcactataaggagcttcaacctctctgcttcaactcttgccactatttcaaacaaaaccctttcaacattgggttttgttctccacccatctttggctttgtcagtatggttgcttcttaaattcttttctagctcaagctggaagcgaataagagctgaagctttgatatttcctcgaaaaagacccactaaaccatttagccgtttaccaaagtagcttcttaaaactttttccagcatgactattctagaactcaaagaatcaataggagaatctcgcctcttgtacatatgagactcagagccataacacttatcagccaacaactcaatcgtctctttcgacataaaattggtatcaatgtgagcataaggatttcgagttctgtatgcaactaattcagaagacccataaacttgaatctgcattaaaggtctgcaaaatgagtgccaaatgggcaaaaacgcacttttcttcttctcagtcacatgacttccgtttactggtatactgagattagatacatgaaaggcagagacttgacgagcttttcttacttcaactgtgatgccttcaccgactataattcggttaaagccaccatgtgtacggttcacctgaaaaccaaaatcaaaaaggtcaacaatattataaacaagcctaagagaattaatgaagtaacacattttacaatttacaagaagaacaaattagaaattaaaagaaaaagatatgatattgatgtagtgtaaatcataagataaagatactttaaagacatcttttgctaatctcaaagcatagtgacactactagcattgaagatgttaaagtcattaatgtacttcttcaagtgtatggaatggaagaatcttaaatgtatacatttgcaggtccaaatgagattcttcaacatgttaaatgaaacgaaacaactggaaaaaaagaaagttaaaaatcaagacttgcaaatcaactcaacatcaacaaaataaagggtattcatgcgtaccggcaaaaacagagaagggttatcagaaccaccgacccgcaattcaaggggtccctccactttgaaggtgtcaagtacagtcaaagaagtaatattattaagcaaatacccaaaacgatgagacctctgattcctgaacttcttccatgaggccacttcatcggagaaattggccgacaagtgagtcttgccgagtccaacccgaaacccgtaccgattagcagccccaaacctaagcttcttaagatccaatctggaaaccttaatgtcctccaactcccaactgaacttggaagagatttggttcaagacatcctggaaaagcataagaaggaaagtgagatggagatagaagatctgaggagaggaggttgatgaaatcgcgtacctgtaagagaagggtgtcgtttgaggatggaaaagcgtttgggtttggattagaagtgaatgcaagtacaagtgattggtggaggaagagaattaagataaggaggagatgtcgagggagctggagctgcttgggtagaaggcgattcaccatcatcatcatcatggatgggggctgagtcggatcttcaaggtttctggttgtcgtatggactgagtcgaaaggcaaaggctgtggctttagggggctctgcctcagattctcagctttttttattattattattattattattatttctcacatatacagacaccacatttgtttaaaaaaataccccatttatatattcttttttcttttttatcttacttttaattttggataaatatcattttagagtatgtgttttacaaaagttattaattaaactcttttgatttgttaaataataaaatagaccttgtatatttcaaaatggtaaaaatagaaccttgagcataatttttgacaactttttttt

SEQ ID NO: 124722 - DNA, 765 bp, Cannabis sativa
tatattattttataacaaatatgagttactccactaattatcaattggttttgaaatgaaaccccatgatttttaacatggtatcagggccatatttccttagtaggctttcgatctacacttatctagatagttagccagccgcatgagatccaaatggtgcaagacgtttgagatttggaacaaaaataagattcaaatggtgcaattagacgcttgaatctgaacaataataaaagcgagtaaaatggcacaacttgttataaggtgatttaaaattggtgcacaaaaataactaccatcttgaggagagatattagagaacattgtcctatatagattaaatataaatgtattaagtcatatataaaaacatgagctacttcactcattttcttattggttttgagatagaattctataattctcaacacccaaactattagaatctaatgatacatgataatttgtactaacagattaatgtacacatacttgcatattgtaaagatgaaatcatcaccttaatctaatttagtacatttattacatttttttttgaaaaaaaaaaaacagaggcttttcaatatatatattaacctaccatcagggttagaaataaagtgatttgattaattagcttggcatacataaatatacactatatatatcttaatgggtattacccatgaataagtaaaattataaaattttgagttcttatgcttaatttttatatccaattaaaaaaaatctctcattttt

SEQ ID NO: 124723 - DNA, 1498 bp, Cannabis sativa
caatcaaagcaaagctcaaaaatcttcaaattccaagctccaaattaagcaacttccaccaaatcaaaaattgaatatcaaagagggtgagagagagagagagagagggatcacttacttgggtacaatctcaacattgggatccaagccatgattttctgaccttgaagcgacaaaaatacaagtttcaggggaaacaacctactcataacaatgaacttagaaaaactgaaaaaaaaaaaaaaaacaagtacctttgactgggtaagttaataggctttggaacaaccactttccccagtacagtcaagccacctcttttgcccgtggtagagggagcccatctgcaacaaaattgccaaaaacacacaaaaatgatgacaaattagcaagaatgaacatgatgccattgcagaacaacatgtatatttatgaacacctcaaacatagtattcatctcctagaactcaaaatttcctataatatttaattttactttcagttttatatttgctgtcaatatgaaaactggtggtgatcaactcttcctggacattcagagctcagccattaacacgagcaatgccaatttttcaaatttcttagttctcagttctcacccattatcacagataccacactagaaaataaagatccgtacataaaaaagcagaaattcaagccaccaataccaataatttgagcaagtgaagaacccaaaagaaagagaaagtcataccttcgatctccagacaacatacttgatgtcatatttcaactgcccttgcagggtcattcaaacaaatttcaggcaacctggaaagaaaaaaataaaaattaagactatggaaataggttacacaacagacacccaaccacttgaacaaaactaaaaggtgtgcccatcttatgaagacacacttataccagtattttagtacatggataaactagaaggcataaagtatatcaaagctgctttttttcattcaaagtttaaccctttcagcctcggccaaaaaaattagcaattcacattcttctactcactagtttggatgacttcccgtttccttagatactataagcaaacaacccgtcttttgttatcacctattactgagtatattccatctaatgacttctctcaactaacaaattgattcggagattattatgttcgctttattcttacttattattctaatattaacaggctcaccaaaagaaagtaggaaacaaataagaagaaaaaagataaatatattataaacaaaaacaacctagattactaactttgatcaatctgtcaaatctacaaccaaaaatttagaagcccagttcatgaggtgctaaagacataggaatgtaccctttgaaatcaaaaggaggcaaataaaatcagcaatacaaaatatttgaacacataatcttaaaacaaaacagcaatagtgggtaacgatcgtttcctattggattgaaaaaaaaaaaaaaaaaa

SEQ ID NO: 124724 - DNA, 1800 bp, Cannabis sativa
ggaaatttatgttgtatattttaagggattcttctgtttgatttttatgtgtttcagtattttatcagttttttttattttataaaagattatttgcataattttaagaaaattctaaatagtttacgaaaataaaatttaaatataattaatgtatatgcgcatacaaaaaatagttgcccatataataaaatatataaattttattttcggattgtaaactatacttggaatataattttttaaaaatttacaaataatttaaaataattataatatatacgataatgaaaaaagtttgaactaaaacattcgcttagaattgaaatggataaccaaaatatttttttaagttgtactgtagacttactcctatatatttataggatatgtaaatataaattaataactacatatcctaattagtcttctcaaattagtaatagcaagatccaattttgaaattctccatatatataacataataaagtaaaaaagattttcaaactctcacaattgttttgaaattttgttcagggaatttggttgggattagccgcgtaattaaatttgatcatgatcgtgtttaattagttaaattatatattagttaatagtttaaccaaaaaagtgataattaatgtataattattttttcctcaggcagaaaaggctcatattttcgagttggtttggtggaagtgttggcatttaaattttaattaaagatagctaagaatgataatgttttcaaaaaattaattaaaatcgtaagaaattagtttcattatttgttattattattattcaatacattcatttttatctttggccttagcatatttttcagaattttgtctaataaagttattttcttatttcagaaatgacttataatggggtcaaatgttttctacattatttccaaaaaataataattaaataattagtttcaaccccatgatacattataatcgtgccattaatgtggtacatatttatttttgtttataaaaataaataaataaataaaaaccattattatttatataaagcaacgtggggttgttggtggtaaagaatggtatttcgtcttattattactacgtagatagaaacttgaaaaagttcatatctcaactcaatattattattatgtaaatttctccataattaaaggcttttttgtactcatgatatagtcatatgtgtgtgtaacacaacttaattatattattatttaatacatacatatattttatatgtatgtgtatatgtatttattatgtgtacatagaagaacacgtcgacccaaactaggttggcgagacacaattaatggattaaatttgtatatagaacgatttgtacatgtgaagagattgaacaaaccgtcggttatgtgctgctctaggcccatatatatttatatatttaattcattaatttcaaaatatatttatatatatgtatatatttagatctatatatataagctcagtccagccagatctataagactatcacattcatcatatatcatccttccccacattcaattatacaatgcaataatttttttagcataataataattttatatatatatttaaaataaaagaagaaaaaacaactaaaatatttaaatatgaaatatatccaggacgtaccgtacgttacttatctgtaggcaaaataaaagcaattaggcaaacattaattattaaaggggaaaattaatataatgcaattaaaataatattattagggaaatttgattttctatacttagaaaatcaa

SEQ ID NO: 124725 - DNA, 1421 bp, Cannabis sativa
taaaagttatatattttctttctcgcacgtgttgttccaactagttatcattaaaaagggagaaaatagcatatagatagatagatagagatggatcaaagatgagtacattatttataggattatatatacttaacatatagtaagcatagcatggatcctgttattttagttatatagtaattaattgtaggtaggtactacaattaattaattttatttattaattaacaacatgaaccagcgcagaccccaactagaattccaacaggaatacaactgcatcctttgcaacaagggtcgttgagaacattgcaagaggaaccgctacacccgtcattgcgacggagcccctgagcttcctggcggctcaacatcctcgacaccgcctcatctataggtgaagatgaggcaatcttctccatcatcgatacagcagcatcatcagatgaactcacaagtttaatattattattattattattcttacatcttgcaaaggccgacggaacaagcattagaaccaccatagccgccgccgccaccaccaccaagttgctaatcttaatcttgctctccatattatatatatatattattgattgattgtatgtatgtatgtattgatatattttaactgatgctatcggcctttatatagaagctataatgtgtatgccattggattgggatagatataaatatatattatgtacaatttgataaaacctcagagaaaataataagatattatagatctaatcaataaaatcttcacccaaaatattccaagatcattaattacactaaccaaaaaatattgttcttgctggcactgatagtaagggttgtacataaatttttataaaccactcaatttaaataattattacacacataattaattaataattatctaacatacaaaacaaataattatcatccacatataattaaaaacttaaacaaataattattgtccacacataattaaaaattaaactattaatcattgttcatacataattaaaaaattaaactaattattattgtcttcatcaagtacattattttaaaattctgaatcgcatgtgctcaagtttacactactacaaaaatcaaaattcgcgacggtcctaaaaatatttttcttggaagaccgtcgctaaaaaaattaagtaattgtttaaaacagtcgggaaaaaatagtattcccgacagtttataacagtaattacaagaataggcaacaactttaattggaattcgtaaaatttattgggaccttatacctaacggtttaaaactggtgcctatatcgtcgcctataagggcccaataaaaaaattgttatctacttctcgccacatttcccacatgcccacctacttcttttttatttctcacatgcccacctattt

SEQ ID NO: 124726 - DNA, 1585 bp, Cannabis sativa
tcctatatattaccttattttctttccaacttttaaacaaaattccaattctagccttaccttcaattatcttttctaattattaactttttgaataaagttttttctttcagatagagagataatgtgtgtctatctcattgttattatcgaccgattttaattgaacgtgtttgagctatcgaaatttattagacttgttagatttacatgtaatgttctggaattataaaattatgaagatttcatacaggtatatatatatatacatatgtcattaccagataaacttattttataaatatataaatataatatgtattaatttgctgtggctgttttttaattctcatcccaagtcaatagtcggcaaagagtgaggttacaactagtgtaggaaaagtgacagaaaattcgttgacttgtatatattaagttacaaaagtctatttcgatactaaaacctgcgttaagtatttatgtttcacctatctttatcaacaatatatgtgattgtgatgatgagtagttagactgggtacgtatataagactttctcagattttccatgctttttctgatttatttcttggcccaataacttttagaatatatatatatatatagagagagagagagagagattaaaatagattcaatttgagatagaaaacactgattatatatcgaagttataccaacccaacatagcatataatgatattgagtattgggactatagcatatgatactgaaggggaaaaaatgaaaagaatatgcctggtataggaatatggtattaatctggtttgaaccattagggtttgattaataaagattatcattgatgaactgtattatatatatatggtgctgaagaatatgcttaacgaaaatgctatctttacgtggatgagcagcttattaattttaatatattattatatcaatgttttcatactgaacaatacacattttttaattaattttatcatatgatgaagatgagatgagaacttcacgtgttagttcatctgtaatgggaaatggtttaatgacaatatgctaaccgatttgtctttataaacaattacacttcatgtttttttgtaagaaaaaaaactttaattttaaatggaataattaatctctcgagtgattaacacttcaaattaatgtggctcacgactttatagattaattacattaatattattacttgacctcttgagattcgccactttcttaattatcaagtacaattttatgaaactgatcaaaattacttcccttacaattcattaaataaatagtcctacattttttttttattttaatagattatttaatttgagaggaatatataataaagttattactaataatgaaggaagcctcagcaacaacagggtcaatttcaccacgaagcttgaaagaggctttgagttgggttgaatcatgatgggaagaaggaagtgttgctaaggattttcgtcctacagcggtgattatggagtcggattgtctcttgttggttaatgctatcaatagcaagagccaaattctttctcctcttggtcttatt

SEQ ID NO: 124727 - DNA, 1452 bp, Cannabis sativa
  modified_base (60)..(69): a, c, t, g, unknown or other
  modified_base (1347)..(1362): a, c, t, g, unknown or other
  modified_base (1408)..(1427): a, c, t, g, unknown or other
tctataatcgttttagaagttcatatttaggatgttaaacaacatgcttgtgagtagatnnnnnnnnnnggtaaaataattccaacaacaacacctaaacaacctaaaatagatacttggtaccaccccaagccaaaaacaaaacttgaggaaaaactaaaaatttctcctagaggacaaccgatcgatcggttctgttgcactagaaccaaccggtcggccggtcctggcaggccaaaactcttgggttttcatccctaaattcaaaccaaaacccttccaaacctgaccatcaactcccaaatagtataatatcacaaatataagatattcaaaccctcgattcataataattcaatcaaataccaattttaccatggttgaaccaaaactaagctccttaatcaaaacttcccattctaaaccaagcagccccaaattcacatcaattgaatcctaaacactcttaaaattaaaaccaaacaaactctaaaactagactaaacatacaaccatgaaatcttggtaaaacctaaccaaaacaagcctacaactagaaaaatccataaatagcatagcaagaagcttacctcaagattttgacagcagctaaggtaaattttctagcaaaatctaagctaaaatatgatgaacaagattgatccccctggttccttctatggccgaaagagaggagagagaaagagcaaaaatggtttctcttaatttgatctttatcctattaaatgttctttctttctttcatttatgtaaaccctactaaattaataaatttaaaataataatcaaccaaaatagcaaaacacctaacctggcataatgactaaactacccctctcccaaaagctaagctaaacacatcctaagggtattttggaaattttaactaatccaccaaactgacatcttaaaattctaaactagtctgatataattacaatttaattcatcatttattatcgtgacatttctgaccactccatcaagttccacggtcgtcgggcctgaaaatattttatctcataaatagtgtttactattcccacaatatccaataaaatcttcgtaattaataaattacgctttattaatcacttattaaatttactctaattatcaaacactagcttaagtaagatcataatcttactccagtatcaacaaatcacatatttaataaaatatgtccaattaaatataataatattttctgagatattacaactatctcctccttacaaaaaatttgtcctcaaaattcacatgaatagctcgggatactactcttgcatctgcgactctaacacctgttggaaattattttannnnnnnnnnnnnnnnctaacaagtatgtttgattatcaccctaatatgaattctaaaacannnnnnnnnnnnnnnnnnnnagtttagaaaaccttacagtgggtg

SEQ ID NO: 124728 - DNA, 703 bp, Cannabis sativa
tagttggttcaaatgagttgtaaagaataagttggtttagaggatcaaattccacatagtttaatttatttgttctttttatgagtttttcattttcgtttgtttagaacatgatatttttccaatctgtttcatcttcctcaaggggctggttagccgaggccaagaaataccacgaataattggtcaagtatttgttgttgtagcaataacatagcaatatgtatttaatatgtattttatataattttgaaatataaattacaaaatcatttgtaatatctaaattatagatattacatatttatcatgacgacctaaggctagtgtccagtttgagtatattaagaaataaaaagaatattttattggtacaacgtgtatacatgtgttggtacagatcatctaggtagacatatgtacaatatattttgattatgtacaaagtggaaaataggtgataattagaacaatgttaaaaaatttttgttttcttgaaaaaaagaataatgttaatatttgaattaattcacttactacgtacagtacgtgacgtcatgtgcaaagtatatacgtacgtcattttcttgtttagatctaccaattcagtttataaagggaaatttgacattttatgctaaaaaaatgcacatggtgttattttatacacagaaaatatacatttgataattattcttaactt

SEQ ID NO: 124729 - DNA, 773 bp, Cannabis sativa
taataaattataacattttttaatatagtgtgctgtatttttcgaatttgtcgtgtgtcgtgcttttttgggctagtttatttgtgcttacgtgtcgtgcctttcgtacttcttgtgtcgtgtcgtgtttaagaacatatttttcgttctttgttgtgccaatttatagcatcgtatatagtgcccaagctcatattttttttatgtctagtcatgctcgtaccaatttcgtgtcatgtcaaaaaactcgacccgtatttacaatactagttgtgagattggaattttatattgcagtattgtaactttttgctctctcgtttgttaaaatgagttttccatccataccttgtaatgatacaagattttttgttttaaaaaatcaatatataaattagctaggaaaattcttaagatgttttatttgcaactattgcgatatccaattgtttttcaatatattttttaagatactaaagataattatttaatttcttaaacttctatttggataaaagttgaaaaatcgaatttttgtaaatatcaataattattacagaaataaaataaatatatgactgtaatagtctgcagtagcagaatgatattctattactccagaaaacagttttgcagaatcaaaccagaacaagcataatattaaaaataattgcaaaaaataaaatcacttaacacaagagatttgtacgtggtatcagtgttctttcgaacactgctagtccacgggacaacgcccagagaaagaaatcaat

SEQ ID NO: 124730 - DNA, 1083 bp, Cannabis sativa
catttctcattattatattacatatttataataatatttgtattgataagagcgggttatcaccggtactctactgcttggttaaaatggcaatagaaacaactatacatatgtggtatttatacaaggagaatttcaaaactgtctaaaattttgaagaaacaaaaaataatctaaaaggaaaacacaaaataggaagatggataatatttattacatattagagtaacaaaatattagagtaacaaaatgttagctggcaatgatattattgagtgttgtgtaaacacttataaaaatgattagttaaagattggtttagttagtttgttagcttgatagttagtataactaacttttggttatatgtatttcctttgtttcttgtaatagcatctctataaataaataatgaagctcacagttatgagttaagtttttttagactaaattctctatatatgtttcttctctgttcttcttcttggttttttaccaatccaaagttaagctagcttctacatgatatcagtcgcctccaatgtagtcgtcaattcctgcttctggtccaacatcatcaacaggcaaagtaattgctgttgacatgtcctctccgtcttcgaatccaccttcctcaatctggaacccattctcaagttctttatcctcctccctcgtgatcaaactagaccgagtcaactttctctcgtgaaagtcccaagtagttttcaccattattggacatgaataagatgatatgttgctcagtgatgtctctcccatttggacattggtcatcgacgaggtctaccctacttatctataataatagaagaaacgtgatcaacttcttctttcttggatccgatcgtccatgactgaaggaattctagcctagtcatcacacctcatttgccgtctggagggctattgaacaaaaattctcaagtcaatcccgcgcgtgattactccaacttaaaggtcaattttctcatgttcaaataggcattctttctattgctaacgatgttgacaaagttcagtctcttgttgttgctcttgttgtaacgtccccgcttcaag

SEQ ID NO: 124731 - DNA, 1134 bp, Cannabis sativa
tatattaattctacttattaattattccacacatatatttgacttcttaaataatttgttgaaataagaatccaaaccccttctttctataaagattatatatatatttatagtagacccacatggatcttcaacatatcatcatcatcatgatgtataatcacatatatatattttataaaaattaattaattttttgttatcggtttttaaatttatgatgaagtggttatcaatgtaattttttttttacgtcaataaataattgaagcaaaagttctacttttattttttgtgagtagtgatatgatcctctccaaaaacaaaaacaaaaaaataaataaaaaaacaatttgtcatgtatgtatattattcatctatatttataaaaagagttatgatttaattttaagatatactaatacatacaaacgattagggttaattatgtaatttgttttgttcttagaatttctatcactattagtctttataataaatattttgtaaatattgtaaaagagatcatttaatttaaaggatatatattttttggttaaaattaggaaaaataaaataaaattgtgggttgcatgtggggttcagagtgagagacttttaggtttattattatgactgagaataatggatatgaattcattaaaagtcaaggttttatttaattcttcttgtttattatgtatgtgtttgttttttttttttggtggtgggaaaaatgggttggtagggttggaaaatcataaaaaaagaaaaagtatatatttcttaaagagaaaggttaaaaggtagtgccttgtcatatcgttatcaatgtaattaaatatcgaatctcgtataatttagtgtaataattttaatttagagaatatggctaattaattatacaatgtcactctaaaaaatattagacacaactgatacccaatagcaatattctttctagtatctatatatagcacttttacatgagatttgctaaaaggtactattgatatttagtaattttttcagtgccatatcaatattagtataattaagtattggataggacgtcacttatagaaagtactaggctaatgctcaataacaatactcattttacatatatagtct

SEQ ID NO: 124732 - DNA, 593 bp, Cannabis sativa
ttgcacaaaaaataacatgcatgcgagagtcaagttaatttttatgaagcaagcttcggcttcccggaaggaaggctgaagttgcataaaaaattcaagcttcaacattgcctgaaaagatcaaagagaaagcagtccttcaactctgagaaggattgttgaagacacatcgtaccctgagtagtctttcctgcatgaaaaacaacgtgcatgcgagagtcacgttgaatttttatgaaacaagcttcagcttccgggaaggaagactgaagttagataaaaattcaaggctagacttcccttgaaatgaccaaagagaaatcatcacggggagtaggataaactttaagcagtacgtccattacggtaaagagggttgaagacatatcatacccccaatgatctttcttgcatgagaaacaacgtgcatgtgaaaatcacattgaatttttatcaaaaaatctttgactttcgagaaggaaggctaaagtttcctaaaaacttaaagttagactttgctaaaaaagatcaaagagaaagcatcgcggggagtaggacaaacttcaagtagtccttccattctaggaaggagg

SEQ ID NO: 124733 - DNA, 993 bp, Cannabis sativa
  modified_base (965)..(966): a, c, t, g, unknown or other
ggaactgtaaactattcagaattttttcaaaaatttacaaggatgatgttgtaactataataaatattgctatgaaaaaaaattgaaaaaattattccgacatgtgatttgagatatggaagttgactaacaggttataattagcactcactcttattttgaaaaaaaaaaacgattatggtcttagttaggggtatatgtcagccagtttggtgagtttacatcacattttattcaatccaacgtaaagattaggttacaaaaatttaagtgcatcccacccaattaagaaaaataacatttcaacccgcccaatcaagaaaaaatactattaaaaagaagtaagtattttttttaacccgcgtaataaattggttggtttggtcgagtcaacccgcacaaactgagtactaatgtatttttttttttacatttaattattgtattttagttaattgtgataatgagacaactatataaattgaattcaaaattcaaatcaactaccgtaaaaaaaatatagtagtttaaactttctatatcttttttttggagtagaaactttcgatatcttttaaacatgtatataaattatattttatatagattatatataataaacatatatatatatataaatctcttattcaggttgattaggcgggttagtgttatttataatttctcaatataaaaattggacaggttatattttttgatttaaatttttcgtcgaattatctcaatttagtttgaacgaattattcgaattgagcgaattataaaaaaaaaaattgtacaagcttttaaaagttttttttgagtttgttgatttcgtttttagccaacgataatgagtctttttgataagcgataaacgatatgtcgtaataagaatatgtaaataaagtaataataacaataagacacagaaattttattgaggttcagccccgagcagttcnntaatagcctaatcctcgttagttgtat

SEQ ID NO: 124734 - DNA, 626 bp, Cannabis sativa
aaaacccaaaaattcaaatcttgaattactttcagctttttatcaacatttataaggaataaaaattggctatacactcttttagccgtttttaatcttgcataattagagaaaaatcttttttttttccacttaaaatttttcaaagaaccctttgttggaaactcaattgctggagctttccaaacatattcaggagtttacgaacagtgagtaagttatcttttcttctcttttatgcaatttctttcaaattcttacattatttttttaattttttctcttctgtaaaattctaggtttttgaatctgtttttgactaatttgagacttagtagatattaaggccttttacattcactgatatacgcacgagtcttttagacttcctaatttcttaccattttggctagaaattatctaggattactcatttattggcttttgaatatcaacattcttttaaacttctaggtttaggatttcatcattggaatgaaattctttcctttttcattgaatcgacctggtcaacatatcaaatatgttttaccttctatacctccgtccatttctcaccttttgtcttccttcttttatagatgaactatgtgttgggttttgtg

SEQ ID NO: 124735 - DNA, 1254 bp, Cannabis sativa
atgataattaattagtttgactattatggtaacatgcatatatttaataactacattttcatgcataacattaatatatcacgcgttatttcaagactttttggttgttgttgctctcttcatagattgactagtccatttttattttatttattttgttttaaaaaaaactaaactatactcttatcactgaaaaaaaatgtctttttgatataacataaattttttgtgactaaatgtgacttttagtcataacaaaaagttacttgtaactagaatataatatttagatagaagttgttactataatttagttttagtgataacaattattgtgacacatttagttacaataaattgtaatttttgtgactaacattaactataaactttttagaagaatagtaatttatatttttttcaaaacttgcgattaatataaatttgaatgtagatggaatccaaataacaattagtacgtatgtactagtcaatattattacttggttggttctgtgtttgatttcaaaaaatagatccgtgtaacaatatgtaaattttatttttagtattgtaaattatttaatttttattaaaaattaataagttactttaaataattatagatgatcatgaaaaaaaaaagaggactaaaaagttctttagtataccaaaatagataaaaaaaaattttactggaacacttctaaaaatgaacagtagatttacctaaaactttttacatttgaaatttttttgtcggcaaaaagtttcccaaaaatctataatacttctatttggtttgctctgaaattataataataacattttgtttacgtggaaaagaggatgaaaggtaaaaatagatcaaaattcaggacatagagaactttttttattcttcatactattaaaaattctcttaaactattaaaattattagatttaaaaattttagttcaattttactaacagaagtttgacgtgaataaaaattttagtaacatgatttagtatgatttagtacatgtttgagggtacgatttggtataaagatgtaatgttttgagaacagagagagaaagaaagaaagagagaacaaagaaggtaattctgttattgatcttagacaaaaggttacagaggggttttatatacagatacaaagaagagttgaaccataacagattcaactaatcaaataacagaaaaacctaactaactaactgtcttaactaacctacatccttaaca

SEQ ID NO: 124736 - DNA, 1564 bp, Cannabis sativa
  modified_base (33)..(41): a, c, t, g, unknown or other
ttagggtgttacacactctctctctctctctcnnnnnnnnnctctctctctctcaactgaatctaaagtatgagctttggagattagaactttcaactctcaactcggaactcctttttagaatagaggaacccctatatatatagtttttggtgggtcccctttaagttggtattaaagccaactgttataacttccaggagctttcttccaattcatttgataagcaaatagatgggcatactgacttgacaggtcaagtgagtttaatcccaacatatatcatttacgaaattctacatgaaaatccctatagtaactaacggagcaacctaaatcgcaaccaaaatttgtattacaacccatgtagaaaccactggagaaatcactagagcaacccaaacgtaaattagaaaaaaaaaaagttaaaaaataatacataggataatttcccttatgaattttaggaatgtattttctttttttctttttcttaattatttggtccatcgaataatcctgaaagtaatgagattattgaaaagaaaaagtgaattttatttctaccctaaaaatttataaagatactttattttaataatttttattttatataaatatatatttcttaatttattttttcttcttattcatgttattttcttttttacgtgtcttattcatattattttatctgtggtgaattaatacctatcaagaatcaaacaaaataagaattgaagaattagaatggttgaatcaaacaatcacaaaattagaaaataaatatggaataaactaaataaaatagagacaagatataacgaggttcatcactctttttgtgttaactaatccccgggaggaatttccctttggtcaagttttattcgatcttcaataatggaggaatacaaaagttgaactcatcaacaatagtgtcttgcaccttacaaatcaattcacttgagagagatgtgatcaaacacacacatcctctttaacaaccctcctcactcattataaatgtaataatcatttcaattcctctctagatcttcacctaaagaaatagtacacaaaactttatatatgcaactcaataagaggggtgccctagttagttaactaaaaaaacaactaactcatcaggagctgactagacaaacccacaacatctaatatgtcactaaataagattaacagtagcattacaccaagttattaaaatttctcacaaactcacctattttaatcacttggtaaaagatatcctttgactgttccatctgttgttcctttgaaaatagaggacttttagtactcttcaatgcttagcaagtttaagaaatgcataaactcttgttacactcttggtgaacatatcagtcgggttctcattggtgtaaatcttcttgttatacttgaaatttggctggcacttcagatggggacacgtgtcaaactgagagaattcaaatcaacaaatataatgataattatattagaagatattaaaatagaataactcattaaatgctgaactggtagagtatatctacaa

SEQ ID NO: 124737 - DNA, 1335 bp, Cannabis sativa
acaaattaatgaaaaatacttctgatactttattgatattgaataatctggattactttgaattgaggttttatttagggcataaaacccaacacaaatcacacaaggagagagaaaagtggcagatttatttagacctcgtcggcgatgagcggtggggctaacaacaatgagtagatctgaacgcaaatctttaggcggcaatggcgctaagctatgggctgactgggcatagaaggttctcaaatagctcctaggtttcaatcgaagggtggcgataggtttggggtctcgatcggagcaagcacgtgagtgatacagtgggtgtttggctcgaggacgaccgctttggacaaagtacaaagaatgtgaacgatcagagcttgtatcgtgaatggagaagatggaccaagggggtggacgaagcacttgggtttcgagctcggcgagggtcagaggtggtgctggatttttgggttggctttttggggtggtttctgggcatcgacaagaagaagaagaagaaaaaagaaaaaagaaaaaattaaaaataatttatttagtctttttattttaaattaaaattataatttagaccaataatttatcgacacgtggcatttttaattagtaaatagatctgttagaaaagaggactaatagacttacgaaaatagtgagtttgaggattattactaccaattttttaaattgaagacttttctgcattaaattaaaaattttaaggacttatacccagtgctatagcgccatgtggtactcctcgagacttcgttttagcgcaaaaattattttttttaagaatcaacgctatagcgcaacacttatcttttttataaaaaaaatcctaattctaatgggattcatctatcttttttggcctatataaagaatgagatcaatcgaatttagggacgactggagagatagaaacaatcaactttgagattagaaaacatattgaagagcaagagagaagagatttgaagcgatcatcatcaactttcatcattagagttctcttcttcttcttcttctttattcttttatttagttatttaattataaacatgattattgtggttattatatttgtgattataaactaaacactcattctagagtgttgatggaactatttcaggttatgaatttaagtttttagattattcccatatttgttcttgctatttgtttatgcgattttgtgataattattatcttattaatacttgatcaccattaattagtatagagattttaggttttacacttgagagaggtaatctaaaatcggacttagaattgcatgac

SEQ ID NO: 124738 - DNA, 1545 bp, Cannabis sativa
  modified_base (1492)..(1520): a, c, t, g, unknown or other
gactatatctcaaatggatgttaagaatgcctttctgaatggtgacttagatgaggaggtctacatggttcctcctcatggtgttcctcataagaaatgagaggtttgcaagctaaaaaggctttgtatggtcttaaataggcctccgagcatggttttagaagttctctattgttattttgtttcttggttttgcctcaattgattatgattcatttttatttataaagttcacactgtaggtcgtattcagctttctttgtatgtcgatcatatgattattataggagatgatttacaaggaattagagtgttaaagtcaaaattagcttcttagtttgagatgaaggatttgggttctctttggatattaaagttgcatattcttcaaaaggttatattctttctcaatctaagtacactactgacattattgagtgtgctcgtcttactgatactagagttgttgacactccctctaagttgaatgttcagtattctccttctgatgactctcctttggaagatcctactttgtatcgcaccatcgttggcagtttagtttatctcactattactcatctagacattagatataatgttcacattgttagtcagtttgttgcttctcctactactgttcactgggatgttgttcttcgcattctgcagtatcttcggggtgccatctttcagagcgtactactaccttccacctcttctcttgagttgcgagcttattgtgatgctgatcatggtcgtgatcccacagactaaaaatctaccactggtttttgtatcttcttgggagatttccttatttcttggaggagcaataaagagtttgttgtttctcaatcttctacgaaagcaaagtattgtgccatggcatctactattgaagagattgtttggttgagatggttacttaaaaatatgggtgtcattcactcttgtcctactcctatgtattgtgacaaccaaactgccattcagattgctcacaactcagtttttcacgaacacaccaagcatattgagattgtttgccattttactcgtcaccatgggcaccattactttgccttttgttccttcatcgttgcagcttgttgactttttttactatgtcacatacgatttctcgtttttattttcttttaggcgaactctcgatgcttcttgcagcatcatgagtttgagggagggtgctgatagaataaatttccctcttcaagataggacaagtctcctaagcaaattcttgctaattcattcaatagtcatccctcttcaaaattacaaaagagtatttatattaagtaacaagaaagaaaaaggtaattcccctgctaacaaaattcaatgggcacctacaatttcctcctcaacaacgcacaaccatcacaaagtctttcagccatttcagtttcacgcgcacccttccttcacgcattgtagctgcctggttattgttggaaattattttacnnnnnnnnnnnnnnnnnnnnnnnnnnnnnttattaacatcctaaataagaactt

SEQ ID NO: 124739 - DNA, 1712 bp, Cannabis sativa
  modified_base (512)..(512): a, c, t, g, unknown or other
  modified_base (1661)..(1673): a, c, t, g, unknown or other
aacataaatgacttctaatcttttattgataacaaatcagattagattgaaatgggttttatttagggcataaaatcccaacaataccttactagtttaggtgtattaccgttatttaaactatatgcaactcgttgctaatcaacgagtttattgaaattcgtgattaattaaaactttatttagataataaatattaaaatatcatatatatatataaccaagatctcgtgtacaaaatatttgcaactgtttcaagtactagatacaaaagttatcgcctagcgactatacaaaatatgtccagctatcccaaagaccgtacgctccaggcctaatcaccctgacatgtacaatcttgatccgctcgatctcacggcttctcaaccttagccctgcccttacctacacatgtaaacaatatatgtgagtcgccagactcactcagaaaagcataatcaataacataactatatcccggattataatcaggtgcccatacacccaaccanaaccctatccccgtgtccaacacggtattgagtatagaacgtttgtatgatagtactattgaccataatatcagcctatactcgatatgctagtcatactctagtcgtactgatgtgatagcgtcaatcagtatatacttagccaaacatatagtgtcgatgttcagtgtaattatatgtacactaatattgttattataatttgttatctaacaggcattcataaacatacactctaaacatgtaatcacatatgcatatcattatactaatctcacctcacttccaaatttaagtgtgccggccaacttgagtggaataactgctcgacgatttacaggcccctaaatcacattatttggaaaaatgatgagtgatacgctaaatcacttttctgggacttaaaatcaaaaccaaaagtttccctatcgatggataacatggaaataccttaaatatcacaaaaagggaaaaaactagggttcttaaaactacctcaaccagcagaccagttccccaatcaaaaaattagttcggtagggttccaggggaccaaccagaattctgattcatacaggtcccaccgaaccagacacaaaaaaccccaacaacaaccacaaatcgaccccaaaatctaccaaaccttccagagtacctaattacaccataatagatataatccatgcaataaaacaaccaaacatattcacaatcaaaatccaccattagagagtaaagcttgagttcataaactcaaaccttgctcaatcaccataacaaccaacaagaacaacttagaacagctcaaataacctcaatatatcatttgaacacgaaatcaaacaactctttaaaccagagaaccctaattaacaaaaacatggaagaaaagctatcttcaaacttaagaaatcacaaaaggatgagttaggaagcttacctaggattagaacctcaacaatgattttagaattgctctgaattgttgaagaaaaccctaacctcttgctgatttctagggaacttgagagaagagagagagtttggagagagaaatggtgtttcttgatttttttcttcttaattttgaataaaaggaacaaaacttagtattatctaacataacagtgttggaaatattttaccagnnnnnnnnnnnnntaacaagtatgtttcattaatatcctaatatgaattcta

SEQ ID NO: 124740 - DNA, 612 bp, Cannabis sativa
aatcttttgctcacaagatacaccgggtactcgactttgtcttcctctcgcacaagcgaggcattgatggcatgatctgacactacctagtacaaaaaagatctttgcccctacaggttttgataatactagagcattggtcagatgctccttcaacttcttaaaagtgtcatggcactcttcagtccatacaaactttttattgcctcgcaacacattaaagaatgggaacatttatcaatagattttgaaatgaaccgactaagagcagcaatgcgccctatcacactttggacatctttatgccttctcgaagagggcatattgattaaggcctatatgaaaccccaaaaaagcatttcttagggtttagcttcatcccatatttccttatcaccgaaaaagcttcctccaagtcgcgaccatgctcttcggacattttggacttcaccaacatgttatccacatacacctccatgtttctccccaactatcctttgaacatgcagtttaccattcgctgatatgttgctcctgcatttttgagtccgaaaggcattaccttgcagcaatagatgcccttgttagtttgaaaacttgtatgttccttgt

SEQ ID NO: 124741 - DNA, 621 bp, Cannabis sativa
tgagactggttggtcctggggtgtccatgaaaaagagtaggctctacatagtttagtgatcaattagtaagaaatcgacccacgaggcaccaacgatcatccaaattgaatagttctttctcccctgtatcttataacagaccctatcatcatcccatccttctgttataactttgtaacaacaaaccgcctccaaatcaactatatcatgatcagccatgactagaaacgaacaattgaaatacaaaaagatacaaaacaagaaacaactttcactctataacataatagtagagcaactcaagttaaaagtccagacagtatcttcctattttattcttaatgttgctttttagtttgttatgttttaaaaaaatgtttataaatatttgaacagctcgtggcattgttacctagttaaggtatatgaaagtacaatacactttacctatattttaaatgctaaattaatataaattaaacaaataaattaaaaaaaataagtaatttgacaaataaagaaagttcaaagatattaattatttatttattttgataaatttcaatcaaattgatctatttatcgaaaccctatcatttatgactttttttttttttttt

SEQ ID NO: 124742 - DNA, 616 bp, Cannabis sativa
taatttttatcggttttttcagttcggtttgggcgggttattcggtttaggcggtttacaaatttttttgtacagccctagttttgaagttaaagttagtttttatttgatttttgagaattcagctccgtctgagtttggtgaggttaaaattagttgtggaagttgttttatgtagttcttggttgatttgagagggttttagttgctattgggcttggaatagagttttgagttttgaaaactcaaggcttggtctctagtggtggattttgattcagagagtttttgtttcgtttgtttgttgggttttgttcgttatacctttattaggtattctagaaagtttggttgaatttgggaaagttttgtgaaaactgcagagaaaaatggttcactgttttctcagaaaaggtggaccgatttttttagcagagtcccagaaaatagttaaccgttcggggttttggctcatcgattttcttaaattctggagcttaggtttttacgttttattgatatttaagatttttccacgctatctattgataagaaaaatttttaattttgagtttaagtccccgaaagtgagttagcaagtcacttaccagtttta

SEQ ID NO: 124743 - DNA, 1072 bp, Cannabis sativa
tttctcataaaattaatgatatatagcttctaattatattttcttttagaagagaaacataaataacccctttaattaacatatgtttaacaaagccgtttaatctatctatgttatatataaatagtagtatcatagtatgaacctcggccgcctgacttgctctaaggttaggtattagtagtgttaaaatgtgttttattggtgtaattaaatatgagattttatataatttaatataataaatttaaaagaatattatttaataatattgttcactatctttaacgaaagatctaaaatttatgataagtttaacataaaaaagtaaatttgtattatatttaactcactttaatataatatatgaaaaaagaaattaattgattatttaatattttattaaaaatatagaaaaatattagtttttattcttttattatataaataatagtaatatagtaatgttcagtggtattatagtaaataaaaaaatagtatttattatgggttaaatttaatgtaataatatattttgtattaaatttgacataaattttagtatttactaaagttagcacaatttttagaacatcattcattagaatattattttttggctattaggattttcgcccactaaatattgacatgtatcaaatcatgtcttctaaacttttctaaccgttaaaaattctatttgaactattgagattgttaaatttaaggatttttgttcaattatattcaattttactagttctatgatacttcatatactaaatcacgctctttaaagtttgatatctccaaatcatgttcatcgaactttaacatataccaaagtatgtctctttaattttcatcaatgttagatttttttttactaaaattgaacaaaaaatccttaaatcacacaatctcaatagttcaggaagaattttcaataactttaaaaatttaagagtataatttgaaacatgttaaaattcaaggaaaaaaaatcttaattaattttatttttttaggctaattaggatttttgcctcatgaactttgacatgtactaaat

SEQ ID NO: 124744 - DNA, 1503 bp, Cannabis sativa
  modified_base (84)..(87): a, c, t, g, unknown or other
ttcctaaactttatatgtgtttacttcattgttttagaattcatatgaggatgttaattaaatatacatggtagtaaatctagnnnntggtaaaatatttccaacatgagcatagtactgattatgacttatatttaattccataaagtattaattgatgctatcatttttttacgatcatagtaccgagtcagaagtatgagcatagtattggttaagagtgatattatggtaaaatgtacttttgggtatagattgatggaatcatagtgatatggtcttagtgcttgttaagactaatataatggtaaatcttaccaaacgtaagagcgttcttgattcatctgttaagacttgtatataggtttatggtagcatagctccagttcgattatatgtttttatgttttaagcttttcttacgagtctgtcgactcacaattattatttttatttgcaggtaagagccaaaactaaatcgtagcgagtcaagagctttatgaagattgtacatgtaaagacctagagtgtttatgtcttcggggctatttaggctcacattttgttagtctttgggctactgtttttgtacaaaacatattttgaaaagagttgtgaaattttcacaagatcctgtaattttgtgaattatgtttaattattaaagtttaagtttatttaaaaagttttaatttaatcatattttttagtaaaccctttgattagtaaaagagtgcgaagtggttaagaaaatattgtagcacgtctaaactagtaggtcgttaaaactaagttgccgcagttctcctttcttatgttgtcaatatggtgcgcttccttctcagccttatgggttgcctcctcagtcttcctacactgcagctaaagaattggttaaatctttgttctaaccatccactgagttaagcaaagtttgaaggccctacctctcatctaccagctcagtgacttagttagcttttccaactccttctctaagtcctccactttttcctggtcgagcagttacttcttcaacgagatcacctctttggcctccttggcagctttgtttgcctcgccagcatcataaatggctatttttagttccttggagaggtcatccagttgagaagtagctgaattaatttgactataaaagtgggagaacttgatgttaagctgaaagaaggacaataaagagtcaaaacaaaatagtcaatatatttgctgaacaaaattattaatccctttaccttattagtatcgtagaaaaaaccgctcttaaacatgtccaaccaagccgattgagcattcctcatcccctcattaacatcatacatgacacggtcttgatacactttcaccatctccttaccctttttcaccttgagacatagggcgccataattagccatagaggcctggggagtggaagttattgtaacgccctaatgctaaggcacactatagtgcttcttcaattacagtgcagtctttgct

SEQ ID NO: 124745 - DNA, 1224 bp, Cannabis sativa
  modified_base (42)..(52): a, c, t, g, unknown or other
ctttattgatatttaaaagataaagattacattgaaatagannnnnnnnnnnggcataaaacccaacaattttatctcggcatagtcttttcaacctcccatgcttccatatttggttgtaacaatcttgatcaagcattgtgtcacatttgatcatcgcccaaaaactcaccatctccgatatggactgtccccttccaaatgtctaaccctgacttgttaaagtattaaaatttgatgaaatcatttttcaaaattgaagaattagattctataataaagccgtaagccaaaaattaacgaaggagagagttggagaccgtatatgaagggaagtagaagggtccgttctgcggccacaaacggtcatatccgatatcgatcgtcatcatctgctgagctattagaaggtcatacaatttttccaccgtcagatcaggatcaggatcatcaccttcatatcatcatagtcagagcttttttgaattggagaaaatgtcgaagcgtcctggtgggggtcggcctctgggtcatgattctataggggataagatccagaggtatagaaagattttgttgctcatttctatgcctttgcttctcgttacatttattatttacgtgatgcctaagcattgtaaatactccatttctaatcgcaaggttttgccaacatcacttagatcccaggcttcttatgccgttattttttatgctggtagctcaggtagtcgcattcacgtatttaattttgatggaaaccttgatctggtccccattggtggcaatcttgagcttttcttacatgtatttctttgttagtattattattgttgtttggaaatcggaatttatgtttttaagaaattcatatagtaaatttctcaaatgtagattaatccaagactatgtgcatattctgattgttgacctcacttttagccaacgacaatgggtcttaattgtaagtgataagtgatataatttagatgtaatatggtaagataaataaagaacacagagtttttaaagaggttcggccccgagcacttgtattgacttaagaacaaagactacagtgatatctctgagtatcctctcttagatcatttttctcccccttttgcccagtgagaatagatcactatttatagggctatgtgcttgagggaaggtttcccttttgtttacaatgtctataaatggtaagattacacattaaat

SEQ ID NO: 124746 - DNA, 2266 bp, Cannabis sativa
ctctctcccccgtgcatgtgttctcattctgagtgtgcattgtactgtaatttgttttgggtttctcgtgttagttttttttggaatctgtcatttggtattttgatttaggtaagtttggtgctataaagacttgcattgttcaaatggagttggttgcatggtactataatttaggtatttttgtaatctgtttgttgatttggttggattttgattttttagagattggataaatggagttggtttgagcaatatttggttgaaaagtctgttttgttaatttgtatatttaaaacttatttttcatctttatatgttgctacatttgtggaaacgaatgattaggagtttggatataaaaatagttaatatttattaatgttaagtacttttaacattcattttgaaaacgattcatacacaacagtcattaaaatcttattttaactacattgttagtgttagtaagagaaaaaagatttgcttgattaagtgtaattattatgagatagaaaaagtgaattatttttttaagatagttttttaaaaaagctgcacacaagttgaccacaatttgttgttgcatttgttgattaagtgtaatttttatgaatatttgttgctgcatttgattggatttacaataaaaggtggtgaagtttcttagaattgtgaaaaacaaacatgcattacacactaaaggccaaagtttatacaattttcaaaattcaatcaggttgtcctacttagtcacagttagaaatggtcatgattagcctgaatgttataatcatgccttgaacatatatgtcagagatcaattagaattgggtagagaagtcatcctaggaagttaactgctacactactttaatagaggtagtacaaaaatttgttggcttaacaagcttcaacaaagcatgccacaataactacttcccctttcctagttaagacattttttttttcattttatttgaaatcattttgtataacatcataaaatcatatcatttccacacttattaattttgaaacaaatattccaatagtagaaagtttgagtaaagaaaaaccatagatgaatgtatatatataaatgatgaagtttcttaccttctcagtccatctgggacccaattcacccattaaaattggagacttaaatagaatatttctctttttattttttgttttctcacttttagaaaaccaagtaaaattattgggtaaggaattagtaagcttttattcttgattggcttagttgtactttcatttacttttcgaataaataaattcgccaaatctatctttttgaatacaaaattaaataaagtcaattagccaagaacattatcaactagttgttattttttttaatatgaaaaaaatgaattatcaaaaataagtaaagacttaataaagttacttattatatatgtttgttggttgtccaaattgtgtttcatgtcgaaattgtaggagtgatttttgttttgtttcatttttatatattggaattatttcaaaagtaaatgagtttcttatcattttaaagtacttggttgtttaacatgtaataagaattaaaaatgaatatattatttggtactcataaatgacacatgttactagttcagaatcatttttttaagctaattgctccattgtatttaacaattagactataggacatttaacaattacactatagtacatataatgaaatgatattatataggagagatgcttacctgttattggaaacatacaggaaaataagtgtagggatgtcatgaatacactgaaattttagacaattgcaatgaattcttaaaaaaaaaattcttctaacattttagtgttttgaatgtttgttaatttaagatattttctcttgtgtaataagttttaacaatggtgtatagatgaaagaggggttttggtgcagagaaaaaggatgcagctgagataaaaaaaaaaggattcgaaggaagcttgagcaaaatatttgtaagttatttgtcacagtatttttgcgctaatattttttggttttgaaaacaatatttataattcccttcctttatttaattgatgcaaccaagccaatttaaaagcttatgctgctgtacatgcagataaatacaaatcagatgtgagtgacttggagtgtgttatggatcttttatttttgatcttttatttagcgttctttacttaatcgagagtcttaatttttcaggtccttggtagtttt

SEQ ID NO: 124747 - DNA, 1156 bp, Cannabis sativa
tgggatgctgcagaactatcaactatgtaataattttaatgctattagtggggtgttttttatgcttaccagctatcttcaaatcacaattgttttttttttattatattagaattttgaataaggtgaatgaaattttatcttaaaattaattgataataaaaatagtgcattattcttatatattctattatcgttccaccacaataatctctccatatatattgaactaaaattgcaggccacatcaaatacttggggacaggctagcccacacttattcccacaaatagataataaaattatgcctccctttcaataaccacatcttaattatgcctttcacggagtagtgatgcctgcataaacaaaacaaaaaatgagaatccattgtgtatttgaaaataatagaaaatgtaaagctgtgtgttttaagataaataattaaatatgggccgggacttacttccacacttgaagtggcgagggaccctgcgaccgcagccttgaataaggggaattgcgcgtttgagatcgatataggcagccagattgggcgttataacttggcaaacacactgaacatgagtcactcttactcgttggcaacacgccgccgagggaggcatcccaatcagcaccgccttgcacgcgttcagcccaatccttctctcctcatggcactgcgcgttgctaagttgtgcactcgcaacctccaccccataactcatcatcatcatcaccaccatcaaacccattattcccctcatcatcattttcattgttaattaataattataatattagctctcctagtacacaccacaagggggttgtgatcataaaaatagatgtaaggttatatataataataatataagctgagatttctgaccggcttttaaagtatacctattgttctttttgtggtgactttttggtgcatatgcattgagtcgttattttgtcgtttttgttttttcttcgagtcaatatcaaaaacataatgcatgtcggcttgttggtttcatcacatacaataggagtgataattgtaattttttattacaattttttagttaacttttacacttgaaattacatattggaatattttttttaattttttttcataatagtattcgttatagttaca

SEQ ID NO: 124748 - DNA, 1475 bp, Cannabis sativa
aaactcttatgcgtttaatttcatcgtattagagatattcatatttaggatattaattcaacatccttgttagtaaatatagattctggtaaaataatctcaatataaataccttatgtttttagttttatacacttatgtacagaatattttttttctttgatggattaaatgctatatgttatatttttgttgtagcctttactaccaattttattaaatgttgatttgattaagtatatatcacatgtcaatatattagtgatttaactcattttttatttttaaattatcattaaataatcttagaaaaaataactataaaaattgaaatattaataagaagaataatagaaatatattattattattatttaatttatttttcaatattgaaattatttaataaaagttttattgaatgtggaccactaaccaattaacacgtgttaggttagtcgaagttagcaggattgaccctaaatataggcgggttaggcccgtacttagggcccacattttttggggacccaaaataaaaaaatgaaaagcttcactagttatttaagtaaaattaagtgtacaataaatatccataacttagtttgtaggaatgtatgacacattacacaatgatgttcataagtgtatgaaactgaaaataggtacaaaaagacattttaaaataaaatttaggttcgatgattatgctggtttttgcactattttttgattgttttcatgccttttatagtttttgtgtcatttgtatggcttacccctaattatttaaggtagatttgtcatgatatggacaatggatatgagaattgtttcattttgtattcataccttctacaaatgacttttcgacagataagtgtttgaagttttaacactataatatgaattgttttaccatctttattcacattaactattttttctccattaaattgtatggtaatagaattttatttattgttaagttgtagcgtcaactgtaacagagattttgccaataaatttattttaaatttaacttgtttgagagttgttattttcaagctattgagattttcttttattaatttttaatatcattgttaagtgattaattcatttttttttattttacaatgttttgtaaatgtttcaggaccattcttgatatgttaatgagttggtgtgtagtatttagtgatacaagttaaagttataactctttgggtgtgatggttgaagacgtagctttattgtctaaatttttagggcagttttatctcatgttgttcactgattttaacagtttatagtttgacaaagcatatctttcggttagacgaggagctatccagattcaaggaggttcttatactacttacaaatatctacgtcgtaaatttacgagtgattctaattcataaaaaagaacatttttatttttacacttaaaaaatagttttttttttttt

SEQ ID NO: 124749 - DNA, 2420 bp, Cannabis sativa
ttagggcacaaaaaccaacaataggttggtccatgagtatgggcctttgcgttgggagttgagtgacctcccatacttcatcatgttttatggcttcggcataacgcttcaactcgttcctggtggtccctccaacatgaggcccaccagagatcatggtcgctcttccattcgactagggtggtaatccgaacgcctattagggaagcgcccctctaggagactaccttttgggcataccccccgttcttccctaaggcaatggcctcctgctagaatcgggtttaagtgcggtaacctgcttttgatccattcatataagtgagctaatcggattaggttctcaatctcatcttttaggtttttgcactcgttggtggtgtggccaatgtcgttttggtactcgcatcttttattgggatccctctgggagatatccctgtacaagggggaggctttcgatgatgtgtattttgccgagtggcgaagtatacacgccctttggtattttgtaagctctgtgtattgggtgtactggggggtatacccctttcgttgtcgcttgtaaacaggtcgggtagttccctttgaggatctcttactctgggagctctgcgaagctcttgccatgctggtggctagtgtggattgagatggagtttagatactcaaccctgagggattgctcatgggtgcccgaaagtgtgataatgcgcgagccaaagtgaggctttgattgtttcctgaggtagtagagaattgtatcctacttgtttgagaagtggccggagatggagctctcagaagttgagctccaggcacatatcccgataccccaatcaagtagtatccttcgtaagctattatttgggcttcttcaaagttgatgtatttttggaccctcctctaaaagtcctggaggctagctgctccctcttgctgcagttcgttccagaaaggggtccccgttcggattctggcttgaagaagggccagctgttgtctgttacccaccttcttggtttttgaagcatcctctttgaatctttttatgaagttctttagggttttcgagggtagttgttttatattagtcagggcgctcacctcgaggttgatcttccttgccgcgacaaactgtctccgaaaactgacttgtaacttgttccagcaatcgactgatcctggctccagctttttgaatcattcctcagtagagccacccaactttagttgaaagcataaacattttgtgtcattgctgaccctcatgacggtcatcaccctgttaaattgggacagatggtcaatagggtctgaatctcccgtgtaagtcgccatttcgggcatcgtaattttattggggagttccgcttccaatatgtgtcaggtgcatagttctcggtcctcacaattagagtcggagtcatcccctttctgtctctgggagactctagcaatgtctttgccgagtatcgctaattcaaccaagattccttccttcaaggcacctccggagactggtaatgcgtgttttttcttttcaagatggtatcttaagtcaccttgcttctcattgattttctatcttagatcagtcgagggacacctccgacttttcctccccctttctctgagttcttggtgcatgggtacgctctttcggtcctctcgatcctgaaggccaaaattctcttgagggagcttgcccatctgtggaactttcctttttgggaaatcagagcggacctttcgcggatcctgtgccttccagtttctccaagggatcgaagttggatttttcttagggttttcctaagaaggatatcgtatagggcttggttccctggtcttgggcccctgagtgcttggtgaggattcctcttgtttttacactattcccgcgggcatggccttgggatgcacatgtattccagccatttccatagttttttgcatggcgaccgttatctcttgcatcctcttattctgttctttttgggcggctagtttggcctcatgatcaactattttttgccttaggaccaatatttcagtgtaactaccttcatcgtagacatcatacccttcgaggttttcttcatattcgtcgtcgttcgtctcatctcgttcctcagagcccacatttactcatgcaaccgcctctttgccttctgtgttttgaggatcctggggggacgaggttggcgggtgttgtctcaagtttccaccattgttgttctgattatttgactgttgttttctcaacaacgcttccaacagctctcaatgaaagcaccaaaatgttgaatgagatttttagcaactgattaaatgagataatgatgagagctttgggataatcaatgcaggtgatttttacgtggttcaggcattaattgtttggttttatgccctaa

SEQ ID NO: 124750 - DNA, 1433 bp, Cannabis sativa
gtaaaataaggcaaaatattggggcgttacacatccaagggtggataatggatgcacagtggttgttggtcaacatttggcgaggtcaactctttcaacatcctattttgagccatgcaactgtgagaattaaccgagtcgtcaaaattagaatcgagaaaagctgataatggctctttaacaggaccaagaggttgaaagagtgggttgctgaggatattcttcgatgatcgagaagcagacgataactcaagatattgtttgacccttgatagtctctcttgagtatcgtatgcactagacatgtacacctaagattgccaaaataaaaactcgttagtaaaacataaattaaatatgaataataaaataatacaatagtccccggtaacgacgcccaaaatttgatgcatgtcgtatgccgtatcaaatttactaatttttttattctaatacttttaattattttagtataaaagcaagtatgggtagatcccacgaggactatgattaatttattattcactatcaaatagaaattaaaggggaattttgagttgcaattaaataacataaaaagaaaataaagaacgaatgacaattaagaattgttctccacctccaacaatcaatcaagaacaacaatagcaaatattatattttattctaaaattaaactattaacaccacaaattattacttatcccagtctccctattacaattaattacgacaaagcgcttaataaataaatctttttactaagcagtaggcccacgaagcatgcaatctatttaacttagattttttttttttttttatggagacaagttaatctaagcaacaaattaatttagcatataattcatttaacttagtattactcttcatcacaaataacgatacccgtcataatactattaaaagcaaattatcacttaaacttagaatcctagactattaggtaaatataaattttaagaatgatagtagagtaatgtaaaacttaatttagcggctgtctaaacaagatcaaaatattaatcataaaattaagcatagaataatgtaaacaattcattatgaaggaataaaatactaacccattgggttcgaatatttttttcccatccctaacaatagtaatagtaaaagacaccagtcttgtttggttgagcttctacattcgctaataactagaagtataatataagtataaactttgtcttatttttactatttgaataactattatatgaagagtttttaatgaaaaatgttttttaaagtatttagatatcattaaaaaaatcttttgtgagtaaattaaaaattatgtaaattattttaatttttaaaatagcttctcattttaacttcttctacaagtatttttaaggctaattagtaattcccccccccccccccccccc

SEQ ID NO: 124751 - DNA, 3079 bp, Cannabis sativa
actggtgcctaatagcaatgcttaatttttttttttttattattattattatcttacatattaaaataataataaaattgataatataattattatttttatttttttttttaaataaagatattagttagatattaaattttacatcaaagttttgtaagtgtgcattagagtataatgctaaaatttaatgtaaatttactacaaaattattttttgtgtcaaatataacacaaattttacatcttctataaaagatggtctaataatactcacgattcttctcaccgtactaaagtgtaaaattactaacttatatttatgaacacataaaatttatttttttaatagaaaaattatttttttaacttttaattaatttgagataatgtttagcaatgaaaatggtatgtatgttttggtgataaagaatcaatttttttttatatgtgaaccataatataaatttaggattgtttgaatacctcaattgatttgtttgatatagtatgttccaaaatcatgggcatttatatactgttcatatgttagttttacacaataatttactaatttacatttaattttataatttgtataaacaagtttctaagtttaggtttagacgaggaaagctctccagcgtgtgtctgtaattgatttgtttttcctgatttgtccttgacagatccagttagagttctcttcatcttctctcacgattacttttttttagtaattgataatagatcaaatggtgctaaaacgacgagtttatatattaatactaattaaagactcgtgtgcattagattattattcattccttttttaatcttaagtatactttgttaaatcttattgacttagggtaaatattattttagagttgtgtttgcaaaagttatcaattggatatactgctttgttaaatgacaaaatagaccttatattttctaaaatggtaaaaatagaaccatgagctcaattttcaacaatttttttttaatataactaactttaagataatttctaacacgaacagatattcagaaaatgtaaccgtttttatcataatatctctatatcagattattattaagttttattttgataaaaaatgagttcaggatcctatttgtacaattttagaaaatacagtgtctattttgtcatttaacaaaacagagggttcaattgataacttttataaaatacagggtccaaaatagtatttacccaatttttttttttgacgtacccaaattaatttgttggttactaaagttttgggtttttgactgattaagaagcataattattctttcttaattttcaaatgtatatgttttaattgtattcttacaaggttttcatgtgaatggataaaaagcttataattaagtgtttgtcttaaaagtaactacttaaagaaagtgatggtctaaacaatttgttaatctcttgatatttaaaaaatattatgatagacactagacactagtattactaatcaaaaagtaatggaaaaagtaatggtctagagtagtaatagtttttatgtttgcattttcagtcttcaaatgatgtttgcttttattaaaaaaaaaacatatatatatatttttttttaaattaagaaccttatagagtagattggcttaattcgggtgatcgcaacactaaattttttcatgctaaagcctctacaagaaagtcaaataacaagatcaaatcccttcttactgaggcaggggatcgggttcactaaaaaactaccattgcagccacaatacatgattattttgcctccattttcagctcgggtatcattgatgaagatgctctttctcaaactttgaatgcaattccaaacatggtcactgatgaaataaatgaagagctcactaaacctttttttgctgctgaagtataaagtgctttacattctatggcacctgataagagccctggtattgacgaaatgtcctcaatgttttaccaacaaaattggtcaattgtgggtgaagcagtcacaaacgcagtcctaagtgtcctcaatgatggtactgataaaacgagtttgaacaaaacaattataaccctcataccaaagattaaaaatcctcaaagggttcaagactatcgaccgatcaacctttgcaatgtcatttccaagcttgtaactaaggtccttgttggtcgctttaagaatgtcctccctattgttatatctgaaacgcaaagtgctttcttacccaatcggttgatcatggacaacattcttgtggcctttgaacttgtccatgccatcaaaaataaaactgcgagtcgttgtggtattgctactttaaagctagatatgagtaaggcttttgatcgagtcgaatggcatttcatcaaggaggtcatgacaaagatgggtttttctaccaaatggattgacttgattatgggttgccttaccacaaacactttcacgtttctgctgaatggtgaagtcacgggctctcttattccaactaggggtctccgacaaggctgccctatgtccccataccttttcctaattttttcggaacggttatcacgcttgcttcatcatgaacaatcagagggacatctccatggcttcaaactcaccaggcatgctccatcaatatcacacctgctttttgcggacgacaacctccttttttgccaagccaatgaaagctcttgccttgtcatcaatcgagtcctagatatctatcatcgggcttcaggtcaagtcctcaacctagagaaatcagttatgtctttctcacccaatactacttttgttgcccaagtttttttccataggactttgtctatgcctatttgtgaatgccatgagaagtatctggagatgttcaacggtatcaaggaaaaaatatgggggcttatgcatacatggaatgagaagatcttctttgccagaggtagggaagttctcctcaaagcggtagtccaatccattcctacgtatgctatgagttgttttcgcttgcctatgtatttttgcaaccaagttgagtctatgatggcaaatttttgg

SEQ ID NO: 124752 - DNA, 2948 bp, Cannabis sativa
gctactcctcccattatcaattggttttgagatagaaactcattcatattattccaaattctaacatgtggtgctatggtggttttattcgtgggtgtaaaagatggaggctataaaatacattttttcttcctttttatggttattttgtggttattttttattttagttctcctaaaaatacatttgacgatctcactagaaaaaaagttttgaggtgtgtggttcttttatgtttttctaagtagttatatctacttcttgttttacagttattttttttgttgttttggtagtttttttgttctgattttttaagattaggcttgcaaatataactgctattgcattgggtattgaggttgtgcagaacattttctagctttttataatcatgttttcctttcttttatttgatttgttttaatgttgttttacagttgttttgccattattatatatttgacgtcgattttatttttttctctcaatctcaccagaattaatggttattttccgattgttctagtgttcctgtggtgaatctgttcgttggtgtggaagatggagacctcattttttttttctgtttacagtataaaagaatttttttttggccaagacagtataaaagtaatttctaccgtatggcagtatttttgtaaaattaggccaaaagttagtatttttgtaagtttccctaaaaaaaactagttaactttgcccgcttattttaatttttttaatattataataaaaaatataattatttattactataataatataataaatagaacttaaaaatataatactaatatattattatattaaaattatattatcaaattacatattattattaataaattcatttataaaaatataaagctcaaaaaaaaataaaattttagatctattcatcatattaataagtattattattaagaaagttaaaaaaattaattagtgtgttttattatttatttcttaataaatttaaaatatatactattaacgtataatagagttttaaattgtattttttaaaaaataaagagtgatgcaaaaaaaaattaaagtattatcattatttaagtaaacactttttcccataatgtatttatttttttatatatatattttgattatttaaagttgttgttattaggaatgcacatttcatcaatagggatggggcactgcggggtcctacccctaatggggtggggattccccttctaaatggggaacggggcggggacgaatattattttttgtcaccgaaaatgttaaacatggcggggacggggatcacactcctcgccccgctggggacctatttagtattttactttatatttctaataatattttataatttgtaatttatgtttgaattttttaatatattagtattctttatatgacatttaaattgtattttgggtagtaaatagtttactgaataataattaatatataatattttaatttttatgtagtttaatatttatatatatatataaatttttatgaccctaagtggattcaataagtatatcaactactttatacttgataagagtaaaagattcgtcaagggatcaagaaatcaagaccctatacaaaagatgacttcaaaagctcaaagtcagcataaaagtcaaagtcagagtcaactctaggggaaaagtcaactttgaatcaaaacatgcaaatcaagctagtaagcttatctacatcaagactacacacactcaaatagtataagtttacttttgttttgttaaagtaatttgcatattacactagggtttgtaagttcaaattttgacccactcactaacctgtgcgacaagttttctcacccaatagttcaaaaaaagattttaattgattttttaaatcacatatcatttaactaagagaacgaaattagaatttctgaaatcggataatcgagtagagttatggccattttagtgcgaaaaattagactttttgccactaccaggaattcggttaaccagttcacctgaaacaaatttactggtttacctagtggcaatctcatttgttgtgtccaacggttatttttcactcaaaaattcaagttggctgagtatgtgagttctctattattctacgcatcatgattgaaccaggatgacctaactggtcatgccaaactataaatgaatttttctcgtttgtgaacttcttgttcacaatgacatgagtttttattgtacttaaacgtgtaatgtataaatttgaaaataaaccaggtaatttttctaatatatacttttttcttgaaataataaatgtaatctaaagatactcaatattattttcatatgatatctatttcaacgtatatctttgaaacttaacatatttctttttgatttggtgaataatataagatatcttctataataatttttgttcctctaggcatcgatataatgactcttttggagccttcaatatattgtatgaacatttattttcattcttgatgaatttaataaatatatatcgcttctaagtattgtatgagtggttgcgttatccgccaaacatatatcatcaccattatttgtgaaatcatgtataagatgataaatgttcattacttcattaactaacaaaaaaatatatatataataagttcaaaatataaatacttaaacaataaaagttcattacataaacatcacaaataaaataaatcaccttaaagtaaataaaaaataaaaaataaataagaatgagaaagaaaaatgactctaattgtggacattaacatctctactatcgatattcatatttctattaatgagatcttcattaaaaaaatatgcaacatctaagtgttgaactactacagattatgaaccaagatcaatactttgtttagagcatcacaaacaatataa

SEQ ID NO: 124753 - DNA, 943 bp, Cannabis sativa
taaagaaacagtaatgaagaatatgttttacaaaatcctatactacagatatcaggcaacactacaatggaattttttccttaaacaaaatctccattctcatttcctcctaaaatcacatccccttttagttctaaatatcatgtccattgccacaattgctcgacactaggaggtgaggtaacaataaaaatacctcatcaaggtaatcaacatcgaggtcaccagagttatcaacattgccaaacataaatcccaaaagccggttactaccaccagcctcttcgtaatcatcctcgtcatctgccaaattacaatagaaaaagaaaaattatagataggattcataggaatgttatatgttgagttgaacattatattataaatactacataggaaataaagttataaacagaccaaacccatataagcctaaaagttcaactgcaaatgaagaggcctatcattgtttgtgtctgaggtgttgtatttggtgtaagaaagatgggaaatctattattcatttattctttgagtgagcttttactcagttgttatggtctaatatgctcagtgaatctaacattcagtatacgccttgctcatttgtccagttgttagtgtacaaattgaaaggggggaagagactatcaacaatgtcgacaacagccatcttggctatcttctggttttggttagagagaggaacagtttctaagacaaataggtctctgtaaaaggactttgggagaaggctaaaatctgggttacatcccggttatatgaaactaaaggctttgagggattgtcttttctatctcaagagagattggggaagtttcctgtaaatgctttagttttgtttatgtcatataatattttattgtgtagttgtacataggcaacataagatcattttcatctttctttcttttcttttttt

SEQ ID NO: 124754 - DNA, 1156 bp, Cannabis sativa
tactattttttgcaaatcatcttgtgtattattagaaagagcatcaaaatacaaatcattaaatacaacaagcatttgactagaaataagagttcattttattgatttattaattcaaaataatttaaaaaatcgtagcacattaaacatgtaggctattattattaagaaatttatttgttttcttttttgacagtattaatactaattacttttcactattttgtgtctgttttattcaattaacaaataacttacaataaaagttaactaatacgcacaaattgtgacacaataagattttactttaaaaattaaacaccaacacaattttttaaaaataacctgtaatatagttatataaataattatgtaaccataatgattaattgtttcacaaattaagtaattaatttaatttatattaaaaccagttctcatttatcccttagctctatgaaaaaaaaggaaaattgttccacctttcatagttaatttacaaaaataacttttatttcttatttatttatttgaaaaaaaacattttatttattcagataagttatgcacatagtattctttttttttactagaaaggatgcacataatgttaactaggatttttctttatccccacgtgtcaattacctaatgccaagtgtcaactttctctcttactctacttactactagagcattgctattaggcaccagtggtgcctagtactttctcgacatgtcacgttgcgattggttagcaatatatttcctaaaagctattatattaaactatatgggacccgatacttagttggaccaatagcgatactgacacataagagggtgctagacaccacttgtgccctttagcatttcccttaccactaaagtaaaggtgtggtaaatttttctatagctaggatcgtttatggcagtaaaactattctatatgcaacctccccaaatggatcgattttcaataaaccttacctctaacttcaaatttcaagggtctccattgtctgtttgcatacttacattgacaatctatgcactacaagaaatgtcacttttaccagcacatttttgtgctggtaaaagttagtattgcgctggtaaaagttagtattgcgctgtgttggcaaaagggggttgg

SEQ ID NO: 124755 - DNA, 2182 bp, Cannabis sativa
  modified_base (48)..(76): a, c, t, g, unknown or other
tgtttatttcatcgttttagaaaggtcatatttagggtgttaatcaannnnnnnnnnnnnnnnnnnnnnnnnnnnntaaaataatttccaacacaaatttgggtttgcgtccctagatctaggtcagagattcgggttgaccccagagcttttttaaatattatcatacaatctaatacagaccatttgttatgtattaaataatacaactgttagttgtattaaagattttggttgtaataattaatactattaacctgaaaatttttcttgataatattgacatcaatgtttgtgacgtggtaaggaggatgacgtcattaagttgagtagacccgcctcatagcagtcgacttggtaagggaccatagccttatgcccaagttaactttgggatctctgggatggaagtttggacttcaataacttgaatccaactcactatcttttagtattttgtaccatgaagacatggagcaatcgaatccaaatctcgagagctaaaattacacgaacctgcaatctggaagccaacctacgcacctagggtttcaccaagtgccaaggttgacattcctaactagggttttagtttctgagactgtcttagtgcaaatggtttaaaacttgcattgggacatcaagttgacataccataaacatgtttaaggcatcataataagattcgaagtaagttcattttagagcacttggggcttgggtgccccattgcctaagttgacagtttctcgatctgggcaccttccaagtatcagattgacgatctaacttttgcattttcttcatctttgttaaaatagggattaggtacatttggggaagaaacaacacttcctgtgtactagaagcaaggcctagcgcccaacttaacatattgtcaacctagactgattttgatgatgttttccgagaaatcttccaagaatcttctctattttccgaaaacattgaaattcaactaaatctagggaccaaacaaagtttctgaggggccataactgggacccagcgcccatgttgacacctggcactagtcccagcgcctaggttgacataatgtcaacttaggctgtttccaatcaagttcatgaaaaactgttccatgcattttttttgtcatcacaaataatgaagattcaagaaaacttagggagaagaccacaaacccgagaccctagaaagagagtgcaatgcctaggttgacaatcaacctggggcgctgctttcgattgctcagatgccaaatcgaattcggccaatgtattcagaatggtcaaaaatagggttggagaccttttcctcaaggtcaacaaccttggaaatttcgaaatgagatcccaagagctcgagaatagggtacccaacgccaaagttgacaaatggcctggtgcgctgggttttgcttatttgattctgattctgtttggaccatctatttagtttttcaaaataattaagatccatgaagctagagaagtcaaattcacaatgtctcatttctcatttccaacatgggaaaccaatttgaaaaggaagagtttggagtctctttctacagaacagcaacatctctgagaacttgtgaccagcttcaccagaagataaaaatagactaagtgatgtcaaaatatcacttacgaatcttaaagtacatccctttgacttttttacacttatctagcatcaagattgatgtcatatgtcaacttgggcactgcgatgtcaggctaggcgctgggtcatgaatagcctttagtaaaatagtcataactcactcaatattgactgattgatgcgattgaacttttattttgaagctaattcaatgatctatcaagtcatgtctcatacttcaatcaaaattctgaagctattggcaccaaatttcaccctaaatgaattactaaaataatgtctgggtcacccgcagcgggtctcgttgggctctaagaaatggccatcaccactagaagttgatttttactgttatatcatcaactatggtcaaaaacatctaatttgtacttttctcctattttgtgtcctccttcacctataagaggagagctcccttagctcatttttcacgttcaaaaaactacccacaaggtcagagcttttctctctagttttcctttctagaaattggagcttctgacac

SEQ ID NO: 124756 - DNA, 660 bp, Cannabis sativa
ctaaatttaactttgaggatagttttctcatcaattcatctagaaatttcagctagaattagtgttagattggaagagaagatcaaggtaaccaaaattcctctttgtctttttgaaatttggaagaaaagcttagttttaagttaaaattctttggattcgtttcttatggggtagtttgtgttagagtcaaattctaagtttaaattatggtaggttgttgatgtcgtccaatttgttaaacaacaatcgcggtaatagacaggctttgtcgcatccaaatagaggcaaattgcaactaaagattaaaataaatagaatatggtagaaattgaaataaataaaaaaatgacaagtgagagagggttgatcagataaagatctcggtaaggttgaaatatagttatgcaagtcatattctaatatcgatattaatttaaaatacaattacaattttacaccattaattataactggaagatgtgtatgttaaaagcacaaattaattaattttgaataaatttaatctcacttctaacttgacagcatcacatattatttatcataaatcgacaaaatactacaattggcaaaatgcaataaacgatatataatataataaatataccaaaataattaatagcctaacttacataagaa

SEQ ID NO: 124757 - DNA, 718 bp, Cannabis sativa
caaacgagctctatatgtagtatataaacactcttgttgtgttcacattaactcagttatttattaaagttcttttatgtttacctttttaagaaaaaatacatatgacagttaattatgtaggcaagccagataaaaaaagagaaagagaacatcatggtatatttcttatctttgaggcaataaatttctatactaatttcacagcactgcctgcctacatacatggtgtctttacttaagagtaggcattggatgttatgtggctaacaacttttgtcttgcacaactcatgtatatcacattaatgaatatttattagatcttacatgaacaacatcttgcaaggtgctaagagtttgatgcagagagatttgatccaaatggttatttaccaaactattgatggttatttaccaaatgtgtaattggaataattaatccaattgttggtggaactatatattgactcatttctagtgctctgtactattgtctatccatattaatagctacattgttatgcagctaagtcatgttatgaatttctctaaatttgaaattgattatcttaggtgttgtttagcatcgacttataatatattatggagacaaatagaatgggattcagctcaaactaaggagacgtttgattagaaggaatgaaaatataggaatgagaaggggaataggaataggaatagaatggaataaaatt

SEQ ID NO: 124758 - DNA, 2012 bp, Cannabis sativa
ttggtaattaaaatcacataaaagatataaatgttgtccttactttatggagatatttttgtaaataaaatgtcaatttatattttctatgtaataattccattattttttgtgtgttgttttcttcctatagtatatatatatatttttaaagagatcctataatattattttattataaaaattatgtgcaatttgcttcattgagaagaaaaataaaaaagaaagcttctaatataatatttaaacttatatactaaacacgttaacataatagtaattaatataatgcttgcgcagtttttatattttaagatttttttgttcaattttttatttttatattttaaaattttttataattagttattaaattgtgttacattataaatttatcttactcacatcttaaaactagataatctctttaatatagcaattttttttataaaagattcagttgattgggactttgtgggagacttactcaggcttctgtgttttccctctcgattcatcagagggattatgacttgtctaaggggtactagctatcatttgcttctcaatggtcgaatccaaggtagtttcaaaggtaaaaaatgccttcgccaaggagatccgatgtcccctttactctttcttctgataatggattaccttactagattgttgagctactactctagtcaaaagggttttggatttcatcctctttgtaagcatctatgcttgaccaacttgtgttttgcggacgatcttgtaatcttttgcaagggtaatgtcaactcggtgaggcttactcatgcagctttcaccaagttttgcaatgacacaggtttgtcagctaatacgtcaaagtcccacatttaccttggaggggtttgtgaagaggtcaaagcaaagatccttaaaattgttcaaattgaagaaggcagtttccctgtgaagtatctggggatcaaccttagaccaaccaaatagaaggctacagattgtggagttatcttggataagctgaacaagaacttgaactgttgggcaagtagaaacctatcttttgcaggtagggcgcagctgattcactcggtgatgcttggtatttggaattattggatgagtatattcatcatcccttctaaggtaacggcagctattaacaaaagttgtcgtgactttctttgggaaacttcagggaacaagagcaagctccatagagcgtcttgggaaaaggtttgcctccccaaaaaccttagagggataggctttcgggaaggaaaaaaatggaacaaagctcttttggcaaatcatctttgggctcttgctaaaaaggaggattgtttatgggccaaatggatcaactcaatttacttgaaagaccaaaatgattgccccaagaaggaagatgtaagttggtatttcaagaaaattctgagcttaagagattccttggatgaaacgaagctaagacaagcaactagaggtaataaaattagtgccaagagatgctataacttgtttgtggaagttaaccaagctatcaatgcaggagctatatgggataaactagttgttcctaaacataggttcatatattggcagatttctaacacccatttgctcacaagggattacttacattagatgatagacatacctagccacctctgccctgtgtgtgaatcggatttggaaactcatgatcatttattttttaaattcacctattctgttcaggtgttcgaagctgtcaacaagtggatggggagcatccagtggcctcggtcgactgctgaaatggagcttggctgctgcaatataaagcaggacatgactaaccgaatagacaatgttgtcttggctgctgttctttattatctttggaagaataggaacaaatgcatatttgatcttagttgtataactcctagaagcttgagcttgaggattaggaaaattgttcagatgaggatagttagcaagggtccttttaaggattgtaaaagaaacaa

SEQ ID NO: 124759 - DNA, 1073 bp, Cannabis sativa
aaaaaaaaaaaaaattgatagaaaaatttattaaattttttcttatcttacattagaatggtctttttttctattttaagatagaataataattttagcaaaataatagaaaaattattcaattggaatgatattccaatacttttaaataaaaccaaacaaggaataaaataaaaattgtttcatttctattttattacatctaaccaaatgccaactagtgtaatttaaagtagttacaagatttaacatgtttattcaactagataattatacagtaaccatatttaactaaagttaattgagtgatctaagttacattcttcaattcacataaccccataagaaataggtgtggtaattacacttagtaattacaaaatattactattttcaaataattaatgttatttttctttataattactacttgtttatctagattttttgacaattaaagatatgtgaagatttagaactaggaaaaaaataaataaaatggttgagaccgtaatttttacgtggttattagtccatgagtcacttgtatcatgatggagaagataaaactctttctctaataatcggcagcaagcgtccttttacatgtgtctcccatgattctatttatagacagtcgtgaggagtttaattaattaatttaaatacttcactaatggaagaaagtacaattgaagatacagttaagacattaattttggtacatgagcttgtcttgtctcttctactattgatacaacaacttaattggaatgtgtgttagttggtggattttccactcaaggttggtagagaagaccaattgccagatattttgggatattgtcataatgacatgtctacttcatgctccatggatgagttatcctagttcatcagttgttcggaaccatgtacgttgtctgggatcatttgtgactcttgttcgggaccattgtaggttatatgtgaccatttgtgcttctcatgtttgggatcatgtaggttgtaataccctaactatcataggcgtattacgatttggtatcagagccgccaggttgtcttccgaa

SEQ ID NO: 124760 - DNA, 1728 bp, Cannabis sativa
  modified_base (748)..(751): a, c, t, g, unknown or other
tttttttttttttggttttttattagttgtcttgttgttgttttttttttttttttattttaaagagtcacttttatcgatatttttcctttttatatttttttttctcagctgcaactatcaaatatgaaacccactgctgctgagtttaaagctttgaaattgagcagtttcaagtttgacactgattacaattcttacaagagtattcctattccaggacaaccttctgtggttgagagtgacatatctgtcaagcttaatggtttttttgaaaaagttgatggtttggagatgaagattaatttgttgcatacttcccaacagaagatttcatctgatttggttgagtttgtagagtttatttctgcatagtttgtttcctttgttgctcaaatggctacaattcagacacggttttcttctgtttttgttgctaaggtatgttagtttttttatggttgttttctagtttatttttagttgtgttcatctgattttttattgcaggacaaaaggggtgattcttccaatgatgatggtggaagtgataatgaagaagatattgattcagaggacattgaagaagtagatgataatgaagaagaagatgctgcaagtgtagatttgaatgaaggtaatggtgatgaagaagaggagggtagtgacggagaggagagggatgatgatgataatgaagatttcaagtccaaaggaaaagatgataagggcagtgatgatgaatgcnnnnatagtgagaagaaggtagataattggacaatataactaggttttagttactctgtatgtttgttttattttgttgtaagtccatttagttaatggattagtatttttatgttgttgttatgtcgttttatattttgtagtcttttttttgtattaatttgccactaatatccatactcttaatttgtatttcttatgtttttgtaatggttatattataaattatggtgtttgcatttaatcttgatccttttattttttttcttattgtttttttatattgttttttagtttatttgaagttgttttttggttttttaacactttttaaaaagaataactttgtttttttctctttttttgtttgtattttttcattatcaagaattttgttgctttcaatgacgaagccactcaaatagatgtgtgaggctactgttcagtcgggtgtgaaagcagtgattatggtaatgttgtttgtttgatgttttctggttgtgattgtctagatttttttctaattattatttttaagaaaaaaaaaaacagatgtcttcaggtaggcttggtggtgattctagacaggttccgaattctaaaatttttgagcttaaggagggtcatggtgttggtcttgaggtatggttgttttaacgtttttgtttagttgctcaacacttgttgtattaacactgactttatgtttttgaccctatttgtttttatatatatacttagatgggtacaacaggtgtcattgttgattctaatattcaagttgttgaagatcatccaattctcattgaccaaactcctctttttgacaagaggaaatctaagaaaccaatagctttgacatctccctttgtggagtttgactctttgatttcaagttctaaagatggttctggttatggagttgttaagtacgttgctggtttgtgtcctcttgacgataaaattggagaagatgtagac

SEQ ID NO: 124761 - DNA, 1240 bp, Cannabis sativa
tgtcatgtaaactttttcattaagatccccatgtaaaaaggcattatcgatgtccatttggcgaagagtctagttgtcaatggcagccaatgctaagaatagtttaagggtattgaattttgcaacaggggtaagagtttcaatgtaattaatgccatgcacttgagaatacccttttgcaaccagacgtgccttgtatctatcaacttcagcttgttcattgtattttattttataaacccatttgtttccaataggttgacaacttggtggtaaagagacaacagaccaggtgttgtttttcttgagtgcaaaaaaattattattgatggctttcaaccattgtgagaatttagatgcttgtctgaaagtagtaggctcaagttctgtgtaagcatgaaatatgacattcctaaaggcaacacttagcttgtcatagttaagatatttcaccagaggatgatgagttgaagactgcagatgtagtcttttagatgagcaggtgggagagattatcgacctactttggtgattgatgaatgttgtgtgaccttagggagagtatcaaggtcctgtgttgatggaattgcagcaggtgctgctactggtttaggatcagcaattacagttgttggtgtggtatcagtaggagcattggctggtatatttccatcagtagtgtttgatggtgtttgaggagtggtgacaggttgtgttggagtattagaatttatgggagattcggtaattgagtagaaaagaaaatgtccagttgttgggtgtttagagaccctttaagtggaaaaattgctcataaaagacaacatcttgagagtgaaaaattttgttagtggctaaatcgagaagtgtgtaagctttcatgccattaggataacctatgaatattcaagcatgaacccgaggagagaatttgtgtttagtactaactatagatgaagcataggctagacaaccaaaattcctcaaatgctcataagctggtagtttattatgcagcaattaatagggtgttaagtgttgtaataagtgagtaggtgtttgattgatcaagtatattgcagtatgtataagatagggccaataggtcaaggctatagatgattgaaaagccaaggcacaagccacatttaagatgtgctgatgttttcgcacaacaactgaattttgttgaggtctttcaacacaagaattgtatacttgaatacctttttgaacataa

SEQ ID NO: 124762 - DNA, 1529 bp, Cannabis sativa
attaatattaggaaaataatcatattaggcctccatatattactatgtacttttatatcactatgtacatataatcactatgtacttttatatcagctagcttaaggctaaaaaggaaaaagaaaaagagaacaccactaccaaaatatattaaattaatatcaggaatgtggtaaagtaatggtcaaaaagtagaaaaacatgatctcaaacacaatcatatataaagaaaatataatatatataagtgtatagcacgtattatggcgatgatgaaagtgtcttagttttcaaactaagtcattattaattattcaattaatggtctattgggagaaaagtgaagacacccaaatcaaacacaaagatttgcaagtcaaaaaattcaacttatatttataaaccacttaactgatcagttagttagcagttaaacattttactcttgttctgttattttatgtttcaagcaacttgtattcaattctggctttccattataaataaaaaggtaataagctaaacgattggttaagcttctattgacaattctttttttcttttttctctctctttcttttgagtcagctttgttaagggtactgcgaactatgaaaaactttcaacaaaccaacgataatatccagctaaactcaaaaaactacttctaacttcagtagtcgatttttgtgttggccaacccgaacagcttcgatcttggccagatcaaccatgattccatccttatccactatgtgccctaggaaagagacacgcgacaaccaaaatttacacttcttgaacttagcgtacaacttatgatctcgtaatcgttgcaatactgatatgagatgcagttcatgttcctcctctgacttagaataaaccaaaatgtcatcaataaacacgatcacacatctgtccaggtaatccttgaacacccaattcataaggtccataaatgctgctggggcattggtgtgtccaaatgacatcaccagaaactcataatgtccataccgattacgaaacgcagttttcgggatatcttcctctcgaattctcaattgatggtaacctgagcaaagattgatcttagaaaaaaatgcatttccgttcaattgatcaaataggtcatcaattcgggttagaggatacttgttcttgatagtaagcttgtttaattctcgatagtcaatacgcatccgcaatgacccgtctctcttctttacgaacaacactggagcaccccaaggggagtaacttggtctaatgaactccaagttaagtaactcctggagttggatctttagttctttcaattctactagagccatttgatatggtgcctttgatactggttccgctcccggaacaaactcaatctctcggaaaggtggtaatcccaataggtcttcaggagatacatcaaggaatttgcataccaatcttgtattctcaagtccagatgacacaggttggctggtatccaatgtagtgactaggaatcccagacaacctctacacat

SEQ ID NO: 124763 - DNA, 2153 bp, Cannabis sativa
attatttttttcaaacaaaaatatgtctctattaataaattaatagttattggtgttagaaagtgtcgaatttgtataaattttataaaaaagaaaaattattacaaaaattaaatacgagatttaagtattagtctattagatgactgaagccactttataaaaaacaagtacttttacattgtaattaattataaactttttaagttttatgtacctaaatataataataatgattactaatgctatacaattatgtaaatgaaagattaagaaaagaaaacaatgtgatttttgtggtttagacaattaattaggattttgtttcaaatctaaatattatatctgcataatatctaacaaaatctttcattccatcagaacattattttgtgcatttatgccagattgatcattacaaacttactgatgaaactaaagtaaatatggaggttttaatattagaatttagaacatcttattctacaaatttgtctgaaatttctattttattctaatgacacattgaattttatattattaatagggttgaattttgaatctacactaatatgatgtaaaacttcttttattagattctaatccttattttaatttattttaaaagttaatcttacattttagtgcttaaattaaaattcattacatgtaataattaatttaaaatactaacatattacaaaatacaaaataagaataataaaaattaatattaaataaaataaaaacaacataacgctaatttttttttaaacgaacataacattaatttataaaactaaaaagaataaaatacaaaaattaaaaattatgtaaaatactaatttaataaacattaaatgtgattttatttaatttttcttttttaaaaaatataatatttaattaatttaataaatatcttaatttactaagttattttaaaatttgaaattagtagtgatgatataattatcataaatgagttatttggagtatttaatgtaaataatataaaatacgatatcttttaagtaaaatatatttatttagtaagatatttgatgtgatatttgatgtgaattgttgaagttgttgctctaaaagtagaagattttagaagaaattatattgtatacgcattttactttacatgttttaaattttacttttattttcatattctttaatatatatatctacttttaatgatgcaattaaaataaattatatgctagacataagtagagaataaaaatatattgaataactcactcacaaaaaaaagtacattttatggttgttcgcagtgcaggtggtgtagtttttgatcatttttcaaacaaacccgcacatgcaatttttttaatttctcaaaccgcactcgcactacgaaactaaaaaatgcaaaaatcgcacagaaaaaatggtacggcacggtgtagtttctgcaatttggactatcaccaaataattaaactatcacaaatacaacagcttgaacaacacttgtcaaaaatatcataaggcttgaaaataaatatgaaaaaaaaaaattcaagtttcaacaatacaataattagtgggctttgcactggaccttaacatattagacctaaataaatttaaaaaattagtatttttataatatgcagtgcgatgcgatttaatcagcatatcaacaattctaactgtattttttttttttttgcggtgcaatgtgattgtataatataatatgattatattttttattaacagataaaaaaaaaaaacaatactcagcttattctaagattttatactaaattagtgtaagcattttagatggtcttaaggttaaacagtaaacacgcataacaacttgaattgattataaaaccaatccatatggcccatataaatataacctaatttcacaaatgcacaaaaacaataaaaaaacaacaaaaatacggttttacggaattttaaacatttttttacgatttttttgatttacggtcttattatattgaaattttgttcatttgttgttaattttttgttatatgtatgcttttttttattgtattttcatgttatttttatgttgtttttttgttgattttatgttgttttcgtgttattttttggaaaaccgtaaaaatata

SEQ ID NO: 124764 - DNA, 1317 bp, Cannabis sativa
  modified_base (256)..(259): a, c, t, g, unknown or other
  modified_base (1274)..(1287): a, c, t, g, unknown or other
aaaaaaataaaataaaacagaacaaactgaatgatgctttaaacaaaaaaaaaaaaaaagaaacttacaaaaatattgaaaattaagttaacttttacaaaaatactatcagacagaagtttttttaaaaatactatgtttttatataatacaacagtggaacacaaaacagaacaactaaaaacaatagtagaataactaaaaaataacagtagaataagagtgaaaacttaacacaatacacagtataaaactnnnncagtatttttgaaaaaaattctgcaacccccacagtataagagggaaaaagttagaaattttgtggtgtaattattccaaaaaagtcaatttcatggccctttcaaaaaacataaaagaggattgggcctaggccaggcccgacctccctgagcatgccagtagccatttcaaacagaggcaacctgaactttccaagtttaggtctaatattaaaaaagtaactggttatcgagctacatacgttttgttcttcaaaactaacattatccattagtaagttacatgatagggtcgttattttaagcgtaacaggttcactattacaagagaacacaagaaaaagtaaaaaagacgagaaaactaaaatggtattggttacctatcatcttaccacaacaatagtaatagtatcttgttacctttcattttagttccacatcaagcaaataaaagagtaattgattcaattgtgatcatttccagatagggaagtatacaacctccttaaaatcaattttgaggtaaacagaatgaaataatactatgtctccaatactaattccaccaacttgtttttattaagaactttgtgctaggggtgtagatcaattggtttggtcgggttatagtgtatttttactaacccaatataaatattgggttgtaaatatctaattgtaacccgtccaataaaaaaataaaaaaaaaagtctaacccgcccaatgattttcgttagtttggtcgggttaacccgtttaaaccgatttttattttttatttttttttcattgttattaatttttggtgttcaaataattgatttgaaaaaaataaatgtataatatatgcctttcaagattaaaatagttatagtttaaactaatgttaaaaaatagttacagtgacatttgaggtatttgcaataaaaaattatcatcgcaaatacctaaaatgtttctggaaatgaatagtttgttggaatttattttaccaggaccttagatctactcannnnnnnnnnnnnnaacatcctaaatatgaacttctaacacgat

SEQ ID NO: 124765 - DNA, 996 bp, Cannabis sativa
ataatgaaattgtgaaatgttgaggtactttgtatggatgtctgcgatatgcttatctattgatatatatctaacatcaactcttttctcagaaccttatctcttatgaaatgcacatcgatctctgtgcactttgttcgtgaatggaaaactagattgtgtctattgtgttcaatttcaagttccaagagtagggattgcagccatactacttctttatatgtcatagctagagctctatattcagctttagtgctagaatgagccacttatttttgttttcgagagctccagcttaccaagttatttccaaaataaatgcaatagcttgttgtagatgtcttgtcatcaagagagcttgctcaatctgagttgttgtagccttcaatggttaattgagatacacaagtaaatgagattccttctccaattatgcttgcaagatagtgaagtattttcttgcaggcagtccaataattttaagtagaggcttgaaggaatatttgacttaatttatgatatttggtttactaagtgtgagatattgtagggggtttattacactttgatagagagcttgatgttcaaaaacaacactatcttgaaggcttaatttgttgctttgattcataggtgtgggacatggtttagtattgatcatgttggtctttttcaagagatcaatggtgcatttagtttgagataggtgtaatccattatgccctcaatttaactatactattcgattaactccataagtgtttcatcaatttctataactataaaatatgattctaatgcctctattgtatcgatgcgagtcataataattgaagaatataattctactgatgtttctttatagaaagtcacagtatcttatcgtagtgggagggtttctgggaacccaccctgttataacttggatgacactagtgatgacaatctaatgttagtttaaacaagtaatggataattctaacatgaatgaaagtt

SEQ ID NO: 124766 - DNA, 557 bp, Cannabis sativa
acccctagagagggatagggcaaggcagagcgaaaaaggttttctatgagatggaaaatgaaaactattagcccacaggaggtttgtgaataagtgactgtctgctaaaggagtatccatctttctgctaaaacgaaagaattaaaaaacaaagagaaaaaaaataagaagaacgcataaaaagagttgaagtccgggataacattgtagttgttcaaataataagaagtcttgtttagtaatcctttcattccaacttaaagtgtaatatttatatattaaactaggtatatataaactaaaaatatatgttaggagaagaagaagggaagggggcaaggtgcatttacaatttaggttaagtctctttttctttttcattttttttttattttaatttattaactattttaggaaaattaaattaaaattgtaaatacatgtacaccttgtcacaactaacaaaatatagtattaaaacagagaaatttaaaataaccacttgaggctagctcaagtggctataggagggggtgtgtgtgttggaagtcttgggt

SEQ ID NO: 124767 - DNA, 1890 bp, Cannabis sativa
aataatatctttataggaaatatataaagtgagactgttttgttcggatagcataggatagtaacaaatcattcatttgattggaaaatttaattatttttgcatattaaccgaggaattaattctttaaacttatatattttaaaattttaaaaatagatttactttacattaaatctaaaaatacctttcatttttcaaactccacttctgtctctcgctcgattcattgaacaggccctttcaacatcccaacccacgacaaaccaccctgtagacccccaccgacccacgcgcgcaccctgactgacccacggtgctcccccactaacccacagcgcacccacggcacacccccaaccaaatcggacataatgttaaagatgagttcgtgttctgttttttagttttttattgattttgtttgtgatattagtgttaaagatagattttgttagatttagggatagatttaaatttaataatctcagatctaggcaaagtccgatataggtccgatggggtttaatgaatctgtaagtttgcgaggtaggagacgtaggtccgatgggtctgattgtgtccaatgtggggtccgatgaggggggagtccgattgtgtaaatgggagttatgtaaataggggtattttaaggatatcataaaagttgtcatatcctacaaatattaattattatgagtttaggaaaaaaaaaaattaagcacatgtaagcataaaaaatcaaattttcttatagaaaataaattttaccatatatatgatggagtatatgtatgtaataaaattttatcagtttacttattttttttatataattagatgagggagagcagctaaaaaaatgcataattatacacacaaagcacgatacatggggcccacgaatcaagctttgtagaagtgacatgacttgcgcggggctttcctgcttctcattcatgggcttttggtaattttatgagaaatttacatgtggacacatgtttgtgtatttaatcctaataataacttagtttttctaattattaatattaccgctactttataccgtttttaaaatttaatccatttttgttgctttttagaatacactgaatagagggacgatgtcagcgttggatgggacatgcgtcaggaggcgcagagtgcgtgatcacagtttttcaaattttccataattttttttaataccaccttctgtaaacttcctttgtaaacatattttacaaaactgcctcttataaaatatgatacccattgcatttatttttattttttttagtaatttcttagtaatgatgaaaacacgttcatcacattctccctctatatcttctttaaggagataaatcagaagagaaaaataaaggaaacaatgtctgaggatagtaaaagtggaaaatcaaatgtttcaatggtgaggaatgcaaatgatcaatctaattaagaaaggagaaatgtagatcgagcttcgaaaaggatgaagtatgtcaatagtgatgaagagattgtagttccagatagcattaaggtatttataaattttttttttttttttttatataatttttttgtttattttagtttggatcggtgtattgatggttcgattgtttagggtttgctatgtgtttgaattcttgtaagtgtttaggttaaggtagtattgtttttttataatttttttggtttatttttgtttggatcagtgtattgatagttcgattggttaggatttgatatgtgtttgaattcctgtaagggtttggtcatagtgttgtttttgtgattattttgatttatttgctgttttattttttgatttgttagtatttattagtgttttattgaattttaaggatgattata

SEQ ID NO: 124768 - DNA, 1717 bp, Cannabis sativa
  modified_base (58)..(59): a, c, t, g, unknown or other
ttcattgttttagagaattcatatctaggatgttaattcaacatatttgttagtaaanntagatcctggtaaaatattcctaagatgtttatattttcatattatatctatagtatattacttatcacgtacaattaagactaattgtagttggttaaaagcgaggtcaacaataatatatttataattcaatgtttagctagaacccctaaacattttggcgactctgctgagagcgttttctttaaatagttcgtgtatacttatatatcaataaatatacgtatatatgctaagaaaaacgctcaattcgttcacttgaaaaaaaaagggaattctattctctcatctaaacccaaatgtctgtcttcgatactcgagaaccagacagtcggatccgaagataacaacaacaacaacaacaacaataacaataatactaatctgacgaacacagatgaggttgtgtagcgagagggggctgtcgccccccctgaaaaaaattggaaaaaatatatatgtattatagtcagttacaacatatatttgtattaaaagatgatattattagacataatagtaagcatggtgcaatggttaaggtagattacaaataagttaaagggtaaatatttaaatcccactaactccactttactttttctttttaaatttatttttgccctccctgcttttacaaaaaaaaaaattacgctcctcactttaaattttgggtccgccactgccttaatatctaaaatataccattagaatttaaatttgattagttataattctttctattttttcattattaattaatagattttatttggtatatttcttttataaaaaaaattaattcatttatgtataaaagtgagtagttaacttattgtttgatttattttgtatacacaacaaacatgttaggaatgatagttaactattttaaatgtaatattgcctagaagtgagagaaatacagtaatgacaaaagttttaaaatcatataataaattttctataaatttatgtattcttataataattcatccttaaaataggagtcaagcctaatatatttttataatttttaagattaaaatttgatataatttattacttagttatcattaaataaaagttataatttattttataatacaatttaaaatttcttcaacatccgctgcaatgcgcaggttatttactagttatacataacaaaataaaaagtaaatatcatttaagaataataacataccatataacaaaatagaaatatactgtacaacaaaatttatatacaaataactcacaacaacccataaaaaattaaaaaattgatataactttaaataaaaaggattttaacaaaagtaatatagatataccataatctttaagtaatttgcttctaattttaaaaaattaatttttttatgtggcaaaaaataatataaataataaataatgtaaaatagtcatttctctacaaattttaaaaaagaacatatctactaacataatgctatggtttgagttcatttgctatatatatatatatatatatatatatatattgtggggtttagaacacttagacaactaaccaactattttgacagttgacagttatttcggttagtgtgtgtcctaactaacctactgttataaatagaaactttgcaacaaatagagagagagagagaga

SEQ ID NO: 124769 - DNA, 1882 bp, Cannabis sativa
accttcccttgagaacttattttgcaaacctggttgcgaaaattgggattgcacccttgcagttgattctctcatcatacaggctcttggctgggtggtacgtgctttacaaaatcaacaaactaggggttccctccccagaggagatcctttacttttatagtgtcaaggccaacctatgaggaccaataggtcaaagttggggttcttctgactggataagcgcccgaattcttactggcctatttgccaaatggatcgcactcatgacctctaagaatattggttcttttcttccgggtttcctaccagttaagtgcaatctcttcagttaagcttccaacttcaagtattctaacaattcacctagagttctgtttacttttaaactttgccaatttttgtactcgggctgacattttttgatttatggcagagcttccttctcagtgtgctaggacggaggagataaccaagaaagaagcccaatacagggccttttcggaagaccaattgaaggttggggacctaatgacaactaaactcctctgcaggtctcacttgatcataaagtttcagagtattgacacagttagcctccgagggcagcaccaacctcccaagaaagtgaaggaggaaattgccactgatttggctgttataatcacaaatgcggccaaaaacaacaatgccctgaactcagattgtatgtcacgccatcttgatcctctgcctgaggaagaagatatttcagagagattttccactgcctaccatgatgtggggaaactaggtgccagtacttcgggaagaggtaatggacccttccgcatcctctgtactcccaacttgagtcgcgtgtcccagaggacttagggaggatttaataaatatttcctaggcataaaccgccatagataccccaagaaggattacatagacagagtataccaaatagttaggagccctagaaactcggggactccttcggacattgtcaaagtagaccctttgatggttatgtctctgcctgaatttgaggaatatgccaacttcattggtcatgggagcattttagctttcgcttgtggacaaccctatagcacttcactgaacggtcacacccacatacaagtttcttcactagattccccttcttgttgttgctattttttcttatgattgcatgacttgcaattgctcctcttatttactcgtattgtcatcttacgtgcagatactccagaatctgcgatgttgaagtcttggaatgaccagatctcagctgccatggatgtggccaggaaatcctaggagaaaggcaagaggaagactaagccagggcttcaacgactcggaaaccacctcctccctcgacttcctcattggtagatgtccgagagatttctcctcccatcaagactagacttgctgtaccaggctatcctacttcggctagtggggagaagggacatggcacctcccagaaagcatctgaggttctcgccgctctgggaaagtagtcctctcaaatcattcccccaacaagagagataatcttggatgccacaccaaacgcagagggttctgatgatagcttggatggacttatctttcccccaaaggggattccaactaagtctaagcgcaagggatcaaagacttcccctgatcttagtgcaaagagggttaagtcttcggtcccagacccaagggcaactgatgcactgtcgaccaactcgccattgccacaacaacaacaataatagcaccaacaacaataacaacagcaccactagcaataacaacaacagcaccaacaacaacaacagcaccaacaacaacaacaaccacatcaacaacagagagagagagagagaga

SEQ ID NO: 124770 - DNA, 1019 bp, Cannabis sativa
atttccgactcgattgcggcggcgctctctctgtcaatccagccctctacagtttatatatccaaaggaaaagaaggccacataacaaaatacagtaatttatgcaaaatgatttgcactcacttcactttcatcaaccaaaaactctttccatcagatacagaatacagtattatatgatagtgattttttaaaactgtaaaaaaatatgacatttcaaaatatataaagttatttataaattagtgaagtgatttagttaatgacataagtgtaaaagaataataaaaatatgattaaatattaagtaaaagtggtcattgtttaataattgacacttgtcataaaaataaatgcaaggtgtaaaagagagtgtaagagagaatctctttaaaatttctcataattaagagaaatactaaaaggcaccagtggttctaagaacgcatttatgtatcaatattgctataggtctaactaaatattgagtttcatatagtttaatgtaataatttttagggagtatcgctagccaatcacaaagcgacacgtctagaatatactaagtactactagtgcccaatagcaatgctctgtaattaaatactgatcataggagtaagtatattttttttgtcacgatcactttattgatcataaaagaattacatcaacaaaagaggggtctcttccatctaaaaaagctcattatttatcctaagggcatgtttagccaatccatgagctgcaacattgaaattgcagctaacatgagaaagagatgccccaggaaaactagataataaagccttaatgtctgaaaataaaacacctaaattcattatagtacacagaaccactatttagggcaaaaactagtgacaaagaatcagagaaaaaaccattgatattgagtccaacatccagagcccatcttaagcctaccaacaatgcaatcgcttctgcttgaaaagctgataaagagcctgcaaataaaagcctcttataagcatttaaaa

SEQ ID NO: 124771 - DNA, 1080 bp, Cannabis sativa
tccaatccaattcaatccgcacaaatgcggatatctgcactttgcggtattttatgaacacccctaattttgtgtttgagtttttgattttaggttttctttttagtataattcaattttatttaaattaattgtattattagttttcttcttttaaatttaaattgatttgttagtttaatttattttgttttagagtaaaatgatgtggctatttaataaaaggatgtggcattattttaaatgacgtgtcatgcaatttggtagccagcgtgttagaaaacggagaggtagttacggaacttctaaaagtgtgacagaaggtatttttatcgccaaaattttcacttagatattaaacagcaactgaatgataaacttaggtatttataccgcaattactctataaaattataatgttgaatattatatttaatttttattattattaattttaatttatttataattgataaatttatatcttattattattaataataaattaaaaggttttttaatatgtcgtatcgtgcttttcgagtttttcgtgtgtcgtgtttttctggttagtctattcgtatttacgtatcgtatttttcgtatttttcgtgctgtgtcgtatttaaaaatattttttttttgtgctgtgtcgtgttaatttatagtatcgtactgtgtcatgtctaagcttatatttttttgtatttagtggtgctcgtacttttatactcgtgctaatttagtgttgtattaagaaactcaacctatatttataacactagttttagatggaaaataagactaattattatgcttcaagttagaaagtccaatgtgactacaaatggatgcagtagaattttcgctccaatgtagcactataattagtttagcatatatgcactatatatatattacagcatatatatatatgctacggtttatatatgcatttatttttttagtattatatatttacggaggagatttcaatggttacatcaaatatgtaactatcacggttacatttatttttaaccattagatcattattgaatggttgtgattaatttaaaa

SEQ ID NO: 124772 - DNA, 775 bp, Cannabis sativa
ttttgacaaaaaatcagtttagggtcttatttgtactattttagaatatacagaatctattttgtcatttagcaaaactaatgatctaatctttaatttttataaaacacaagattcaaaatactatttactcttgttaaaataataattctagtgctttggtgtaatggtaaagttttttaaaattcttaaaaagttcaaggttcaatcctttatagctacacattaaatatttattttaagaaaataagggttttcatttttttacacttaaaagtaattttttttctacatttttatagaaatccatataacaaaatcacaaataaaatccacataacaactcacgtacaaaaaattggagtaacccaaacggtaaatttgaaaagagaaaaaaaaaattaaaaaaaataatatataaagtaattcttaaaaaaaataataaaataaaggttgaaaattgatctctactttatctatagactaacaatttttcttttcacaacttcggggccctgaacgtttgtgggctcgaggcgcacgccttgtttgtctatcctcaaggtcggtcctgattggttgctacatgagttacgatgtggatttaggttgctcgtacaaaaaaaaaaacctttaaaatgtataaataaaaaaagtaaaaaaccccaactgagtctcaaatggtattatcattttagggctattttcaaaaatatgggaaaaattattaaggttatgataaatatggcataaaaaataaataccactaaatatg

SEQ ID NO: 124773 - DNA, 528 bp, Cannabis sativa
aatagaatgtgaaaaattgagaaacaaaaatgttaataccattgaaggagttcagacgagagagagttcaaacgtcatccttgtcgtcatcattggagagagagaatgggccgccatccttatcaaggaagagacaatatgatctctcttccttgtcgagggagagagagaatgattcgtcgtccttgtcatcaccgtcgacggagacgatgttggattatctaccctaaataaaacctattgtaatataattagatttactaattaatataagatcataaatcattttatgttgcatggttcatatgatttatttcatgattatatgtttaatgtataaattctattaagtttaggacatatttatttgttcatgattatagtgtcgtcagcacagtgaaatataatcttgattatatgttcaaatgtttaagtcctatgatttgttagttcattggatttagactgacattataatcagcgataaggtatacttacaccttagataagtgtcatgtcctttccagg

SEQ ID NO: 124774 - DNA, 2759 bp, Cannabis sativa
gtgtgagagtggttttgtcatgcagtctgctatttgatcagctgagggaatgtatctcacttcaagtttcttgttcaacaccttgtctcttacaaaatgtatatcaatctcaatatgtttagtgcgagcatgatagactgggtttgaagctaatgcacttgcactcatgttgtcgcaccaagttataggaggagcatggagaggaaatctgatttcattcagcagagactcgatccatgttagttcagcactgacttgagcaagggctctgtattcagactctgtgcttgaacgtgacaccactgattgtttcttcgaggaccaagagactaaagactctccaagataaacacaatatccaccaacttatcttttatcgtcaagattgctagcccaatcagcatcagaaaaacccatcagatcgagcttgtcacagtagctaagatgcagaccttgtgtactggttcctttgagatatctcaagattctctttgcagcattccaatgtgagactgtgggagccttgagaaattgactcaatgagtttacagcataactgatgtcgggtctggtgtggtttaaatactgcaatgcaccaataaggcttcgataatttgttggattctccatcaatttaccatctgtaagagaaagtgatttcccagtagcaattggtgtaggacaaggcttcaaatgttgcattctgttcctctctaatagatcctcaatgtattttgtctgtgtgagatagagacctgttgcatctctagcaacttctatgccaagaaagaagtgcaaatttccaagatccttgagagtgaacaatttgttgagtttttcaatgaaactgttcagattggtgttgttgttcccagtaacaataatatcatctacataaatcagaactagaatgatgctcccattgttgatgtaaaagaagagagatgtgtctgcctttgagtttctaaagttccaagcaagcagagtgttcttcaatttgtcaaaccatgctcttggagcttgtttgagtccatacaatgacttgagtaacttgcacacatgatcaggtctgtttgggtcttcaaagccttctggctgacacatataaacatcctcttcaaggttcccattcagaaaagcattgttgatgtcaagttgtctgatgtcccagccctttgacacagcaatacttaaaacaattctgactgtggaagctttgacaacaggactgaaagtttctccataatccaaccctgctctttgatgaaatcccttttgcaacaagccttgatttgattctctgaaaagaaccatctgcatttctcttaattctgtgaacccacttgcaccctacaaggttacttgcctctgatctgggaacaaagatccaagttctgtttcttttgagagctgtaatttcttcattcatggctccattccagcctttatgctgaagtgcttcagtaatgttcttttgttcttcaaaaacaggtgcccacttggcttgactgagatatgtttttggtttaaaaataccagccttcgatctggtaatcatgtggtgaattggaacagcagcactctctggttgctcatgaactgaaggttctgtaccagtatttggaacttcttgacctgaaacgtttggctcttcattgtgaagctcctgctgtacagtgaaattgtctttgctgatactaatagtggtgctgtcaggagcaacaaggccatgatcaagtgagtcaaaatcagatattggtgagtttgaagaatttacctgattagatgaagatgttgttggtgtactggattcagtggaggcctgagatggtacccgagtgttttgattagaggtgaaatgtctgaagtgaaaatttggaagttgagaccatgattcattgtgaataatgagttgtttttctggtgcttgtgtgttcaagaaaccagattggaaagggaacatattttcattgaacacaacatttctagagatataaactcttcctgtggtgcttagacatttgtaccctctatatgagtcattgtatcccaggttaacacatctaagtgagtgaaattggaatttatggttctggtaaggtcttatgcatggataacaagcagctccaaaggttttgagttgcttgtaatcgggttttctaccaaacagagtttcaaatggtgttttgttgtgcaaaataggtgttgggagtcgattaattaagtacactaagttttgaaaagcatctacccaaaacttaagtggcacactagcttgagcaaggagtgttagccccatctcaactatatgcctgtgtttcctttcagctctcacattttgggcagaggtgtgaggacatgaatgctgaaagtgaatcccatttgttctcactaattgttcaaacacttgatactcaccaccccaatcacacttaatgcttttgattttagtgttcatggttttcaacaaaggctttgaaatctgtaaaagcattcaatgcatcagatttttgtttcaatggatataaccaagtgtatctactaaaatcatccatgaagtgtatataaaatttgaagtttgtgtttgatgcaataggagctggtccccataaatcagtgtgtatcaattcaagaaccttagatgctctaaaagaagacaacttaaatggtaatgcatgtgacttgccaaattgacaagcttcacagaaattttccatttcattctttgaaatttttacattgtttgactcacagacaag

SEQ ID NO: 124775 - DNA, 682 bp, Cannabis sativa
ggggccgcgtagcagcacccgccgttggctcatcatctaacattgaaggaaacacagcgtcttcagaaacaactgcccgtgctctttttcaacatgctacgtacagaatctctaacttgggcagtttaacgcgtgaaaggctgcctggttccagaggaaatgcctggagaagctgtggtgcgtggttcactgataaccacacctttgcttccacgactatgaggaggagggctgggaggagacaaagcaatagtttttcctttgtcaatgtgggttgtaacagaatcagtcataattggtggggggatggtagagtgggccaaagatgaaggcagagaaactgaaggatgggtgaaactgatagatacagcagctggatgtgaatctggacgcgagacaggggaatccactcacaggaattggtcaacgtcttgctgtaagctttggtcatcagtcctgatgcgaggaaagtactcctcataaggaatagaattagatagctcaaacgggttccttttatgctgggcagatgtagtggcacggagagattccttgtactctaaggcaggaggaacagggaaattatcacaacgcagaaggtacttggtgcatttgttgtaggtgtgatcaacaagaccacaaaaataacagaaattggggaggctttcgtacttgaaactga

SEQ ID NO: 124776 - DNA, 1021 bp, Cannabis sativa
gtcccggtccggtcccgggtctcgagttctgggtcctagttgggatctaggttcgggtctgggtctcgggtccgggtcctggttttggtctcgagttagggtccaggtccaggtcctgagtcaaggtctgggtctgggtcccgagtcatggtccgggtctccgtcccgggtcctgggtcccgggtctaggtccaggtccaagtcccaaggaatccgagtctggggtctgagtcctgaattaagtttttttttaaataaattgaaatcgggtcggatcagatccgatccagaaaaaaaattaggcggggcggagcggatctgatccaagatccaatatgtatccgaatgtttcagatcagaagtgatccgttacatcggagctccaacccgttctaactaaatggatttttataacatgcctaaatatgagagtattttttttattaatgagtacaaaaaagaatttttagcataggtccaataaagaaggctgaaatgaaatgggccaaaaacttagtcctaatagtgttcggtaagaatataaatatataaattattacaatcaactataagtaattatcaattgtaatgtgtatgggatcgaatatgaaccaaaggcatcaaagttagagacttaaactatgtgcaaattgacttaatttgtacttaaaaaatttcctatatgtcgaccacctaacaagttgacttatttcgatctgttcacacttggagaagagaaattatcactgttctttactatatatggaaatttcagtttttatttatataaatatttatattattaaatttcaggccaaacatgtataaggcaaaagatttagaggacatttgcttgaaagaaagaaagagcaacttagtgaaatgatagtatgttgcgtttcgccttttaagtagcttgataaataataatgaggtaaaattattacatattattttctttttgtttctcatttttttaattgtttccacgagaaataaactgttacttttagtgacaact

SEQ ID NO: 124777 - DNA, 1226 bp, Cannabis sativa
gaaaacatagtaatcttttaataggaaatttgaaaaaatgaaacaatactaattagttcttcacatttttcattccttctagatcgtcatttggattttttattttttgaagtttaccagtgacattttggacaaactttcatgttcctacaaaaataaatatagatgagaatattttacctagtttttaagttagctatatatgtcacaagttgttgatttcttttagagagattttgtatgttattggttgataattttgtgctggttgagtgccgcccaatgatgtattgcaaatagctataagggatggatattactttgcctatgcagtaatggaagttaagttcatatgtttaccaaacaaaggaagaataaatgagagaaaattaaagctgtaatctttgcataagtcacttgaaattaaactgaaaaaacttaaatgatatgatacaaacttctctttctcaagcaagtcaaaccttgcagtttgacatggcgaaagcaagacaagaaagagaaattccaaaacctcatatattattgtatctcgtccagagccatgcaccttcttcatcgattattttttcagcctcaaacaagagtttctaagaacattcttttgaatcatcacaaataaggaggacaaaggagtaggcaaaatttgaccattattaagtgataataacttttccaaataaattgaattttattcaaccttgcaaacatataattcggacaaggacatgaaaaagaaatttgaaataaccaatttcagttaaaacattcaacaagaagctcaatttaaggaatcccgaatatcaaatctctcctacttgattggcccattagcaatcttctctttaaccaaacctgatgaatttgggatggtttctgaagaagttgtctaaagcagccttttaaatcaaagtttaaaatctgccatttaaatttgcgatggtgattgaaagaacatactgattaggtccatccaaggatctctggaagggtaaaatctgccatttaaaagaccaacaaatctataagagaaaaccattcaaaagaccaaaactcatccaaataataaaataaaattttttgaatgaacctaatttcgaagagaaaactcatgcaaataatcaaataatctataagagagaaaaaaaatacctgcttggtggggaaaaaatctactgagcacaaggacgaaactcaaaatcaaccca

SEQ ID NO: 124778 - DNA, 831 bp, Cannabis sativa
aaaaattaaacaaaagaagtcaataaaatccttacccatggcgggaattatgagacgaggaggaaggaacttggtcccgatccagaagtctagagggtcccgccattttcgaacgaggctccatgggggaatcaagagaagggtaaagaaagcaaaaccaaagcgatgaatctaaaagaagaatgaaagagatgaaaacatctataattgggtatgggtagggctcatagttgttgttggatcgaagaaaggggaaatgggattgggtattttcatggtggcaatttcatggcaatattattcatggaaggaggaaagagcagagagagagagagagtgttgagtcgttgatcttctctctctcgtggattgtacggccaccaaggttagatggaaaatggattaaggaagacgactacaataaaacaagtcatatattatattaattaataattaattaattaattttattaattattgttgaatgactttatttattttaactcattttatttggaaccaaaattcacttaaatttagtccaagtggagccaccctatacatggtcttccctaagtgttttctgatccaatcaataaataatgctaagtgatactcttgtaaatatgagttagcattatttatgtaacacatggcaccacctaaaaaaaatatgaatttaacataatacgacacgaaaaatataattcaagcacgacaagcctaaaagcacgatacgaaaaaaatataaatttagacatgacatgacacaaaaaatataaagagaaatttatatggtatactaacttttactatttttttacaaaaata

SEQ ID NO: 124779 - DNA, 1008 bp, Cannabis sativa
aaattaaaagtcacccataaatttctcaaaaactaaaaattttagttatataggcacactttatatagaatagatttcgtgttagaatgcggaagtatacggttaaggtagtagaataggtgagtgtatggtaaaatacaagaggtttcatatcaaaattaattgacaatgaaagaaatagcgcatgtatcttatatatatgatatttaatttcaacacataatcaatatgaaattcttcaacaatcagtccaatccctctttatatcatatgtttccatgcatagggtattacatgcaacaaataagtttgcggtatgtttacttacattacattctcttgttgtttatatgttttagaatcattttttataaatatatagtggttgaatataactcaattcaaacggtattgtgtaataaatttttttgacggtgaatatataaatgaattcttatgttttagattcttagtgggactttaattaacttaatagctcatttaaaaatgttaatagtagtattcatatactttgtcagctaaaattaaacattatactaagtgaactatgagaattgtgggtgatgcccaattctcaaagtatattagtaagtactttgaaattaatgaactagtattttaatgaactagtagttcaagggaggagcgtccccttgtgcgctttagtgtttttctggtttaatgaaatttccctttgagcaaaaaaaaaaaaaatactttgaaattaatattttttttttaataaaagaatatatgaatataaaataattaagaggttaaattaatatacgtttgatattttgaatgaggtggcaaaatataatagaacagggatggacacgaatatagggatagatgattttttttttcttcgtaaattacaatcttttattacaattttttagacaaccccctcactcaaaatcacatgcgagaatattatttaattttttatagtggtatttgttgtagttttttttttttttt

SEQ ID NO: 124780 - DNA, 1169 bp, Cannabis sativa
cataaaacccaacactttcttccctttaggcacccttaccaagtcatatgtgtgattctcatgtaaggatccatctcttcttgcatgtcttcatccactccttcttatgctcaagtagaattgcttcttgataagtttttgactctccaccattagtgagcattacatactcatgaggattgtatcatgaagttagtttacgctctcttgtggacctccttacaagagtctcaactggtggtggaggtgcttcttgatcctgttcagttggctcaccatcatcatcaactgtaggaacatcatcatcaatattctcatcacaattttcttattcatctgcttcttcattgacatgctcttcatggttttctattcatatcccccatgatcactatgcaatattggtgaaggacctgagctagtactcacatgaacattaacatgggactttttcttttgaactttttcactatcttcaaacatttgattttcaagaaataccacatccctacttctaataatcttcttgttcatgggatcccataatctatacccaaactcttcatgaccataccctaagaaaatacatggtttttctttatcatgaagcttggatctctcatctttaagaatatgaataaatgctcttcacccaatgactctcaaatgaccatatgcgacatctttccctttccatactctctcatacacatcaccgttcaaaagaactgaaggagaaaggttaatcaaatcaactacagttcttatagcatcccccgaaaaatatttaggtagcttggcatgggaaagcatacacctaatcttttcttcaaatgttttgttcattcgttctcccacactattatgttgaggagtttttagaactaacttctcaaacttgattcaatggaatctacaaatagtattcaaatggactcatatactcaccaccattatttgctcgaacacactttaaattccttccaatttcaatttcaattttggcatgaagttctttgtaagcattgagcacctggtcttaagatttcaaagaaaaaatccaaacttttctagaatggtcatcgataaaagtaacaaaattaagtgcacctctaagagttctaattttcatagtacagacatcagtgtgaatcaaatcaataacatta

SEQ ID NO: 124781 - DNA, 2994 bp, Cannabis sativa
ttcagttcctccccaccaaaaacaggccatcatggactcgatcttagaatgaaaggaggctggaaatttgaaataagacatggcatatgaaggtatcgcctgaaccacagacttcaagagaacttcttttcccccttttgagaagtgttttgagttccacttgttcaagtgtgaccagactcggtctttgaggtaattaaaaacctcttttttagttcggccaaaggtttggggcaaacccaaatatttctcaattgaatctcgaataggaatgcccaaagaggaggtaatgtggtttttgatgtcctcattagtgttcggcgagaaaaaaagagatgatttgttataattaaccatctggcccgaggctaaactataatcctgtaaaatatccttgattgtggtagccgcatttggagaagcaagactgaagaggagactgtcatctgcgaagaaaagatgggatatgactggggcagtgcaggaaatcttaaggccaaggccatggttacgggaattagaatgcaaggtcttctgggtaatgagggaagagagaccttctgagcataggaggaaaagataaggggaaagtggatcaccttgacgaattcccctagatggtttgactcttcctaaaacctgttgatcgatagagaaggaaaagataacagtcgaaatgcaagccatcacgaggttgataaagcgatcagggaaagcgaacttactcattattttcctgatgaaaccccattcaactctatcaaacgctttatccatatccaatttaatggccatccatccggtccgcctagttttacgatgggttagagcatggatgatttcttgccaaataatgatattaatctatcaggaagaaaaacactctcagtaagggatataatgcggctgattatgggcttaagatgatttaccagtactctagatatgattttgtaaagagtcgtacataggttgatgggacgatagtcagtgacttgttggaggtgagaatgtttaggaatgagcataatgacagtattgtttattgcaccaatgtttgcatccccgttcaaaaaaccttttgcagccaagagaacatcttgcccaagtatatgccagttttttttggaagaaagtgccattaaagccatcagacccaagggctttatcacttgcaagttggaaagttactctctttgtttcattgtcagtatagggacaattgagggactcagcttttgactaagaaattcgctcagagatgccaaaaagaatgcagtaagtgagctcttcatcaggattctgacttgcaaaaagttgatcaaagtaatgctcaatagtgttcacaaaggagtcagtatatttggctctagagccatcaggatgcgaaagagagataattttgtttttcgctcgccgtgaggaaaaaaattggtgaaagatgttgcggtcgatagaatatcgtgcaatcttcaggcatagctgtgaaacctcttaaagaaagggacatagtctgcgactcagcccaaattatcaatcggtaaatttattcctattgtatttttcggtataacatcttatgtcttggatgtgtgagtcatcctatctaatatatgtaagatccacatatgagattaagtcttctcattcgagatgtgcagatttaagtcatccaaaatagagtggcaaaatgttttatcgtatcatatttgtgtcatatcacttctatatttcgtgtcaggcatgtcgacttattttttgactcagtgtctaattttctcaaccctaacccaaattataaaaaattgtgtcatgttcgtgtccacctgctatgacccatttttctattattgaagcttgagttgtagagaaaattgatagattaggttccattagaaaacttatatacatttatgtatatatagtttgttatatatataatgaaaattaaaaattttaaaatattttcaattttatttcatattaaaattaaatttaaaatttcttaattgaacattgaatcactaaatatatatttttatatatatattattattaataattttttattttattatattttaaaaaaaatcgtgtcaaacgtgttaaatttgtattaagtgggtcgtgtagtgtttgactcgtttttatttcgtgtcaagtcgtgtcgatccgttttcaatccacgtctaattatcttgaccctaactcataaaattcatgtcatattcgtgtttgtgtattgtgtcaaaaccagttttttcgctcctagtccagaatatatctcttccatctagatgtataactcatttatatcatatatatatatgggtgcactcttaatgagtattacccatgaatgggtaaaattagaaataaattgagtttttatgcttaatttttctatctaattagaaaaatctctcacttttacatcatatgggctgagattactccatcagttgaaaaaaaaaattaaaaaaaaagataagcaaaagttgagcttcacttaaatatttttgtatagcaataccagcggagccaacccgctggtattaattaggttactaccttcagaaaaggtaatccgccagtattacttttaaaaataataaaaaaaaaatatttaataaaaaaaatattaatatcagcagaataggagtattgccggcggaaattccgcctctaattctttgggcgggaatttgaccgcccaaaatttaaaaggactattaccgaaagattattaaaggcgggttccgccggtataagtagggcaatctgaccattttttttattaccgacggaacccctaataataccagcaggtcccgtcggtaattaaactttataaaagaccaccccttcactctgaaaacatttttcatttctcccccaaatttttccccacccgattactcccatttccaccgcccttttctcttctcctcctctatctccggccatttctctattttttaccgggattgcatc

SEQ ID NO: 124782 - DNA, 889 bp, Cannabis sativa
aattgaggtctgtttcacaacaggagagaaaatttcattgcagtctaccccttctctttgagtaaaaccctttgccacaagtctagccttatatctcttgcaatcagcagaccctcattttctctgaaaatccatttacaactaatcagtttacacccttctggttttctgacaacagtccatgttttattcttcaacagagactgtttctcttcatcaatagcctgcaaccacttatctttgttcttgtatttatggcctcatcataggttgtaggttctgcattctctatttcactggctatagttagagcatatgcagtgtagtctacaaatccaaacctagctggtgcccttgattcccttctcattctatctctggcaagttgataggtatcaagtgagctatcttggggctgatcagtctcttcttcatgttcctgatcagtattttcacttgtttttgcatcagttctgacttcaacatggacctatctagcctcaatgctagtctcagctttgtcttctagtttcatggccattaccttctcattaaaaattacatccctgctcactatgcatttcttgaaaccatcttctaaacaccagagtttataccctttaaccccatcagggtacccaagaaacatgcacttaattgctctaggctgcaacttatcttgtttgacatgcacatatccaatgcatccaaatactctcagattctctagagtaggaacctggcatgtccacatctcttgaggagttttaaactcaattgcagcagatggactcctgttcaccaaatagcaagttgttttaacagcttctccccaaaactttctttccaaaccagcacccttcagcatgcatctaactctttcaataag

SEQ ID NO: 124783 - DNA, 1177 bp, Cannabis sativa
taaatgatcacatgaaccaaaaatgacatactaaataagtaatgaaaataattctctttctttaatgataattgaatagaaaagattacattgaaatagagtttcagttaaggcacaaagcccaacattcttgtatgtccttggcctcatgcatgtgaaccgatttcatattcagccttaaggcgttcatgtaattgattttggcgtattggccctctattttcgaacactactattatttagccttaaagccttttaacatggacttttgattgtcctcgctatcttattatggccttgacatttaagtgtccgtatttacttgtcaagccaaagtatgcctgcacttgacttagaggcgagtttcgtagcttattctaagcgttaaatttctctatataagttctacgtgccagtgcgatgcattgtatggtgtaggtgctccccatgtaaatgcgtagagttacagtctcttagtcacttacaattcacgaagtttgatagaccttgcttgggaattttcttggggttgtatttggtgtacgagtgtggaactagaaaagaataactttaagaagttatctttgtaagcaagtggtttagacacagttggtcttatgtgtaacaaaagctttcagcttagtgcctgcttttgaaatcacgtattggctacccttgcacggcttacaatgcaacgaccaccatttaagtgtgatgggaagcctgctggaaagaaatgggtactagctcttttatgggtccatgcatggtgaaatgttataggaactaattgacaagtggctagtgagagtacttaccgagatgttccctatttcagtgtttaggtaaaagttccaactccatgttcttgttgtactcgtcagacttgtatgcaccattattgttatctagtaacatcgtgcagacattttttagttttgttcgaacatgattgttgcatgatcttagatgtctagaatatccttcttggagtaaatctcttacaaagaatttctttcctcgatctgtttgttgaagggtgtggtaactctttattggaagacatgctgctttgagtttgcttgttctcttcttctttcccttttattagttaagcctacttttgggtctgggtgatacgtatattttgggaacatgatagtatgatttagtggga

SEQ ID NO: 124784 - DNA, 1142 bp, Cannabis sativa
accgcttgtgggtaaaagttcactgtactacattatgggctacaaagttataagctctactaatactagaaaaaatacaactaataaaaaaggaaaagatcctattataaaagaaagagtagttattaagagcccaacaagactccttcccattgagagtattaataaccacgttagagtcgttctccacaataatgaacttgcaactgtttcgtttagctgcttccaaagccaagcagcagtcagctgcttccccacacaaaatatcaaaaaacgctaaccgacccgtttgaacccaaaccacctcgctgagatggtttctagctaccgctgcagtgcacatgctatccagaccaactttaacataacagtttagtttgtgccaattctggggaagagggtaccaaatttccaccaagcacggagcaggattagggaaatagaatcatggtgatctgcataagagttatgaatagagttaatacattgttgcacattgtgtagtttattattgttgttaacgactagaactcgtcaacaatataatgaagatttggaactattacttaataaaaaaaaactaataaaagaatgtctaaagtagaaatctcaaaagcatttctattcaaagaagaaaaagcctctctttacaatgaactcaagggctctatttatagtgaacccttaacactttacaattttattagatcccaattcatatgatgtgaagtcactttcacacctgatagtattggattgtaggtggtctgatgtacctgacaccctacgttatactaaaaatacccctgtcattttgtacactggacgaaatgaactttgcccccattatcgttactcaccgtgctgttgttatcttgtctgatactccttacttacattgttggtgtcagtagtgcaaagaagatcgatggggtgcaggaagccaggcgcgtagggatgcggcacaggcacatggcacagagggtgcatgcaaggcgcgtgagtgcatggggcttagagggcacgtggggatgctcaagtgcgacgaggcgcggcgtgggcgcggtgcaggcacagggcgtggcgtgggtgttgggttttataccctaaataaagctccatttcaatgtaatccattttat

SEQ ID NO: 124785 - DNA, 979 bp, Cannabis sativa
agtttgcttcataaaaattaaatgtgactcttgcatggaagttatttttagtgcacggaagatcactaggggtacgacacgtcttcaaccctccttcccagaagagaaggactgcttgaagtctatcacacacccagtgatgtttcagcctttggtcattttaagcaaagtcattgattgaatttttatgcaactttagccttccttcatggaagttgaagtttgcttcataaaaatttaacatgactctcgcatgcacgttgttttttgtgcatggaagatcactgcgggtgcgacacgtcttcaaccctccttcctaaaagagaaggactgattgaagtctatcatatacccagtgatgtttcacccttttgtcttcttaagcgaagtcatcacttaaatttttatgcaactttagcattccttcacggaggacgaagtttgcttcataaaaattcaacatgactctcgtctgcacaatgttttctcttgcgtgaaagatcactaagggtgcgacacgtcttaaaccctccttctcgaaagagaaggactacttgaagtctatcacatgcccagtgatgtttcatcctttggtctttttaagaaaagcaattgcttgaatttttatgcaactttagccttcccttaaggaagccaaagattgcttcataaaaattcaccacgactctcgcacgcataatgttttctatgcgtaagagatcactggaggtacgacacgtcttcaaccctccttcctggaagagaaggactgcttgaagtttgtcacacacccagtgatgtttcaccctttggcctttttaagggaagtcatcaattgaatttttatgcacctttagccctccctcatggaagccaaggttttgttcataaaaattcaacatgattctcgcatgtgttgggattttatgccctaaattaaactcatttcaatctaatctgatttgttatcaataaaaga

SEQ ID NO: 124786 - DNA, 965 bp, Cannabis sativa
tatatatatatattgattagtaaaagatgttagtaattgtttatgaatgtgaatgaatgatagttattaaaaatatagtcattggagacttggtttattcatttaataaggtgtataaatggttcaaaatcaagtgcaagtgatttgaaacacttttgagaagaattgaccaaaactgaaaaaatagtagccagtaactagttactttttttttttcaacatacaagtgcatacgttttttaaagattgggagtctttctaatagcccaaaactcctccaaatcatccaattaataccacaaacgcctaatttatgatttggtaacatccaaagactatggtggctgttcatgttgatatgggagtaaaaactctatatatagaggccatattattcacttgtgagagatgtagttgatatatttgttaaggttagaaccttgtgggcatatgttcatccttagacactaggctgagcatatgaagcttgataaatccttaagagcatttctagagtttccctaagtgtccatatgagggaagaaatgacttttaggacaaaggtccttgagccttgatcaagcttattgtgtgttattcttcctctttttctctaacttttttataatattaatttaatacttttatttgtattttgagtattttgattgtaatcctcatattttttttgtgtaatgagaacattttccaataatatatatttatacttacatacgtatttaaatatatatatatttttgtttataattcatagatgtgtattttatactataattttatttatttatataatttatattatatatatactatgttattacgcataagcttttatttatatttttttgaggaatttacggtgaaatttttttatgttttaatttttatacacttaactcctttatttttttttttttgtggcaaaacccccttaaatttacttt

SEQ ID NO: 124787 - DNA, 798 bp, Cannabis sativa
aactcaaaaaccctagtaaacagaaatcaaacctcaagagcagcattcttgcgtttctcataaagcttatccgcaagattacgaagaacaaaggcgggaaccacagataaagcatcagccatgtgaaaaccctaactgattcagaactgaattttttctccaactccaaagatgaccgaaagagagagaaaaaaaaaaaactgagattgagtatgagaacgactccgtgaaaatcaaagccgttttcggatcttttcttgctcgagtcgaaacatctctatctatctatctagggttttagaattttggaaaacactactattttttttaatttttttttccaaaattagaaatcaatctcagtcttaattttccattatagatctggattcgtttccaaaaaaaaaatcgaattattacgaactgtgtaaaccctaaactttcctttttcttctcttgaatctccttcttcttcttcttcttcttcttcgttcgtctttattttattttattttattttattttttaattaaatttaattaatttaatgggttctttttggtctgttaagtcgtccagtctgtctatctgggtgcacgagtgatctcggaaggtgctaacagagagtcaaagtagaactgttctgaaattacgaaaatacccctgtcctaatttatgattttgttgtgttttgggtatgtctaaattcggtattttaattttttttttaaaaaaaaattttcatccaaaaaaaaattaattaatatctaacacattaaaaaaaatcttttttttttt

SEQ ID NO: 124788 - DNA, 594 bp, Cannabis sativa
aattaataaactcttatgctataattttggcataggtgaaattgtgttttgcatttatttttaatattctaaatatgaaatttttgcttaacacgaacccaaccaactttttatatattgtatagataagggaaataattttattaattttaatataaaataaaagtagtatctaccttatatatatatttttttaattaattgtttgggttactcttataatttttatgtggattgttattatttcgtaaaaatatgaaagaaactgatttaaagtataaaaaataaataaaaccttttttatgaaaaagaaaataatagtatagttgaacattttttgctgaaaagtagtacacttggagttgttctttgatttacatccaatttcttcatttcttgtatattctactcacattactttgttctttgttcttttttagtattcacctttccaattttgtgtatatcactatcaatgctaataaaagatcacatacagtagcggtgttcgcggtgcgggtattgcggtttttgactattttttcaaaccaacccgcacatgcagtttttcaaattttccaaaccgcacccgca

SEQ ID NO: 124789 - DNA, 1969 bp, Cannabis sativa
  modified_base (380)..(390): a, c, t, g, unknown or other
acatcagactggaccgatattaaaagtggaaaagatatcataaatttactgttatatcttatctaagtcattatcacttagttgatcataaattatttgatctcaatcctgagatgttgagctcttgcttaattgtattgcacgggttctttgacttgttcgctaccagcttacccacatgcccatacttacatcttaaaaactcggtagtgcaattgagtggtagtgttaaccatagatatggacacatataccttctatgtttattagaagtgaaatgataatttcttttagcttggataaaggagttaaatgattgaacgttcatttcggtaattatattagtttcctgaaatatatcatttacaagtagctaagtnnnnnnnnnnnaaaatacattaaagggtaaaatagtaattttgtccctactcgatgtagaccttctataaaggatcaatgattgttgtgattgaaaataatgggtaaattatagcatatctatacttggtgtatagagcgttctataatcatgagtgcaattctgaatctatagtagagtcaggaagaattaatacgttaagaaatttatccaataaattttaagatctgtttattaggagcttagttacataggctcatggtccccgcacatttcctgagataatatcattttgtaagctcaactaatcgagttaataagtcaattagaattcgaaaataaactatgtcttatttgagatatttttaccaaatttaggcaattttaagcaaaaaaaatataaataaaggtttatttgttaattggtatactttgtgggtctaattaataaagttttttaatttgtattttatttaataattatttataattattaaaataaaattagtattgaaataattagaagagataagtggtaaaattagaaaagatactttagttttattagttgaaataaagtggcaaaaatctaactctaaagcccttatgatgtattcggctccaagtctttattttgagcccatctcatctaacataacccttagtgaatgcctatataaagaaagagataagaattgaaaaaatgtaaaattatcacttcttctttttctctttgtaaattcaaaatttaatagaaaattctttctctaaattgtttaaaggtgttttgattatcagcccacactattcaagttgatacttaggcttggtccagcctggcgtatgtataagtaggctaggcccatgctaagggctcacactttcttggagccccaaaataataaataaaatgtctcattgggttgttatttaagtagaattaagtgtatattctaataaacaataaatattcacagcttaattggtttggatgtatgacacattacacaatggtatgggttcaagttccatgacactcctttttcaatttttttttttatatatatttctgaaagtgaggttccgaaatttaaatggccttaggctcatatattctcaggatcggtcctgatccaggttcagttcttgatcgtactctgcaaccgcaacagaagatatgatcaatggctaaagaactgaatgaaatgatacattatagtctactattattattgtacggtttttttgtataactttatgtgtttattttattgttttagattttttttttcatatttagtttgttaaattataaaattataattaatatacatgttagtaaatattaaattttaataaaataagttttaatataatatatattaaataattaaatttttttattttatgacaaaataataatgaaaaattaaaaatataaaatataaagaatgctattacattttttcttaacattcttctttactttaaatagtgaatatccattaaagatgataaaaatatagagatttttacacttgatgtcattttttaccttttttttacatttttatttattctcggttattt

SEQ ID NO: 124790 - DNA, 1673 bp, Cannabis sativa
tagttacaatcaagaactgtacaaataacaaactaacagaaaatgaaactaagtaactaactaagtattatcactaacagtttgggctgcaaacgtatgtgaaccaatcaaggatttttcgggatggttgactataaacgagaaaggaaatattgtgcttttttctggagagaataataatgtttggtctacaaactcatccaaacaagctctggcaccattggttcagctgttggataatggtaacctggttgtgagagatgaggaagatgagattacaacaaattacttatgggaaagctttgattatcctattaatacattgttgccaggaatgaaattgggatgggacttgaagacaggtctcaataggcatctatcatctggaccatgttatggtgatttcacttatgggattgaggttgatgaagaacaccatacgtatcctcaactagctgtccgtaatgggtctcgaatattgtatcgtcaagggttgttggatggcttaacttcaagttccatcgagagttctctttctgacgaatttgtgtacaacgatgatgaagtttactatacttacaccctcctaaataagtccatgatgccagcaattgtcctggaccttcgcggaagtattgaatacttgggcatttgggctttttctgaaaatagagacaagtgtgactcgtatggcttctgcggacctaattcacaatgtattgttgtgacagaaagagaggagccaatatgccaatgcttaaaaggctttaagccaaagaatgaagacaattggaactcaagtcttggtgagaagggtgtgagagatacagccctccaagctgccatgatgaagagaaagaaggatttgattattatttacgcttgagagtgcccaatactaaatctagttggatgaataagactaataatgaaagcgaatgcgagagtaaatgcttgaccaattgctcttgtatggcttatacctatagctatacaaatgcattgtgcgccctctggttcggagatctgtttgatattcaacaacttctttctaggggacaacatacttatattcgaataccaaattcagaaataggttcacatcacatgtgttgttagtacattttatatggatttccttttccttcttcaagttttgactaatgtttgcttcttttgtttcacagctccaaaaattcataatgaaacaagagctgatggtagtcgtcgtaaggtgaaagtggagagagcagtcataattatagctatcatcaccagattaagtggtgggttcattttgattggcttttacattcggaggaggagaagcatttttggtaacattctcttctctaccttttacttcattatgtctttttttaacttttttggagtgcgctcttgtaattagatttcagtgtaatttgagattattactcaacttgacatgtttgtgtgcatttgttttggggctttaatccttacaaccactagtaatttttcagagagaaacgaaagccaagatgatgacttggagcttccattttttgacctacatacaattagtcttgccactaataatttttcagaggctaataagcttggagagggtggttttggacctgtatacaaagtaagcttctctcactcaacatatcattctcttttttttt

SEQ ID NO: 124791 - DNA, 1294 bp, Cannabis sativa
  modified_base (27)..(31): a, c, t, g, unknown or other
aaaatagattacattgaaatggagttnnnnntagggcataaaacccaacaaatcgtattgatgtgaacggattctttaaattcaaagtgcggagtttcattcaatccaagattttcccagggtatctattcccacatgaaggaagaaggaggtggctacaattccagtatgatcgcctaccatatatgcgcttcaggtgcggactgattggccatgagatgcgccaatgtgcgattaatccgattactgtgactaaagaagatgggcaaatcactatggcttatggttcttggcttaaggtggataacaaaggaagagtggaaaccatgtaaagagaagagacaataaataatccccatctagagggcatagaagacaaaaatctccaatcgacttccataatggagatacaaaccaacgaaagagcgaagataatctatagcaacaacacacaatcaggtacaatacctataaatcctaacattaataattatcaacacttgaatatgtgtgttggagaatccaatttaacctccatttttcattcttcctgtgctggaatggttgaggaaacaacgccaaagataaaaaacacaaacagggagcaagtggagacgggtatccagaagagaattggtgaagcaattgttaaagaggcatccttgaatgcaatggaggagagggcatgtaaggccaaaataatggaacccgatcccaacataaaagacactgctggaatcctatttgacgtccatattgtttatggaaccggaagtaactcacagaacaaagggactcgagagaagaggagaaagtttgttccaaagacaggaaaccatcaaagaatgaaacaggggggacatgaggagacaataaaacaactgaaaggggaactgggttctggatccagatttgaagtactcacaagggaagtttctcagctatgtgattcaacctcggaatagatatttgaagcggcgaactctgcatcgcagggtcgccgagagcaatgagttctcttttttggaatgttcaagggcttggaaacccttggactgtttcggctcttgccacccatgtcaaagaatacaattctggtttggttttcctttccgaaactcgctcgaaaaagtgcgtatatgtagatgattcgtgttcggttggatttcgatggttgtttttgtgtggatgctaaaggcaaaagtggggggctgactcttctttggaaagctcctttttctgtacagttgatgtctttcaatgatttccatattgatgcttggatcaatacgga

SEQ ID NO: 124792 - DNA, 1235 bp, Cannabis sativa
ggtaagtgtttaatcatataatgctactcaggtctttagttactgttattctctgtagtattgtcatttactcgttattgttttctgcagtttactctcggccattttctagtttaatatagtcaattaattttattcatatttgcaacaaacacttactcatcagggcttgacttgatagtgagtttccttgagctcttgtatgtatctaatgacgttgaaaataatatgaaatgggataaagtttgtccaatgctaatttttactagagaagatattgatttgttttgtctttcctcttcaggtaactttctacttttcccactagtaagggtccttggagcttggatgaagtggagacttctagttgtaaaacatactaatatttttatttatcttctttttgtatgaagaagtagggtgagtttttttttttcatatgggcactcaacattttaccaaatcacaaaattaatataattataaaaagtaaaaaaagaacaacaatattttaagacaatttgtttcagtgtgctagttgaaattatgttttgtattgacctgaaaaaaatgttgaatatctgcatagctaaaaggtgtaagatgaaagaattttactgttttatgcatactattatatacttttgttttttttttttcggaaaatattgtttttattatggaaaaaatattcttatatagtcgttatatcactattcttgaaaagtagttataagcataatctcatcgttatatagagattgatgtaaatttataaatacattattttgtgtatagattaaaatattagagaaaatatttttaccctaatctacttggtatcagagccagttgcctcttaatcataaccctaatcattttcttctccttcttcaccatgtgtgacacttcaaatgaatcaacaaacattctatccaaatccactattgttatagtcacatctaccactttttcaatcattattcttgcaaaaaccattccttttgattctcactttgtccaaatcacaaccattcggttgaatggtgattacttcctcatatggtcataactatacaaatgtacatgtgtggtcgtggaaaatgggatacttgacaagtgagaagaagaaaccaacaggggaggatctgacctacgagacctgggatgttgagaattcaatagtgttgggttttatgccctaaataaaactctttacaatctaattagttatc

SEQ ID NO: 124793 - DNA, 2774 bp, Cannabis sativa
tgggttgggttggattataacccattaacccttatgtcatataacaaaaaaatattcagatttcatataatattaagtaaatatacaatatatacatcaaaaacatttacaaccatagagatgtccaacaaaattcctaatttctaaacttttacaaatcaaaatctttaattgattaacaaacatcacaagatcaaaaccacagattcacaaagagatgtccacccttacttgctcctgagcagtgaccaaatggattacgacaggaaaactccataggtgacctgaaatttctaagaaaaagaaaaaataatgagatctttttggagaaaaaagaaatttctactaactttatgaaattagtcttttctaattcctacaaacttttacttccatccagcaaagagaaaaaaataaagaaattagtaggtgcggctggtgtgtttagagagctggacggtggtggtacctgccgcggttttggctggcgcgactgagagctcaacggtggtgcctagtgcagctggctggcgcgaagcgggtgggagaagactactagatgggaggcacaaccacaaacagggcaagggccacgactaactggctaagaagattgatcctccattcctcctcctgactgagctgagagtgagagcactgagagagtttttttttcaaaacaaaaaagagtggttgttagggtttggagttggacaaaggagagaaaggaatggttatgtattaggtttagggttttcattcaaaataaaatctaatgtaaagaataaagataaaaaaaacctatatgtatattaattttttttttattttagttgggctaggccgactcggtttgggttcattgggttgaaaattcttcagccgaaatcaacccatttggtgtgagttgggcccttttcaacccatgtgagtttcggcccactaaatatgaccatgtttcggcccatttcgagttgggttggccggtttggtcggcccatttccaacccatgctcagccctagccgtattaccctaagatttgattttgcttgtatttaatgtccaaaactaaaattttgatagtaaaatttagaattacattgttacctaaaactactttcgtttctctaaccccgttatttgctaacatgactcagttcaattcggccaatatagatacattatacacataacacaatattattagtccaagcaaataattttttttttaaaaaaataaattttaatactaaattaatttacaattaaaaataaatcatttttaaaaaaattaaaaggagaacaatttttttttactcctttcttttcttttttctagtttttgtttcttcttcattttttgtactaacaacactgccaccaccaaaaccatctttatccaccattaatgaccaacaaaactaccacacaaccactactactctacaatcatagccacaaccactgcaaccacccccataaccaaactgttgtgtttagtagatccaaatcaacctataaaacacaataaaaataaatccacaaacaatctcaaatccaaaaaacaattttgattctacatggttctttctcctcaattctcaaatccatataacaatccacaagaaaatcaataaaaaaaatgataaatatctaactaaagccaaacaaagtaccaaaacgagatttgggagctctgcactgtaggttggtttttggagttcagtggcttcagaagaacgggaactgagattttgaatcttctttcagtgccagagtgtgcgcagatgagagagagggagagagatagaaaagagtgatgaatggggttttcgggccaggatctcatcgtggtgagcaaacggttgctggagggaggaaaagagaatggctccctatgagtcttctcctaacgccactccttcatggtattggttcgagaatagcgcaagtgagagagaatagggtgaggggtgggtggggttagtggtggcaaggatctccatcatagtgctgctttgagaacacgatggtcagagatgggaggaagagaggaagaccagggaagatgatggtggtgcgtaggcagtagagagagatttaggaagagatatggttagtgttagcctatttttagcctaagttttaggtcactttttatagttatttctcttctttgttattattttcagaatataagtacgcttgttttctttggttttatttctctatctctaaggcatatctctagatggactttcgtagctactagtaactaaccatttctatcaataagtgattttggcatccctagatttattaatgaagtacactaagtacatgaacattgcatcattctaaggttgtcttggaacctagtcttaaatgggacgatattttaaaatggcattctctatctcgaaggttattccctagaaggaacttggtagttactagaactaatcatatacctaatgtaacgccctaatgctaaggcacgctgcagtgcttttcaattacggtgcaatctttgctaatcaaagatttttcttgaaaaacgtgataaattaaaacttttatgataaatattatactttatatgatattaaaatatttacaagtgccgggatcccgttttcaaactattttaaacttaacattttaaaatacacgtaaaccaagtcgcacagcgactacaaaatataatccccagatgtcccgagaccgaacactccaggtcgcgctgctccgacatgtacaacttcatccgag

SEQ ID NO: 124794 - DNA, 889 bp, Cannabis sativa
  modified_base (840)..(841): a, c, t, g, unknown or other
ttctcatctactttatattatattatattattttataacacaaatcacattaaaacaaaaaactaatatgaattatagaacttttaaaaattcgacatattttcacacttaatatattaaggagcatactcaataaaaagaaatcaaggcttttatttgtcacatattcgtagacgagaattttttcttctgttttcaagtagaattctaatagccttataagatttttgtgctgaagtttgcccattaatatggcctcattcttaaattattctactcattgtcccaaattttcaattaatcttttcatgactattttttgttaatcactcagtgtaccctaaaaataaaaattagtgtgataatagattttaatttagctaataaattattgcaatatacataatacatattagagaattttatcataatactatcataccatgtaaactttctcaaatccacatctcctcattttgttctcatctaaaaaaatgttagtggcaaccttaatccccccattgcaaactgaaaagtctctccttttgagatttcatttcagactataccaaaagacaaaaacagatatcaagctatagcgagagcaatttttattttcctcttaaattcatgaaacaccccgatcgaaaaaataaaataaaaaatcaatgatctaagaagaagaaaagaatcatacataatttaatttattaccactgtcttactgctgcagtgggagatatttccttatcttccttgctttcttacgaattggcccaacaatagcaataataattgttaattctatttttggcatatttaattgacaaaaatattctnnttatttcctattaatttcggctggtatgtttaatttggtttccctatt

SEQ ID NO: 124795 - DNA, 2083 bp, Cannabis sativa
gatctttagcttagtttatatagggtctgagtctctagaatgtagaaattaaacgctagctaccgcgttattttggagttggaatatagtaataatacggttcagatttggtatttgctgtgagctttcttacatatctgaccacatgcactgtggtctgaggccccaattttctttcatacttttcttacttattatctcaccacttgcgctgtggccggtctgaggccccaattttctttcatacttttctttccaccgcgtatatatacttaaatcacataatatacatatttaattttatttaaataaagattatatattattttaaatatttaatacacaatctaaaatgaaaatataaaagtaatttatttttaaagtaagtcttgtttatatatatagttttaaaataaattacataagtaaattattaatttataagaataaaattatagttatttgaaataaattttttattttgctactatcttctacaaggatcaaagtttaattgaaataaaataattattatacttattaatctttattttcaccattataatttggaggtcttgatcacaattcactattatgtctttattcatttattagtaatacccaacacgaaatttctttcatacttttctttccaccgcgtatatttaatcacatatatatttatatatactagacgaacgttgtatcttacttttagtttttttttttttttggatttttttattcatataaacaaattaaataggttaatttttttattatagtttttaaattattagtaatatgtaattacaatcttagatagcaattttttcttgttttgcttttttcatagagtatacattaaaattcttatatatttgagtatttattttctcttaattagtataagtttatagtatccaacactttgttaacaattcattataaacactttcaatatatttagtcttttcttgagaaataaactataaaagttggtaagtagtgttgtaatttatttgaccatatattcttacactaaattgatacatcttaattgtaaatgtattttttctatttaaaatattttatataataatataaatattattataaattttattgtatatatttacaaaaaatattattttacatattacctaagttttaagttttattttttagataaaatgtttaattattttaaaatattacataattaaggttgttaatctaattcttaaaatattagttatatgtaatttataatttaagatgaagattaagtaacttcttcttgtcttacttttttaatatagtatacattgaaattcttgtatctttgaatcttcatctagggtttagggtttaggatttatgctgatcttctcttcatcatcataaatttttagtatccaacatttagttgtcaattcattagaaacacttttaatatatttagtcttttcttgaaaaataaattataaaaattggtattagtcttcaataattaattattttagtaaatactaaataaataaataagtgtagattaaaaccatacttctttagaatattccattatttttgttgcataataatctaaaatttgttatgcttcgtgacccaacataattacagatacgcttctagtgtcatcttttatttcagcatatactcttgcactgaaaatatagttatatttatatatatacatattaaaatatgtttgcatatatataaatatatattaaaaaaaaaatagatacctaccgtagtgtaaatgttgattcatatctacataaacaacgaaatctttatttttttttttgagctcctttgttatatattaaaaattatgatatatttgtcataacaatttttttttattcaaaattttgcaacctaaattagattatatatattagttagacataatttttagtttaaattaatttacctaaagtaataaaattaattaataaacatttatcttttaataaaaaaatatttaacttgtttatttttataaatctgtttaattaattttacgaaattatttattttgaggtttaataaa

SEQ ID NO: 124796 - DNA, 507 bp, Cannabis sativa
taacacggcgagtagatgcacccaaataagaccccttcttccgccataaccatattattaaatatcacactttacaattcttctatatacaatatcggttgaaattttgaaaagctgggcagacattgatagagaataatatatataaaagatcgatcagattgaggaggtttggccgtcggcatcgtacgtgatctgaaaaatggattccgggaatcagacatggacggatgagaaacaccttgagtatttgaactccatggaagcctcattcgtccgtacactcattggagctaataattataaaaatcgtagtcttcttcgtctcgatcgtcaccttcctgatacttccgattcaaccttagatctcaaatctcagaaatccacctcctccaacctcaagcatcgcatttcttcaggtattatatctctatatttatttattttgaaaataatatatttattttttttaaaatgtaaatatatatttacttttttttttttttt

SEQ ID NO: 124797 - DNA, 594 bp, Cannabis sativa
caacacttggtccctaatctccatggtattaaaccaaataagaaaaataccataagcaagcattttcaccttataaatcttatttgcccaaattttttttgcaaatccctccaagatgtgcaggggggattagacactaagacatagcacacaatggaaggactccaaaagctaatctcttcttcaatatcttcaaaattgattttgaccttacaaggcccctcagatcgactgaaagacggttctaaattcttaattatggatcctgattgaatcaagttactgttacattggttgtttgcgtgcacgaactgcaggaagtctgatctggcctcctccgctcgcttgatctctgcagtaggagatagaggagctcagaataaatcctgaaccccatccgagcgattagtctcagtcatcacttcctctggttcctcatcttcttcagaaagctccaggggagcaattcctaaaacagcatccatctttttcgtacgaattacatctgattccgaattagggccgttcttccttggttttgtcacagaagccttcaattttccttgttgtttcgacctagttttggccatggcg

SEQ ID NO: 124798 - DNA, 978 bp, Cannabis sativa
gaaaatggatgataaatgaaatatatataatgtagtgggtaattggtgggtgtgtgagtgttggaggtcctgggttcgagtcccaggtaaaacatgatgtaatatataaacgcttgaatcaaaaaaaaaatatctttttcttatttctttctttgagaacgaaaaaatagtattaacatggtaaagaaaaaagatttctaatatgttactttttagtaaataaattatttatgtttatataaatatttatttatttatatataacaaaaatacttatattgttatatttgtagaacttattttgaagaaaagagtatttcattaatagaatagattagacctcacggtcattacataacatgtttaatgagatggtagatagcggaatatcactaaataacttgtggataaacgcccacttagccacattatgcgcgacaaaattacaaattctgctaatatgggagaaaatacaactcgaaaataaagaagagtgactattacaaaaagaaacatagtttccaataacctaatgagactcattcccattgagagcattgatgactaccctcgagtcgctctccacgatgaaaaacttggcaataaaatccaaagctacagaaatagccaaacaacaagccgtcgctgccccacaaagagcatcagaaaagtcaagacaaaccgtatgaacttaaatactcaaattatttcttcgaaacttaaatatgcttatattgtgccacattttcttagatatgttctccgttaaaaaagtaatttgagttcaaagtgttataaacataataattttaagtacttttgccgctaaaaaaataaatttaaacatttaatgcaaaagaaatttacggagggaaatttgattttctatacttaaaaaaccctaaaattatttccctaaacctaaatgttataacataggcaatatatgactacttttgctttatccccataataccc

SEQ ID NO: 124799 - DNA, 751 bp, Cannabis sativa
aaaagttatcccattttacaaattatgtatagttttagattaggataccaattttaatccctaatatgcatataatttcaaatttcccttctaaaataatgaagagaagatccaatttaccaataatatagcataattttacattattttttagaataataaatagtgttattttagagcaatgaataaaattatttattagtttttttacttttaaattatcttttatgtgtatataataatcttatatatttaaaatgaataaaatatataaaaaaatagaaaaaataatggataatataatgtaaaaatttgctataaaatataaaataatattttaataatattttttaatgatagagaaaaaaaattattgggagtgctctacgataattcaatttttcttaaaagagtaaaagaaagataattcaattttgtaactttgatcactcttgaattatcaagaagtataattttgatcttcaactatattttctaaattataaagagccttaaaaaaatacacacataaactgtaaatatacatgcctatttcttctctttttcttttaaatgattttttttattaatttcattttttagaaataatatttgtttactttgtatttgacatgtcactcaattaaacatattttatagggaaattttcatttatatacctaaaatacaatctattattaatattaccgttaattaatttaatagctttttattaacgttccacgtcatc

SEQ ID NO: 124800 - DNA, 620 bp, Cannabis sativa
gcaacaaggtctccaagagacgaatatggcttcaaaccaaagcgggttgccgatagaggaaggaattggatatggctgcgggtctggaaagggaaagtttttttcttttctttttttcgtaaggctggaacggaaagttgaaacggagcgggcgactgaggaggtcagattatatttacaatccaatttattgaaccaattcaattataaaaaatagtcataaatacttaaacttaattattagttggaaataaatatttaaatttaattttttgtggtaataatagtaagttataattatgagactttttagatacttaaattttaagtgttaaataaattatcacgtgacaattcttgattggtccaaatcattaatgttttattttttaaaaaaaattaatttaaatgatacgtagataatgacttaatatttaatatgcaaatttaaacttaaatatttatgcagcaaattactctataaaaaattaaatatctaattactattaaattaaatgtcaaaagttaaattttaattaaattgaattaattattaaatattattttcaaaattcaattaaaaacagattaaatcaaatccaattatatttatataataa

SEQ ID NO: 124801 - DNA, 1012 bp, Cannabis sativa
tgcgtcagccaggcgagcataggcgtcgtcgagagatggggtcgtttcgagaggttggccgagccaggtctccacttcttcaaccctttcgccggagaatgcctcgccgccgttatatctacaaggatctgctcccttgatgtccgcatcgaaaccaaaaccaaggtttgtttgccttttaagataaagatttatgaattaacaaagggaatgaataattgatcatctttatttttcaggataacgtttttgttcaattacaatgctcaattcaataccgggtcgttaaagaaaatgctgatgatgcttattacgagttgcagaaccccaaagaacagattcgggcttttgtattcgatggtatattcttttataacaaatgagaattgttcttttttttttttttttaaataaaaaataaaaattggtacattaatgttcttggttttgatttctggttccagtggttcgagctattgtccctcggatgaccttggatgagctatttgaacaaaagggtgaggttgcccaatctgtgctggaagaacttgagaaggtatggtattattgtaaaaacttgcaatgcattaaatgcgtgattacttaactctacctttcttgatttagatttattttattaaagaatagaaaattctttaatgtttttcttgaaaacaaaaacattgaagtttatagggtgtgctgtgtgaatatgcatacgtatatgttagcatgctgctatgattgaaaatgtcaatttcatgattataaggttagaacagcttctgaacatggtttgttagaagtatagtaggacaatgactctttctgaaatatcagttcactcaggtcgctgtccagaatatgtaatagactgttatttttctgaaaagaaatgtactgaaactgcttggctaggaaaagtttttgcccacattgctttcatgtcaaataatttaaattcagtatggttgctgtgtcagcttcatcaactctgtttttgatttgaagt

SEQ ID NO: 124802 - DNA, 1308 bp, Cannabis sativa
aaaaattgctaattagccaaaaattttatgttaacattctattagtcataaaatatgtaatatcaaaattcaattatattacatattaattattataagtatataaacataaatcgaaagaatattttggttgattcaaagagaaaaacttaatttaattgtaaaggcgtaccttaattgatagatagtaatgatcttaatatctatcttgtagagataattattgtagcgattttagataataatcttctaaaaaatataagacttcgagttttcttattttctaacttgatgggagaagatgagaatagaataactcttattttttggggaccattactaatatataacttcattgctaggttattaattttaagtagggatattcatgacaaaatcacttgaactttacttttttttaacacttagccataaaaatccaaatttcgacggtaaaaactactgaaccctaaatttgttttgcactttacacgcggtaaatttttagcggtccacgtaatattaattattaaaatattataaaaataatttaaaaaggattaaaaaattaaaaacaaaataaatcaaaaataaaaataaattgattaattaaaataaatctctaattttatttttaaatctttatttttttttcttttttcttttgctttttttttcaattatagactactccatctctcttttgatcactatctttctttcgttcaaataaaccccaccccaacattcaaattctctctctccctattattgtgtctcactattcgttattagcatcgtagaagcaacgccgatcggcggggcatctcattacaccagtctcgtgcttgcttcatcaaatctactacacattggagccacgcgattgaaacttccaagagaggattgtgacagattgatcgagaattttttagagctagaaagctaacggtgaggtttcctttgacgatcgcggcgattgagaatggccagcatggcctagacatcatttttgtgcattttatttctaacacatatctgtctttcttctcttattattttattttctctacaggtgaccattgttgaatgttcatagttttttgacaggttgcatcgttggggtttgggttcgtgggttcttggttcaacgaggaggagttatgggtttgtgggtctagagatctcacatgtggtggctattgtgatttatggtggtattgttttttttttttttttgtgattttaggttagttctagtatggcggttgtggctctggtggtggttccactactaaaaaactcgga

SEQ ID NO: 124803 - DNA, 1183 bp, Cannabis sativa
taaatctaagatactcaattgtatttatgtgactcaaattggccaaatcgtcacattccactgttactcgagcataagatatgaaaaacatgaaatctcatatattgaataaataatactttttgaattcaactatatcacaataatcacaaaaataatcatttaaagcctatctctaacaataagccctaattatctagtaattaccataataaagttaaaaattcattataattatccccccattaaaatgatttcatcgtcaaaatctaacctagaaactctggatactgagccttcatgttggactctaactctcagatggcttcctccaccttattgtttctccaaagtaccttgaccattgtaattgttttgttccagagaactttgtcctttctatcaaggatctgcactggttgctcctcataagaaaaatctggttagagctctaaggtttcatagctcaggatatttgttagatctgaaatgtatttacttaatgtaaagacatgaaatacattttgtactgttgacaaagtaagagataaggctgaacgatatgcaactaatccaactttcttgagaatctcaaaaggcccaatgaatctagggcacaactttcccttttcccaaaacatttaacccttttcattggggatactcgtaggaagacatgatctcctacataaaatcctatatctctatgtttcagatctgtataacttttttgcctactctaagaaggaagcattatggccttgatcttttctatcgactcattggtccattgaactgattttggaccgaggtttgttctttctcttatttcatctcaatgaaatcgatatctacatttttttccatacaacatctcatagggagatacaacatctcatagggagctatccctattgtacgttgatagctattgttgtatgaaaactaaatgaatggcagatacttagtgtaggagccttcaaaaaccatcacaaatgcacataacatatcctcaattatctaaattatccttttggactgaccatctatctaaggatggaaagttgtactgaacttgagctttgtacccatggctcgttgctgactttcccaaaacttggaattaaactttagattcctatccaaaacaatggattacatgttggaatatcttttaccagga

SEQ ID NO: 124804 - DNA, 948 bp, Cannabis sativa
ttgaagatatttataatacaaaatttctttacagaaaaaattagtaaaatcttttatggtgcaacttatattggtgtcgtttttaattttttaaatgtctttatacattctaaaatttttaaaaaattcaaaataatttattgttggaacaaaattaattatacaaaattttcaaaattcaaaatcaaattcaggtaatatataaataattaatgaattagtgaaattagatgaagttagacaaaaattcttatggaaatttttaacagctaaaaaagtttataaaacatgatttgatagatgtcaaagtttaagggaaaaaaatatgattagcttttaatatatattaattgtaattagattggatcggtaacatccaataattgatctaatccaatattagacatctaacttttgacattcaattcaatacaattgtaattagattagattaaattagattagttcggttgaattggatcgaatatttagatcttgtccaatcctaattataagtataaaaaacacaaggttacatcggcatgggggcatacccaaaatcttatacaaatggaataaatataagggttttttttagaaacttacaaaaatactaaaatttgggttaacttttacaaaaatactatcatgcggaaatcttttcaaaattactgtgtttactactgtcatagataatattaagtagtagctcactctgtacatttaaaccagttatatattattttattgtttgtacatgctgccagttcaggtccataaactatagtttatatacttgggtagaaaataatctactttacgataagttcttttaagaaatcggcactgtataatgtgtattggtccacaagtcaaatgattttgtttttggttcttaaacactgtaaactttgcctacttgatatatacaagatttctacacattct

SEQ ID NO: 124805 - DNA, 1250 bp, Cannabis sativa
gggtactgttcatattttcaaccttaacaaatgtactactactcaagtgcttcaacctcagccgttgcaaacatcatatacctcttcttctctgtcttttatcaaaggtatttgaaatttatttaatgtacattcaacagagactaattataatctatatactatatatgcacctttgattttgtttaatttcacgtgtgtttggctctactttgcaggtctagtaatgcccaattgtattagcttggataggtctttggctaagattcggttggtgaagggttctaaatacatcgctgatttcggtcacatgaaaaatacgatcatagttctgggcatggatggaaggtacgtaatgccaatgcaccattaattacaaatgataatatatattatataatataacattgcactttctgatttcatttatttacaagggagaaacgaattctggcttttctctatctagacctttaaattactgcaatatattgagtagctcaaataggagtacgcacaccatatccatatgttaagttacatagtgaagcacgcgctatagctctagaaaagagcattgtgctaaaacgattcgataaaattaatacccattggcgttacgtaatgacatccctaatatatgacataaaatacgagattcactattttgaaaaatatatttgcccataatttaggtgggcacatatcagtaaacaccaatattaaatttctctactattgtttgttgtatgatactcaattctatcaagaaaagtactctcatgcatgcacctaagcaattcttactggttcttctctataaaattgattagaacataatattgtcattgatgacatttcttaagcgtacttcatcccaatcacaaacataaaatatattttgattgattgagtcaagattatgttaaaccaatttaactttaacacatcaactaattttttatttattaaaaaattaaacctttaactgatcagtcaacaagagtaattagcatatctaatataaattaatttagttgacgtatcaaatttaaattggtttaatataatatgggagactactagaaaatcttgattctatgttaggattcttatctaataactccttatttttctggttactttttttttagcattgcttttaggcaccagtggtgcctagtaccttctcgacatatcgcgttgtgattggctagcgatactccctaaaagttattgtattaaactat

SEQ ID NO: 124806 - DNA, 853 bp, Cannabis sativa
  modified_base (49)..(56): a, c, t, g, unknown or other
aaaggtgtaataccttgttcaagttatggtgatccccactaatctacannnnnnnntgtgagtgagtgtatatatatattcttctcttgctatatatatatatatatattatattttacatatgtgttcttattttcttctacctttcttatatatataatatatatgtaatatatatagtgtatatatatatatgtattgtaacatatatttaatcaatctcttttattgtccttgtatatatcttggtttatcttccattgtaataaaatctctaacagttccatctcatgctctttagataacagttgatactcgttcccttatatacttttattttattatatattattcgagtaatttgcggtgtaaatacttaaatttaattttcgattacaaataaatacttatgtttaattttttgcagtaataatacctaagttaaatttttagaacttctgtaggtacctaaccgttaaatgtaaagtcaatatccatgtatcattttcttattagtatatttacagaaatttttaaataaaaaataaaaatttaatgacttgaaccaaaaaattgtcatggagtcattggcttaacatttaatgtttaggtacctatagaagtttaggcattataccgttaaaaattaaacttgaatatttatttataaccaaaaattaaacttaagtatttacaccgcaaattaatatcattattccctctccttcaacataaatataaattgtacttgtagtctcatgttaatttaattgggaaatttgaatttccatacctacataactttataatttttttcttaaatgcatacttattaaaatttgtaatgtatgac

SEQ ID NO: 124807 - DNA, 1666 bp, Cannabis sativa
atgtgtttacttcatatcgttttagaagttcatatttaggatgttaataacttacttgttagtaaatctaagatcctggtaaaataattccaacaaaggtaactaagacacactttttaattttagcgtacaacttgtgttctcttaattactgcagaataatggaagacgttgctcatattgttcctttgactgtgagtaaaccaagatgttgccaatgaatacaatcacaaacttgtctaggttatcaagtcaaaaacttgtctaactaatctttgaatactttattccttaaatccataaaggttgttggggcatttataagtacaacattggattttaattttgattgaataaaagattgctaaaatctaaaatgtgtccattttagatgagccgaatattctatttaactaatggtatctttgactcttgtctaaaatgggacactacgtatcatttagttaaaaaaccatagaaaatatttaagatatgtttattttgtatttttctatatcttcattacttgttaaatatttacaaatttccgaaaatatatgtatgaatttatattgaacaagtattgagttctgttattaataatggagtatcaatttcgatctacattgttggtcaaatttagttgatttttttaatggaaccttacaacgctagattcatcatcctaatggatggtcatctgttagacaatctaatagtgttaaatctcaaaaggtaagtattttgtaaatgaggggagagttctcatcaattcaaatttagaattattaatatatattataatttaattatagtaattttctaactaaattaaatatcaatttttctattaaataaatggaaaaattataatttaatttttttcactattataatttatgtttagtggctaaaaattagcctgtaacgctctactaacttaggtacattaatgtgttttcttaattattgtgttgacctttgctaaccaaagggtttagtataaaatcgtgattaataaaaattttcataatatataaattttttactaaacatacataaagtttacaaatcctaagatccttaatatatttttcgaaaaaataaaaatttaaaatacaacatattcaaaatgtcgcccaacaactaacaagattgagcccatgtcccaaagatctggacactccatgtctaaccatctagatatgtacaatcttctttgagcttcaaactcatttttgttcagctttggccttgccttaacctacacatgaaaacacatctgtgagttgacagactcgataagaaaaatataaaatataaacatatattcaacttgtaattaggcacccatacacctatttagtctaaaactcgcatcgcacgcacatgactgagtctcgaccattcttgactatagtacttgggatacaaatcctcagggatagaactaaagatattcttcggttgtctcaaaaaacttacattgatcggatcttgaaaaggttcaatatgcatgcttgttcatctggaaaggcaccaatagtgaaagatgacaagttttctaagggtcaatgtccacaaaatgataaagagagagatgaaatgaaagtggttccttatgcgtcacttgtgggtagcttgatgtatgctcaagtatgcacac

SEQ ID NO: 124808 - DNA, 2208 bp, Cannabis sativa
acaacttgtaactaaatgctatattttagtcacaagtaatattttgttgtgactaaaagtcatatttaatcacaaaaaatttatgttgttactaaatgattgtatctaaaagtagctattttttgtagtgataataattatctatgaattggggatacaccaataaagaataaaagatatccaataaagaatataaaagagatgcagaaaaattagggttccatttaattataaagttaaagtaaagaaatacaattaataagaaagttttatataactaactagcatagattaaaaaaaaaaaaaagactaaaataatcttatttccctcaaactcacgacgttgctgcaagaagcattgagagtttgcttaaaagaaaataaaaacaaaaattcgtatgcaacttagtaaaaaagtcagcaagctgcaacgaagaaggaacaaatgcaaagtaatggtgtccaacttcaaatggtgacgagtaaaataacaatcaatctcaatatgtttggtgcgttcataaaaaactaattcttcaataatctgaatagtactttgattatcacaatacataggagtaggacaagagtcaataacactcatatctacaagtaaccatctcaaccaaacaatctttagtagttgacgccatgacgcaatactcagcttccgtagaagaatgagagataacagactgcttcatgctcttccaagaaataagagaatctcccaaaaagatacagaaatcagtgacagactttcagtttgtgggatcacgaccatgatctgcatcacagtaagctcgtaactccagagaagaggtagaaggcagtagtaggctctgaaagatggtaccccgaagatattgtagaatgcaaagaacagcaatccagtaaacagtagtaggagaagcaataaactgactaacaatatgaatagcatatgcaatgtctggacgagtaatagtgagataaaccagactgcaaccaatggttgatacaaagtaggatcttccaaaggagagtcgtcagaaggagaatattgatcattcaactcaaagggaatgtcaacaactctagtatcagtaaggcgggcacgctcaataatgtcagcagtgtactttgactgagaaagaagataaccttttggagaaaaggcaacttcattacctagaaaatagcgcagagaacctaaatccttcatctcaaattgagaagctaattctgactttaacatttcaatttcatgtaaatgttcccctgcaataatcatcatcaatatacaaggaaagtagaatacgacttggagatgtgcacttgacaaataaagttgaatcatgatcacttgaaacaaaacaaagagacaaaataatagtagagaacttctgaaaccatgcttagggagcttgtttaagaccatacaaggttttttcaagcttccaaatctcgccttgattatgaagaataccaagaggaggaaccatgtagacttcctcgtgtaagtcatcatttctattcagaaaggcatttttaacatccatttaagatatagtccgttggcgaactgatgccactgatataagtgtatgaacaattgtcattttcgtaacaggaacaaaagtcccctcaaaatctatatccatactgttgtgaaaaatccttagccactaatcgagccttgtaccattcaatagacctatcagacttggtcttaattttatacacccaatgagaatcaatagcatgtttaccagaaggcaaaagtaccaaatcccaagtatgagtcttttgcaaagcaaagagttcctcattcatagcacgctaccaaaagggctcaataaccgcctctttataggacaggctcaaaaagacaatgaatagatgctaaaaacaaagtaaaagaagcatgataagaaaaatatgtaaaatttggttggcaaatagacttataaatgcgttgaggatagcgaggaggaaggtccacaatctcaggaggatcgggaatacctgcaagaggatggggaggagcgatttcaggtttcaaagcatcagaacccaatagtgagaggttataacaaattgcatggaattttcaaagcttaagtactaaaggagaaaagtggtcacaaagtgaacactatattttggcatgcatgattcacatggaattaatagtgagaggttataacaaatcgcttaatcttcgta

SEQ ID NO: 124809 - DNA, 2086 bp, Cannabis sativa
gttccccgaaccagggtaataacatctactaaatccaaaagattcgtattacaatatccaattcactcttaggaatttaatacaatctttatagcaactagtaatgaattaccaacaacagtcaataatcttgattgtatgaacacaatcccttgtgcaacaacggagtttgtcttcgacacttctattcaatctgaaatcccttcagatctgatgacactaaactcccttcagtctgaactcagcaacctcaggctctgatctctctgctatagatcaccatcttcaagctatgcgatcagacttataaaaacaacaacaagaaaagcaagatactatgctaactcacacgatgaacctgaactaaccaaagataacaatcagatagctaattcgtttgtagaacaaaaaataactatttatatgcaatagttcagtcaacctaacaaaaactaacaccaactgttaagtcataacagagtgacatggactataacaaaaagcaggggtgcagttataacagactagaaacaccagatacgactagtctcactattaaaataatctgtcaaaataatgacacttacaatctcccccttgatagattatgttcaatgacacaaaaaaatataaaggctaatgacctcaaaagatatccagtaacacagagccataacacacaaaaaaatgtttttagaattataaacatagcaacccagaaatccatattaaaaaaaaaaaacttgagtacaaacatctcccgcttcattgaacatgagctgattgctccagttctttgtcgggctccccctgggaaagtggcccagacgacaccaagtgtgttgcagtggttactggagaggggtcagctgtatgaggtagattcgttgtactacactggagactggggcaaatacagacggctccccctgcacatgtgcgttactcccagacgcatcagaggatgcaccaaatgactctctatgaaactcggacagagaagtatcaattgatggaggtatagaatctccagaataatggtgcagtgcagtagacttgatagtgcgaaccattttatacatggaggcctcaaaggcaagctgtcgcttttgatctttcttatatcgtttgacaaaagatttaaactcagaaaacatttgtacctgccagctagaatctgataaccctttgaacataggagacttgcctttactcaccatggaagcagaaggagatgtcgatgattgcctattaaccactaagagaaaactcttaataagaaccagattttgaacttgatagtcatgtgttgtaagaggcggatgagctgccatgagtactcgttgaactaggcttgggaaaggtagtttgttacgagtgcaattgtttctgaggcttcaaggatcctttcaaagatgagagatggcagatcaatagacacatgagttcccacaacatacaagaacttgccaatctcaagtgtatcggaggacaaatgggaattaggaaaccaattgtacaaagctacctgatgaagaaccctatagaaaggagttagatgagtagctaaaatttcctgtttgtcccaaagatagttatccctgccagttagcacactacccagcatagtttgatctggattgaattgtttcccatatgttggatttctgatagactcaactttcaacatgcatgcaatagtagatggaccaaacagaacacgatgacctctaacaaatgcactcacacaacttggatgacccttagctataacaatcctatctagatttgcatagaattcacgaactaaaatgggatgagggacagataagttagtgattgtgttaacctatttcctattttttaaaaaaatcatgcaattcaggtgttatgatattttccacacgcaagtgtacgtatcgttacaagtagtaaactcaccgcgagtgaggccgatcccacagggattgtagttaagtacgttgaagttacacttttacttctaattggttaaataaaaattaagaaagaactaaataagaaaactagtaagaagcaattatttaagaaaattgacagttaataa

SEQ ID NO: 124810 - DNA, 698 bp, Cannabis sativa
tataggattactatgggcttttaggcttactccattaggtgttggacttatagaattaagatgtaacattactattagcacaagttagtattaagtaaacattaaaaatagtagtatatcaccttaaattgtaaaagagtagtaatagtagtagtactaaggtagtatagtggcatatatatggggttgggttggtctcaatatttgaaatgatatattatatgaggaatgatatttagttacataaaagtgtgtgtatacgtgaagcaatattctctttaaagtaaattttattattatatacgttatgaagactattcgaattttaatttgaatattgggaacatctagcactaagaaaatggacctagtagatatagcagttggtgaaactagttacagctagaatttgttggagaatttgtagtgattaaggtttattaaatgataaataaatatatatagtgaaaatttactaactttattcttggacttgaaaagaggaattagtggagagtattgttgtaggataatagcagaagttgttgtacttggacgtctacccgggatagcactaggaggatattcaaaatttaaagatttaaaccttaactagggttaattaatattaacgatatgggttagttggtgtagtattgtgggtgtagaggtctataaatagagagccatactcttca

SEQ ID NO: 124811 - DNA, 1887 bp, Cannabis sativa
aatcatgtaattttattaatcgtaatcagttaaaataatatcatgtaatttaattagaattaaaaaatgagctaaataattaatcgcttaatacaaaaaatcagtttagggtcttatttgtactattttgaaaaatacaagattcattttatcatttaacaaaacagagggtccaattggtaacttttgcaacacacagaatccaaaatgatatttacccttaattaaaaatgaaaaagataaatataccctttaaaaatctataaacaaaaaataattacatgttctaataatgacaattttatcaaattaaaacattctgattatcatttctagttatataaataaaataatatgattctggtttttttttggacaatttagtaaacaacataataaaatattgtttctgattattttctattttaaaccgattcatttctctcattaattgttctgatttcaattatagtttaataaacgtgtcattagcgtaaaattatccaaccaactataccaaacactcggtagtagaatatcatttttagttattacctaatttttttttttgaagtagtgattagaattacttataaatttataatgtaaatatccataaacaacgtaagaacgtaactttaatagttcatcgtcaaaccgaaaaatatattttgtgaaaccaaaaactacccaaattttgataagatattattcgatagtactaccgaaaaaagagagagagagagagagagaggaacagcaggccactagtactatgagattgatagtgttcgatattattcgatgtttgcaaagaataacttttatataattaaataaaaattattaattatatataaatatatataaagcaaaatatctcaccttgaattcttctctctcgatcggtgttggatttgaactcagatccgaacccaatctgagaaaactcaaccctcgaccatggaaatggcgccgccagcagccggagccggagctggagccgccgctgcagtagtagcaggcggagctccacaacaaagacagcaacaacaacaaccagccgctggatttggccaaacaatcaccggtatcattcgaattgcagtcttctggtacttcgcttcaaagttcttcacttccaaacgccccactggcccaggttcagagcctccagttctcatctccaatcttttccacaaggccgaacctttggtttgtattgttaattattggattttgctttgatttcactgttggtcatgaatttgaattgtttttttttttttttttgtttggatcgattaggatatgtgggtgtatttatctgagaaggagaaatttaatgattttggtaatgaaagtgcccttctttggcatgaaaataatattccttatgctgtttggggacctgagagtagtagaactctttctttgaagtattatccatctgaggtatgtgtttgaattatttgatcaaagtttgaaatccaattttagtttattatggttgttgtaaataatttatatcattgtttttttaggctgtgaagaacaatgcaactgtgtatgttcatgttttctttgctcgttctggtttttctcctgacccaaatgatcctgagtatcttcctcttgctgcatttggaaggacacatcgtaagacttcttatctataagtattatcactctctttctttctttctttctttgttgggtgtgtactcgtttggtactctctgctttcaataagggcattgctataaggctggcactaggcaccaccaagagacggtgtcttgtgattagttagcgataccctataaaagttattctattaatcaatagcgatatgacatgttggaaggtactaggcactactggtgc

SEQ ID NO: 124812 - DNA, 933 bp, Cannabis sativa
acacaggagccactcaccatatttcttacagtgaatctcctcttgataatgttgtcccttattctggccaagaaacagtggttgtaggagatggtaagaaactcctaatttctcacattggtaaagctttcttacctgccaaaaactcatcttctttacatctaaattttgtcttaaaagtgccttctattaccaaaaatttcattagtgtttccaaacttactaatgataatcatgtttttcttgaattccataacacttgttgctttgtcaaggacaaagcaggggttgtcttggtcaaagggaagcttaaagatggtctttaccttcttggtgatgatggctccaacctttctcacacttctctgtagtgtcatctagttgagtcaagttgtaccttattgccacatcaatgtaattcccaatgttgtctttcacaatgtggtcaaactctttgtaactcaacagatattaataaatattttctttcttttccctcggattctaatgttgttatctataactctacactttctcatgatataaacttgtggcattgtaagttaagtcatctgtcaccggttatacttactaaaattttgactcaagctaacattcctcactctctaaaacacctaaagttctgtaatgcatgccaacaaaggaagaatcatagacttccttttcccttgcaaattctagagccaatcaacctttagaactcattcacacagatgtgtgggggccatcacacattactttcaaggataattacaagtactatattatttttattgatgacttcagtaggttttcttgggtttttcctatgactgttaagtctcaatcatttgaactgtttatttaattcaaaagtttagttgaaaaacagtttaatctccctattaagaaagttcaggctgatggtggggg

SEQ ID NO: 124813 - DNA, 522 bp, Cannabis sativa
ctggtaaaatattcccaacacactattactgccattactaataattatgggatgttatttaggaagcatatgagctggttgattatattggcgtgattgatttaaaattttatttggttttttattttggccatatcttttttttttattttttgctaaatcagcaagtatattgatctacaaacaaacaactttacaacctaataacatcgcacaaatggcttataagcacctctatgcacaaaaaaatgtatctttgtaagaggtttgtaaaaggataatgtattatatatatggagatcaatatgatttaaggcaagacttcttcattcttaagactattttaatttttttttttttttttggcaacggtcaatatttagaatattcaaaatttatgtcaacatatatatatatatatatatataaactaggtgattgttacgtgccaagccacgtagtgttagttttatttaatattttagttatttattttagtcaataattaaaatagtataatta

SEQ ID NO: 124814 - DNA, 1174 bp, Cannabis sativa
aattatatatacaaaaacttaacataacaaaaacaacgttatttttgaaaataattgccaaaataaggtggcccatgaaaattttccaaattaaaattggtttatattagagcctggcccaaactaattgagggccttgagccaaaatttttaattgggcttttcttttatataaaacaattatatattttatatatatataatggtaaaagttaaatatgatattttgaaggggttttataaaaatgttagattttggtcaaaagtttacaatgttacagtaacacagaaatttgtacaaaaatactatatttttataaaataaccgtaaaacactaaacagaacaattaaaaataataatggaacaactaaaaaacaacagatgaaacttaacatagtacacagtataataaaatatacagtatttttgaaaaatattccgtcccacattaaaaaagaaaaaaaaaatcagtatgtggtgtaaaaatccatattttgaaaagctaattgggttttttttttttttttttgaataaaatataaaatttctaattaagattctttccccatgaactttaacataccaaatcatgcccccaaattttcaggccgtaaaatttttttctcgaactattgataatgttagatttaaggacatttgtccaattttgttcaatttttttaacgtgacaattgtttatgtactaaatcgtgctcgccaaacattgatatctaccaaatcgtgctcccaaactttgatatctactaaatctgtccccaaattttgacatgcaccaaatcgtgccccttcaattttcatcctttctgttagaaaaaatggacaaaagtctttgatttcaacaatctctatagtttttgtagaatttttaacggctttaaaagttcagggagcaaaaatcctaattcgccaatataaatatagtgtttttaaaattaaagcctcttttgagaaaataattgaattttgtaagtaaatgctgattaaaatttaaaaatggtatttatgaaaaaaattgagtttttttttttctaaagaaaattttgggtcactcagcctggcccacccttaggttaactctgatttcagtattgtcaataatacgaaaaaaaaaaaaaaaaaaactcgttgtttggctcctagtcgcgaccatg

SEQ ID NO: 124815 - DNA, 1668 bp, Cannabis sativa
  modified_base (1605)..(1616): a, c, t, g, unknown or other
tttatgccgcaatttacccatattaaaataatttaaataaaatagatatacaatataatttcctcggaaggtatttacgtaaatataacaactgtttcttaaaaaaaacttaatagcaactaaatatcttaaatcctaaaaaggaaataactaaaaatatatagtttcttttttaaacacaactaaaattatataattattatacaattattatgaatatgctaaaatagagaagaaaaaaataaagagaaaaaaaaaataaatgagaagtttcaaccaatggggtgaatccctatttttatacaaaaatatggctaaaagaattgaaaaacgcaaatcaataaaataaaaagaaatacaatagtatttatggtaataattgatttgggtaatttggacatatatatatacaatattcataatatttctctttagatatccataatatctgccttattaaaaaccttgctagaaaacctagtatgacaaaaactcggtcatgggaaaagagtgcggtgtgtataaactcaccctcattttggtgatctttcaatcgatgaattctaatcttatgtattgtcttctcaaatattgatgttggtaatgattttatgaaagtcttgaagattagtacttgatcaaatttgttggacattagccgatatcaccactctcttgaagatcgtgcgtaaagatgaactttggtgaaatgtgtttagttttatctcttttagtgtaccctccttttagttgagtgatgcaattcatagaggactgtttgtacttctttattgggcatcaataaacatttcctttaatatgttgtgtcattgatctcagttgcacatattttctacttacttcatgaattgcaagtatcctaacatgatataaagttgtctcgttaaaaaccttgtcagaaaaacctaggatcaaaatcgaagctaaggaaaaaagagtgcaatatatatatttcgtattcattattatttgcaagttagctcgttaaaaaccttgtcaggaaaattcattaagacagaacctaaattaagggaaaaaagagtgaaacatgaatatgtctcccctcatgcacatatgatccataattattttagtgataatatatctcataagattattgttatcacttttaacatatcattatacattatctatgacagtgtatttactataactcttgtagagtatgtgtggacttctaaattatggatgaggagttcctggaagattaatatttatccaacttattgaatcattcatgtgtatacatataatgttgttcataccaaagtatgtattccactaaagtagatatgaacatgatacatatgataataatatatataatatttctctaaataaaaaaaaattgttcttcagtattctataatataatcgaatattcttcaagagcctattacaatacataatttacaaattcatattgcatagataatcatacgtgtatcttcaaataataatttacgtacatgtctttaattttatacaaagatcttcatcatatagtgcgcacgaattcaaatttattgttggattttgtgccctaaataaaacttatttcannnnnnnnnnnnttactaattaatataagatcagaaatttcttttatattgcatggttcacatg

SEQ ID NO: 124816 - DNA, 1260 bp, Cannabis sativa
cattaacttaaaaattgtcttaatgatgccagttcccaaaataatctcctacattgtgattctatttgacaaagtaattagtcatgcagataatcatatactgagaagtcactatacatcagagaaccatccttgtagtgcagaaggtaataacaattctcacaaaaatagcaaggattcccttgagcccatttgtcatctgcagtcacctttgtagctctataaatattacaaacaaagcatttttgcacacgaggtttgagttgaaatatgacaattggataagctgcctggttttgcacgtcctcctgatgaagaagcctcatgtctcgtatgactattgtatgcttgcagtctccctgcacaaaccaaaatcgccaaaccgaatagatttcagtagacataaatgcgagagcagtctaataagaaaccaagcatagatgttgagagaggagagatgtcaaaaaatttgatattaaaaaccacaactcaaagtgatattttacctgatggcagtacagatatccgttgccaacccgaaattttaaatcacaaaaacgtgtcttttgcatgtctactgctttgaaatgggggagttgcgagacagtaacattgccaataactgccttctgcttttgttgcaactctccagtaatgatgcaatcccattttttgttaacttcttcctcattgtttcttagccaatcaaatacaggttcgctataatctatagcaaatggatccctcaaatcattgcaaaaaacatcctgcaaacagaagtgtattttgttaggtttagtgatcaaataaaacagcttcatgaaaaaagaatggaatacacagagtttacctctatgagaaaatatcctgaaggatcatactgccccgccttttgcataacatggtctgttacgcagtagattttatctctcagttcagtcaaagcttgctgtcctacgaccaagaattcctgggtcttcacacaatttcacagcaatatcaggctcagcaaatttggggaaagagttacaaggataaaaagcaagagcaccaactgtgctaatgataaaaaagaaaaaaaaaaacacacatggtataatacaaaataaattgttcgtgagcatatctcattcatattttcactgctatagaagcaaaaacatttctacattctcaatgaaaaagattattgtaagagaaatataaaatatacgtgtactacaagcaaaagctttctgtattgattttccagaattcatt

SEQ ID NO: 124817 - DNA, 975 bp, Cannabis sativa
  modified_base (890)..(894): a, c, t, g, unknown or other
  modified_base (945)..(947): a, c, t, g, unknown or other
tcatagatgattgcaaagccttcgcaagcttcaatatgataaataaaatgtctaaaacgggcatccaagtaaaaagttggtaaaatacaaaatttggcgtttctcaaaaactggccaaatggaatcccgattggtaccatccgtaattctagttctgaacagtttgaaacacgaattgcttcaacttaaaaccctccaaactaactccatacctagccaaatcattccaaacttcatagagcacttgtataacatccatacaacaattccaacgtaacaaaactcaaaatcatgccttaaatgagaaatgccattaaagctcaaacttgattcttacctcaaaatattattaaaactatcacaacaacatcaaaaccaatcccacaatacctcagaaacaaaatcataagctcccaaatcccacaacaatttcaaaactcaaagtcaactcttatcacccaaacttataaaaaaaaaaaggaaggtcaaattttttaccttaagctttcctcctttaaggatcgacacctagttgctactaggtcttagaacacaagttcttagactgaaaattgaagaaaaattgatggtggtgagggtggttttgtcgcacgaaagagagaggcagaggaagagattgagggtttgttctgtttgttttaaataaaaatttaacttatatataatcacataagatttaaaaattaataataatagttgtaatataataataaaaataatagtaacattaattataataataataaaaataattattttattatttcttagccattaattttttttttattttagggtatttggttaactccgagtatcctaaaatattccggtaattttataattaacttgtaaagcccgcttagttnnnnnggaaattatcagttgtttatgattgattgagattatttatagctatttaannnatttattatactgttatttatgttattc

SEQ ID NO: 124818 - DNA, 643 bp, Cannabis sativa
ttttacaaaaaatggtgtcttatgtaattattcctaattataaattctctactaaaattatgtaccaaacatagatttagttttatattttcattgccaagaacccaaactccattcggtgatggattggaggcttaatctttggctttgactttggatcaatggttctatatataatcttttctatgattaatgattctatcaaatttattgtaaatcatcatctattccatccttggtagtgtactttagttagggagttaacgataaattattttttaaccaaaataacattaggctttggtaatttgttgtttggaatggtaatgctccactcttttctcactgtatccatggacttaaaagaataccttttggttgaaagtaataaaaaattaaaatatataatattttttttttgaacttgaagcttcattaataaaagggaacaaagctaacaagctaatacaatgaaggtaaagaaccattatatatcaactctttatctaattctaagcctatttttgctaaattatgggcagaagtattcaagttcttactaacataagtagcttgaaggctaggactaaaggacaaagagtttctaacacttacaagcaaatcatcaaaaatactactattc

SEQ ID NO: 124819 - DNA, 2014 bp, Cannabis sativa
  modified_base (708)..(710): a, c, t, g, unknown or other
tataggccttcgggcaaacttgtaattttaactattgtaattaaacttgaacttataaagagatttacataacatgtgaatgttttgtaattttgttgtttattttgaattaacataatttggggtgtatattttgttgtttttgtgttgacgttttgttgtattgtagtttattttgctgatacaatttgtgatagatttttagttgcttttgtgtgtgtttatgtttttgtgttttttcttatataattttttgaatggatacaatttgaggttgatgttttgtaattttgtgttgctatttttgtactttttttttagtaaattatacttttataaagacagtatttttttcgagtcataaaatatttatacaaaaaatgtaattaaaatataaatacttaagtttaactcttggctgcaaataaatatttaagtttaatttttgacagtagtaatgcctaagttatatttctggaacttatgtaggtacctgactgttaagtgtcaagtcaatggccacatggcggtctttaattggtccaactcattaaattttttattttttatttaaaaataggtaaatattattttagatcctgtattttgcaaaaattacagattagatcatctgttttattaaatgataaagtagaccttgtatttttcaaaatggtacaaatatgatcctgaactgattttttgtcnnnataaaacttaataataattcgaccgagaggtgttatgacaaaagtggttaaattttctgcatatgtgcgtgttaggaattgcctttaagttgattatttttttaaaaaaaataactgtcgaaaattaagctcaaagtcctatttgtaccattttaaaaaatacaaggtctattttttcgtttaacaaaatagaaagttcaatttataatttttacaaaatacatggtccaaaatagtatttaccctttaaaattcatgatttaaatgtaccaataaaaaatgatacgtgtacattaacttggtagttaagtaccttaggtattattaataatacctatgggaatatactatgagaatatataaactgaaattataatttggagggtaaaaataattaaagagatgttacgtgaaattaaattgcttgaaattataatgtgtcttatccacgaaatccttgaaattaaagtttaatatttaacgtgaaaatttgcattaaaaaaagagtgaaaattctaattttatttatatacctgttaataattttatgaaaatgatgaaaagaaaaaaaagatagagaaaaatataagtatttcattgatataacaaaacaaagaaataaataacaaacaagttaatataatatttgtaaggcataacaccaccataaactagacaaacaaaagaaaccatgcccaaaaaataaacaaaaaggataaatgtgttagccctagttgcttgggattttcgggtcgagactagtcgaagcactattactctgttggtttggtccatttaataggagtgtaagtgtgaaccgagttcttgagttgcttcgctatcttaagcgattcctcttgatgcgatgctttggttgattggtacattttattgtgtgcttcttccaaagcaatacgagatatgaaatttttggatttgagtacagtttcagtctctgattggagtacaacacttctccaattcttgttctttgttatgtccgtcgcaatctcttgagctagagtttgagcccttgataggtccattattaacttttttatgtagaaattatgactttgaaattatgaaaataatcttgtagggatgaatgaagtagagcttatgactttaaaataataataataatggttcgattggtatatttataggttatgaagaaaattcgaaatcctaatcctatactaattaacaaggaatcgatttaatgtattttttgaggttttctaataaatatatattatttttaaaaattagtccaatggggggatgacacttgaatattt

SEQ ID NO: 124820 - DNA, 852 bp, Cannabis sativa
cactaccacccctaccataaccagaggtaggaggagtagtggccccaccaataatttgagcccctcgggactcttaaatacactcaattccacccttagctcacagtgccttatctaccatagtagcataggaagtcgagtcatccatggtaatcatcaaatcatgtttaatcttagaattcaatcttgctaaatacttttccttcttgctgaaatagattggcacaattcttgaggctaatcaggctaatctatcaagctgaatcgtgtactttgtaactgacatattctctccttgagccactaactgaactcttttctctttgtactacgaactgcttcattataatacttagtgttgaaaaagttttggaattcttcccatgtaattctggtaacgtcctgaggagtaagggacaccatatcccaccatatcaaggcatccttctagaattgaaaggtagcgcaagtcatccaatcattgttagtgacacccatgaaatttagtattctattgataaatgttagccattgctcggctttcataacctccgaacctcccaaaaaaacaagagatgcttgcttacaaaatctttcatataatggttccatatgattgccaacagcaatcggctccacttgcacaataggggcaggagttatctacacctcgggaacaggcatcgcaggagcatcctgctgccttaggcttcagatttcttcatcttgatcattaattcttgcttgcatttctggaaacctctgctcctaaccctgggtagcctatggtgggttaacattacctcgaccacaagccatacctcttcggcctctacctcgaccacgaacatt

SEQ ID NO: 124821 - DNA, 1992 bp, Cannabis sativa
agcaaagaactatccaatcaacccaagttttaataaaaccaataaaatttaatgtaagcccaaataaaaagtctaacataacattgttgctaagtaaattcactatgtgaatcaattacaaaatatatacatgatcaaaacaccttaaccaactaacatagtagtccggttctaatagttaaagagatatgctaattacaaccttctattacaattttttagtcaattcttactcttacgtctgaaatcacatgccgaaatatttttttttatagcggtattcgttatagttacagtatcatctttgtaaattttgaaaaattctgaatagtttatagtaccgaaaacagagttcatgatattctagtttaccacgcgcgttaaaaaaacttcaaacgtattttcggcactgtaaactattcgaaaatttttaaaaatttacaggggtgatgttgtaagcataacgaacacccctgtgaaaaaaaaaatattccgacatgtgttttcgggtgtggaggttgactaaaaggttataacaagaggttgacggtatcactcctcatagctaaaagctaaattactaactgaaaataactaactccaaactactttaagtgattcccttaacatttagtctcatatcaaaataaccttaatcgatttaaaaatgacttttttttcttctttctccgcgattatgtatctagttatctctactaaacaattattaatagggtgcacaatatactatttttccgaagtggtggaccatgaaatttatttattttatgtattgttcatattcattactttacactaattaattaatgaatataaatttaaagtttaacccagatcaacttctaaaccacatacttaattatgaacgtataatatgtaattaaaagaaaatacaactttatcataaaattagcattcgtgatcttacataaatatataataggtacgtcccttataactcgtactaattaaatacacaaatttttatttcatgaagcatagccactactatatgatatgactattgaatagtgccaccacctctttcattagttgcatattaatctttagcagcatactcaccaccgcggccgaggccaccgcggtcttctccttcaataccaagtccttcttctgtagtaccggttcggttatcgctttctcctctaataccaccaccaactcctccagcactacctcgttcgccgactacactttcccttgttccaccagcatagccgggtgtgccattagtatcaaagaaagcactagaggcgtaagaacaaattaccaaaccaaataaaacaattaaaaccacacttattgtaattttatttgtatggatacccattttgggaatgaattgatattattacttaaaattgttatatatgttaacattcaagaaatgggagctataaatagggaaagaaagagtttaataaatagatttgtggtgtggatgcccacacataatcatactatggttaatacattttatgtatggttcacttaatgacaaaatcaatgaaagaagacatgaaaaacaaagcataagacacattggatttgtcaaaattatatatatatattttccccaacttgccattcacaataagttgatgttagctcctttttattattgttattttattgctctttaaaaaatggattagtgttaatggaatttatcttgaattaatgacttaataattattctacgatatttaataacattgagaaatcaccaatctcttctggagagctgtagatttttacacataggattattcattttcctaaatgtcactattaagatatggctatcttatttctctcatgtgtattgtataattaattagtcgataatgaccattaattacatttttattataaccatcatggttatatttttttaagtcatcattggattattattaaatggttgtgattaatttggaaattaaataa

SEQ ID NO: 124822 - DNA, 1069 bp, Cannabis sativa
  modified_base (44)..(46): a, c, t, g, unknown or other
gcacgagtgacaacttcggcaatcactatagttttatttgtttnnnttttttaaaaaaataaatataaaagagaaggctagtgtagctaaaattttaaaaatgaaggttacttagtttatataaaaaaaactttttaaagtcatttaactaattatccccatcgtttttgttctaaaggtccttgatttcatctgggtttttcataaataaggtttcggtctctttcttcttcttatttgaaatgaaaattttctggatttgctttcaacgtttttaattgtttcctaatagaagaatactttcatattattactttattagtgtttcagcatgaaattattaatttcaaaagaacatctatgtttgttttgttgctattagattattcatatataaatatatataactatttgtatagttaaagagatttaattacaaactaactttctcccttatttgctccaattcttctgctgttaaaagaattgaattgttatcgttctttcctagcaagacgactacgactcctccgcctataaataaaaaaaaccttctttttttgctttttagtatttattaagttatgtcttttaatttttggtttttactggattttaggtttcattttgtaatttagttttgtattgtgttgtttgctcttggtgttgatcgtttggtctcagttctctctatttttcttgttagtgttttagtagttttttgtgttaggtggagtttaaattttctaatggttgtagggttttttgtttgtgttttttagaagttcagtgtgtttctgattggtttttagtacttttttttccatctagttttttgagggagagtttataaagtttactggtttctttttcagttttggtttgtttttgagagattacgtttagatgtgattttatgggttgttaagttttatcttttaaatgtgtatgtttcatcgaattgattatggtgttttgtgtggattttttcttctaactgggcatactttaggggttgtttattaggttctctagttgttaattcatttgttttaagaggtttagtagt

SEQ ID NO: 124823 - DNA, 1389 bp, Cannabis sativa
  modified_base (1240)..(1242): a, c, t, g, unknown or other
tatataatatagtttggaactttttaaattgacgggctaggttcaggtacaattttttgaacctgaaaaccgacaaactcgcctaatatttagccctacatagggtacatcctttatttcttctttctcttttgctctactcgggcactattccttcgacaaaacaaactatctgcctaacagaacgaatgcgctctttgcatctttgatgttgacttctaaataaatttcttaatatacacaaattactttaagttggctgttccttccttactattccttaaaacttcaatatcaagtatcttttgaactgatccaagccccttcatctcaaattctcttttaagctttgttttgatacttttgatcacgaatttacctttgctcatgatgagcttatcgtccacatagagcaataaaaacacagctatatagattgctcaaaattctcgaaatataaacaatgatcatatgtggatcgtttgaacccgatttgttacatacaagtatcaaatcttttattttattgtcttgtggactatttcaaaccatataaggacataatgagcttgcacactaattcaactcattttttattctacttgaaacctaggtggttgcttcatgtagatcttttcatccaagaattcattaagaaaggtagtcttaacatcaagttgttcaacttcaaactctaattgaacttccgatttccaaagacaacatcaatcttatcgtcttataatttactacaggtaagaagatttcaatgtagtttattccttccacctaaataaaacccttagccactaacatggctttgaacactggttcattctcattaattccctttttcatctttataatcaatttgcattccatgatctttttataataacacagtatttttgattttttttttgtgtgatagtatttttgaaaaaactaactcaaattctagtatttttgtaagtttctctaattttaataaaaggataggtatgttggtattatttgaggaaattacactacatacctcttttaacttgatgcttttaatttttaccctttctttcaaagcctatgcttacctcatttttcaattattctaccgattttacttttatcacttgacgatagtttttatttttctctaatcaaaattttaccctaaatttcacacaaacctacacatccatctacaaagaatacaaatttattatgtttaaaattatgtctnnnttatgtgagtgtgtgaggataatttgagtataatactcataaaaaaaagatatatttatattaaattttatttaaaggtaaatttgattaatgtataaaaaagggataatttcacaaatacacaaaagtaacaaaaaaattataaaa

SEQ ID NO: 124824 - DNA, 1011 bp, Cannabis sativa
acactccaactatagcactaaaaataatattatttattattatattattatttctaataaaatacaatatagaaaaatatctttcaaataatttattttacacacttataaaagagttatatgtgcaatagattattattatttttttttttttgacgtgttaaatttttttagaattttttttaaaattttacatgatatgttagatacctacaacatacacgaaatatcgaaacaaataggagtttagcgattgtattgtaaaattttgtataaatctataaatatatataggacacttttatagtaggaaaaccttttctatctctatgataagaacacttaattgtacattgattaatgatctaacagtgtggcaaaaaatagaagagtgtgatagtgaatatagagtttactcgtacatagttcttcaattttttaataatagtttaatatttttttttgtttgtttattttcttgacaaaaattatatttactttatgcaaatttttttatcaaatttttatttttttcaattagcaaaagaaaaattagaaaaattaattaatttttctttttcttcaaaaataaatttttctatattaaatttttgtgatcaagctgttatcttttactctatatgtctgtaaattttagaattgtttaagaaaatatggaggttactcctaataattctatttattcttgatcttgatgataacggaaagcatttaatagagcttattttgtttttattaatatttatggactaaaactctggtatccttttaatattagtaaaattaatattggtatacaatatagagaaatactaaaataagaaaaaacaatatcaaactattgatataattaatatctcatatatttttattttataaatatatcgttaactatttgtaagacgatattttataataatattaaatattatcaacacctaaggtggcgtttggttggaggtaatgaaatggaatagaatggaaaggaaa

SEQ ID NO: 124825 - DNA, 687 bp, Cannabis sativa
tatatacaactgacatttgcaaaaacacggtttttcaaatacaatgaaccctattcatcaaaaaaataatagtataaaagaaggaaataaagaaaagtaggcacagccgcaatatatagaaaatatgtgaagacaaagtttttctctcctgcacctaatgaaaagactgtcttttcataatataaacctgaatgactatttagtacgcgaaaatccagatgaacctgcattatacactaaaggaagtcacaagcgttttggacttagatgtaaccagtaaaaccgttcatagcttatttatgttctaacatgtttattttatttaatgccatttaatataaaacaaccattatcgatcgactatataattgaaaggacaactgctttgtatatgaagggatgacctgccacataatgaacttgatcactactttccaaacagtggactaaggtggtcgagttcttactgaaccactatattttttagtgtttgttgttttcattgctttcattgttgtttacttcttctatatttgcaaattattttgagtactcaatgacttttgtgtaagtgtttttatcctgtttgaatactcaggaatttttgatattgtctattaactccaacaatattcttatatatatatatatgagaaagcaatgatatatttatatatatactagatg

SEQ ID NO: 124826 - DNA, 919 bp, Cannabis sativa
aaaaagataaatcaagttgttaaacttaaataaaaaagaatgcgtacaaaaatataatgagttgatgttgttttgcatattgtaaataggttaatgttttatattttttttattgttttgtatttgtatttttttttttgttacatagatgttttcatgttgtttattaagttgtttttttaatttaattttttttttattttaaaaaatacggtattttgataaatttgttatagaaaaaatataaaagaaaatgtaacagtaaaaatgtaaaattgacaaaaaaatatgaatatttttgtaagacttcctttattttagtctattttcaaactcttttttgaacatgtagataaagtttggttaggaggaatgaaagcaaagaattgaaatgaaataaaatttaaagttgataaaaatttttatttttttttctattacaaattagaatagtaattttatcaaaatagtagaaaaggtattttatttgaatgatattcttatactttaaaatacaattaaataaataaatgaaatgattttttttttttaattttattttgttacctccaactaaatgtagagttttttttttattattattttatttcttttgagtcttttttactaattaatatataaaatataattttaacttttagttcattttataattcttttttatatttttcaaattttagatacatttgattagtttttgtttattctatactaattagtattcaaagcgtattatatttttttttatctattttctactatattattgtgatatctatcttatactcttccaagtattgaaccacaaccacaatagcaacaacaacgaaagagtaccataaataccctcaactacatattagtatctaaattaggggtgttcactaagtattcaatt

SEQ ID NO: 124827 - DNA, 625 bp, Cannabis sativa
aaatatcgaaataaataaaaaacctaccaagaaggatattagggaattttttaaattttatccgaaaaagcagtaactacacaggtgtattgctaaagaaaatatttttgagagcctttaaaggtgtccagtatttcatatggaaaccagatataatgaattgttttggactgattacgtggtccagtcttccagaagttacaagaaggaaaatgaattcattaaataacataataaataaataacatgatcatatgatgttaaaaaaaaaaaaaacatgatcatatatgtttataatattcatgccgttaagttataatgccatctgaactttacatgctaaatacataaatttatatatatatctgtcaaagacgtcatgtctttaagcttaatatgttcaaatgaaatatttatttaaaagagatggatttaataagtattcttataaatttaaatacacaaaatttctcaaagaaaaaaaaaattgatgtggggttacttttgcctccgaactactcatcatcacgtataaatttgtaggtatatggttaatagaatagaaagcgctgccgacttcaaagttagtacgtatagcacaagtaattgaaagggcagtgctttt

SEQ ID NO: 124828 - DNA, 1087 bp, Cannabis sativa
cagtgtaattacatggtcagacaaacatgtcaaattgtataattacctccaattacacacaaatccaattacattgtggcttttcaaacacaccctaatagtattgcactattcaaattgaaataattgctaattagttatgtatgtatacttaattattatgtaattattgttgtattttaaattatatacaaatgatatactcactttttaaaaaattctagaaatttcgttccacatctaatattttaaaaatatatataggatttaaatatcaaagttatatgtaactaatattaatcattaagtaaaattacagcaaggagaaataaaaaatcaaaacaaacaagatcactgagccattattacaattgggctggtagctcaataccaattgaaaagcataaaagattggaatttttgtaaaaatactggattttaggaaaaaatttcaattttactgtcacacggtagaaattatattaattacattgttctcctccatttttttcttttatactgtaaatacacaaaaaaaaaaaaaaaacaaaaaccgagacctccatcgtccacacccacggacagaaccaccacaggaataccagaacaaccagaaaacaactattaattccggcgagattgaggaaaaacagtgaaatcgatgtcaaataagtaatcatggcaaaacaactgtaaacaacactaaaacaaatcaaacaaaacaaaagaaaaaaagaattaaaaaaaactaacaatcttctgcacaacctcaacactatgcaataacaactatatttacaagctcaatcctcgaaaatcagaataaataaactactaaaataacacaaaaacaaatataaaactaagcagatataaccacttagaaaaacataaaagaaccacacacctcaaaaccttttttttagtaagctcgtcaaatgtatttattggagaaccataatcaaaaaaaatacacaaaacaaccatagagaagtaagaaaaatgtattttatagcctccatcttccacactcacggatagaaccaccacaacaacacgagaacacccaaaaaataatcattaattc

SEQ ID NO: 124829 - DNA, 1354 bp, Cannabis sativa
aaaaacgattcgatggacgagattcaaacttcgaaaattgatgattttcatcaagaattaattttcaccgttatatcatcatcaatggccaagatcagcccaaagtaattttttaatatatttttttgtattattttattaatattttaatcagacctccttccctataataggtaagctcctctagttcatttttcacattcttctaaatcttcataaggttagagcacatctatctcgactttctctctctaaaaatcagagttcttgcattaaccaattttcttgtaaatctcgtgagaaataaaaactcaaagtagacataactttattgctgtcgtaacacgaggagtgaatgggtataaattttttgtgtctctctatttgcttacttaaacatatttctcctcttgtctatttagtgagcgagtgttggccaaatttatgcatcaacacttgcattttggagttgttccatatccgcatcacattaatttaatgttacatccataagttatttagaaaaataaacagaatgtaactaaataggctttagaagattttttgagtatagataaataagagataaattctaccagagtcataattggggagaaaaaaaatagtatttatgctaaattaaataatttgataaatttttgaaggggttaaaagtagggctaacaatttgtgttattgtatcgacacatttatgatacgatatgtttatggtgaacataaacacgatacaattattatttgtgtcaagactacaaatacgaacacgacactatttctgagcatgtcatacgacacgacgcgataacactttaataaccgtgttatgacacaaatatgagattgacgcatttaacacgagattaaacatgttatgacatgacacgaaattaacataattaatataattatagatataaacacaaatattacttataaaattcatagttttattttattattatttttttattacaaaaatttgaataaaagtgttttatgagattttttaatatatttttattttattttacatgatataaaaaaataaaaatacttatatacgttataatcgtgtcattttcaagttaagcgtattgacctaaaaatgacatgtttcataaacgtgttaaacgtgtcgacccaaattcaacacagaagttaaatgtgtcactcaaacttatttatttcttattatttttgagttatatcggtatactgtgttacaaatgctatccctgtgtaaaagtaaatatttgtgaggaaaaaaggaaacaacatcaattaagtaataagtaaaaggggttttttttcatttttacacttcaaaacaatt

SEQ ID NO: 124830 - DNA, 1215 bp, Cannabis sativa
  modified_base (423)..(430): a, c, t, g, unknown or other
tgaacgaaaaaatagagggggtctcagaaagatcgaaggagagagagaaaatggtagatcgggattgggattttttgggtcgtggggtttagttttgtggccgtataacatggggtggtcaaagaaggccggcgttgtgcgccgtgagagagagtgtgtgataggggagtcagagaaggttgggtcgtggggtaggcgactgggtgttaagattttttcaattaagaagaagaagaagaaaagaaaaaggaaaagtgttaaaaatggaatgggagtttaggtagttttgcccctaaaaaaacgatttttgtggtaaagtgttaaaaaatttaaagtttggtggtttagccgccaatatccaaaaaaaatatatatttttaaaattatttttttttctgatttttttaattttttaattttttnnnnnnnnataattattttttaaaattaattttatgtgggccactaaaaaaattgctacgtgtataagtgtgtacacgtggacagtccactgtagtacttaattgtgattttttagacggaagggtatagagcaaaacaaaatgggagtttaggtattttaaccacacaaaaaatcaagtgttaaaaaattaaaaatttcaataatttaaccgccaatatccctaatatatatagtaagagcaatgcttcttgaaaaattgtcatgaattatcattttaaatgatgtgagaatatatttattaaaaaaataatcaaaaaagtaaaatataaattaataaagtaaaaaattataacataccatatcatttataataggtttttatgatacattttcatgatatataacatttttcatatagtcatagccattagttataattagctacaatatatttcatttattatatcatgtgtacaattttcgacgaaacaaagtttcatttttcttcattttttttaaacaaaattgaaaaataaaatactataaaaaaataactatttaatttagtcacaatataaattttttgactaatcataacttttaatcacaacaaaaaattacttgtaactaaaacataaatttttattaaatgttctcactaacaaaatataagtctaattcataacttttacaaaacacaaagtccaaaatagtatttatcctaaaattaataaatttcacaacataaataaataaataaataaaatggccgcatagagtacaggtgggta

SEQ ID NO: 124831 - DNA, 579 bp, Cannabis sativa
tcccattctccacttgttgcactgtaggagaagccgatgaaaaaattgtgccaaaatatcgctcaatctcacctacaatatcctcttccatactcaattttcggccatcctctgtcataatctccacaatcgcattcttcttcttcctacccgttgctttattatgaaaatatttagtatatattcctatcccccaaggccaaccaatctgcacgagaccgcaatttccaataacattcctcccgggacaaaagatcatttagtttagtctcaagccgttttacctcatccattcgaaccaatggtgcagacacactgaggagatcatccaactgtttctctgtttctctcaccagcctacgtatcgaacccaacttactcttattcacgcccccaaccgatcggcacaccttccaaaaatatcaagaatacaatcttgactctccaaaggaacatctagagccaaccatgtctgattaacaatgtcatgacattcatcatctttcaaccaatgagtttcaaaccgaaagcatcttttcctatcattccgctgatgccgaataacattctcaagggaag

SEQ ID NO: 124832 - DNA, 822 bp, Cannabis sativa
ttgaatttaattgtttgaaccaaaatatataataatactaatatatataaatatattattttaagaggtaaacaataatatactccaactataattaaatctgaagccaaactaattaatagtaaacaatattcatatttacatatatagaaacacaaataattattattctaaatcatatatatgcaaagagaaatttgattttttatgcatgatttaatggttaattggttaggaaagcttaaactataagtaattgttagaataggtctactttacctaaatcccaaaactacccctctcaaaatcacacgcccattctctctccttccctccattctctttgttagtcccaaccccagtcgaaaccctaatcgtcccaaacgccggccacacacgcacggaggagatccaccggcccacgacgcaccatcacctaagcaccaccaccgtttttttatttttttttattaattttgtttgtgatttttgtgttaaagatagattttgttagatttagggatagattttaggttttagaatttcagatttgtgattttaagcaaggtctgaaggggtccgatgtaggtctgatggggtccgatagggttgaatgaaactgtgagtttgcgaggtaggagacgtagatccgatggggggatccgatgagttcgatatagggcccgctaaggggtccgatgggggtttgatgtgttcgattgtgttcgatgagggggtccgattgtgtaaatgagggtgatgtaaatggagggtattttaaggatatcataaaagttatcatatcctacaaatattagttat

SEQ ID NO: 124833 - DNA, 864 bp, Cannabis sativa
ccttagcaacgggggccccgacactaaaacaggacgacaagtgacaaacgagctaccgcaagagggatggctggccagcctttgcaaaccacaaagccagcatacctacttcctgcaggtgcctggatggccagaattagtcttggtaagactctggtgcacaactttacacgtggactgcaagctagatagcgaattgggccttaacaacccaataaaattgatggaaaatatctatttaaagggacattttagtcttttgtatttaatcaatttaatatgtaaatatttactgattttatttgtagattagggtttaagctccactatataaagagccttaactcaaccctaagtctaattctaaccatccgagtcattaagtcccatccaagctgtgaagctctatgtctcatagcattctcacactccatctctctcatgcgcactatagcatctctcaacacttgagatttgcaatctttgattattacattgtaaccttaagagagctatagcagatctcacctatgatgatttgaatagtattatctcttgttatcaatacaactaaaaggggttgcccgctaacatagggggtcgaagctctataaaatctttttgttctgtttctttctagttctaattgtgtaacatgtggcaagcatccgcattaatttgactccactgttggttggccgatttatgattcaacaatttggtgctttcattgagagagagttttcaagtaatgtgattaaatgccatggttaatcatggggttcatccccttcaaaaaccttttgacccgaagggcctcggttggtacgatctcttgtgcaaactttgccagacggtcaaatt

SEQ ID NO: 124834 - DNA, 970 bp, Cannabis sativa
  modified_base (845)..(876): a, c, t, g, unknown or other
aaccatgcaacattaaatgttgtttttgatctatattaataagtaaatctgattattttgaaataagttttatttagggaataaaacccaacacatatgagatagtatcgtttacctgcaacattgaaatccaaggacagtgttggaatcctcttcaacgtggaagccagtggtaaaaaatcagtagtcttgaaagttgtacatatacttcacagtgctggttggaaaaaccagcactctgtatcttttctcaagatgataaaggtcaatttttctcctattcttctccatggggtttggttttacttgataaaagtaaaggatttcctctagagatgcaacctctaccttcttggatcgacaaagcacgatacatctagccaacaacttgtagacttggggacaaatgagaatggagcaacacctacttttgcataaaagtgtgaaaaatagatcctaagtgtaatgtgtgctcccatctcaatatgggccaatctccagactctaaagtcgtgtacacacttccatagggattccccgaaaacagatagcatgctccagaacaagtttggaatactcttgaggtcacgatcctcttcatacatacagagggactcataatttctaaacatgttcgcgtattgatccatctcccagggagatgaattatacaccactactagtgctgcaacttctacttgctccaaagcttcaacttcgtcagcttgaatagtgtcagccatggtgtgaactagaattaagaacaaaaagaaaaatccaagtagataaatacctatactaaagaagatagcatgggtacaggagaatctgttgggttttatgcnnnnnnnnnnnnnnnnnnnnnnnnnnnnnnnnttactaataaagatcagaaataacattttatgttccatgattcacatgatttatttcatgactatatgtggataatgtatgaattctatttaag

SEQ ID NO: 124835 - DNA, 978 bp, Cannabis sativa
tgtcacttttaatgagcaagaatttccttataatactctattccccattaccacacccactgtcaactcccccatttacaatcagcaactttttttattcccagacccactaatgtccatcaaccccctcccataacatccccacaacaaccaacaccaattgctcaaaatatattgccacctgcccaaaccagaacccccctcttcacaccagcacctctactgtatcagcacctgctgtcaacaacagtcccccaatatgtcctagtaataaccaacatcccatggtcactaggtctaagctagtcatctataaacctaagacatatcttgcatattctattgatgataaggagccaacatcttttaaagaagcctttccaaatccaaaatggaatgctgctatgaacaatgagatggcagctttaaagaaaaagaacacttggattctcgtgcctcgcacttcagagatgattattatccaaaacaaatgggtctatcgaatcaaacttaatgcagatggatcaattgaaagactcaaagcaagattagtggctaaaggttttcaacaaactcctggaattgatttctttgaaacttatagtcctgtggtcaaaccttgcacaatcagaattatgctcactcttgcagtcaccaatggattggaaattcaacaaattgacatcaacaatgcgtttctcaatggccaactacaagaggatgtttatatggcccaaccacaaggttttgttgatccaaattttcccaatcatgtgtgcaaactcaacaaagcaatttatggtctcaaacaggctcctagagcctggtttgacaccctcaaaaatactttgattcaatggggttacatctgcagcaaatccgacagcagcctctttttctcactcaaaaatggtactctgctggttatcttggtgtacgtcgatgatatcctcgttggaagttattttaccaggatct

SEQ ID NO: 124836 - DNA, 1537 bp, Cannabis sativa
actaatcagattgtaaagagttttatttatggcacaaaacccaacaactgaaaccgttgttgggtttcaacttgtcagcgatacataattaggtacaagcggcaatgacatgtgagtgtcaggctatgacacaagcttgtctgattaggtgatgtgatacattagtgccaggttgtggcacgggctcacctgattaggtgatgcagtgatattatgtatgatgttaaattatgttacgggcttgcctaataggcaatgcaatatataatcatttttatttctgtgcatatggtttgttatggtatccactcttgaatgttattgtttaatcattttataatagtgaaatggataattagttattttatgtattcttctttgttacttttcttgctgagtctttatgactcacgggtgctttgtggtgcaggtaaagacaaggaaaagttagagcagccatgaggtgacagtcttctccagtaatgtacatattgaccccttcggcctgtgtaccgagttgccaggagttgttttgggttgtatctactgtgtatcttgatttcgtattttgaattgtcgttgtatatagtcctttataaaacttttataacagggatccccataacacatttttagtgtcgttatgatgtctatttttagtgttttattttagtcaattttttaatattattacggttttgttaaaattagttaatctactagtattaaactagtttataaaatttcatatgtgacgtctctatagattagggcattacaataacaatttacaagaaaattgtcgacatcctttcgacattatctcaataaaaaaaataacgagcataagaaaattgtcgacattatcttaaataaaaaaagaatagaatacgataaaattgtcgacatcccgttgacaaattatcaacataataaatcgcagaatacaatcaaattgtcgataaaatgtcgacattctatcgacatactcaagaaattctaaaaaaattatagcctaaccaaaattgtcgataaatatagataaaatatcgatatcctatcgatatacagtaaaaaatttgataaaactagttatgcttaaacaatcaactacccattttgattttcgttgatatcctatcgatatttcatcaataacaatgtaaaaatacacacaccactgaaacatatccaaaacttctagctatcatcagaaagaacacaaaatctacataaattcaactaatctcaagaacatacacaaattcgcatccaaatatatgaaaatctaatttttttcttttaaaaaaacttactttttgactgagcttggcagtggtggcgacaatttgaatcttaggctctgggtctctctgtggtggcctgcagtggtttcgatctgcttcgtggttgtggtcgtggtcatggtaacttggttcgtggtcatggtggtcgttgggtcacctgcgagaagggaaaagagagagagagagaggtatttcggccaaggatagaaagtgggaaggctcagttttct

SEQ ID NO: 124837 - DNA, 856 bp, Cannabis sativa
  modified_base (568)..(570): a, c, t, g, unknown or other
atgattattgattatagttaaaaaaaatatgacaaatttattaatatggatagaattcgaataaaagaaaaaggtaacctatgactattggctatggctatgcctaccattcatggagatttttttattctttttgtaagcaatatatttatggcttatttatactacaagtccctaaattatataggttttagcaggttagttctcaaattttactttttgacaaattagtcaccaaactatataaattttgacaaaatgatcctcaaactttattttttaacaaattagaccctaaacttttgttttcttggaaaaataatgtcatcactcttacataatggtattttatttatttagttttgttataattttaaatatttttatattgatatacgttatcaaattaaaaaaatacattttttttatttacatgtattttttttaaatatgccaaaataagaagaaaaaaaataaatcaaggcattttctttaaacatgccgaaataagatttttttttatttatatgtattttttttaatcaaatcaagacatattttgaacatnnnaaaactatatatacatgtgaactaataatttatctttttatgaacaacattcttacacaaaatatttctgttaccgaataatttctcgatactttaagcaaatattccttctcgtccaatagttgatgtgcatgccaaatatacatatgtatataagtcaataaaaatttttaaatgctctaattgttttccctaccattagaagaggatcatttcttaaatatattaaagaacttaatataaaatctattatatatgtagtaaaatattattttgtagccaaaat

SEQ ID NO: 124838 - DNA, 1466 bp, Cannabis sativa
tggaggcttgaagcggggacgttacaaatggtaataggcagcatatgagcatttagaagataatatatatttaatgagaaacatgattatgaattgtgagtagtaattgctatatttcgaaaagaattgtgtatgttagttagggttttggcatgaagtgtgtaactgtacaattggcgcatgactcactggtattgttgatttcagggttatttgaaagaatggaccctactaaatcaacatacagagtgagtttgtagagcaagataataatccagccaatccactagcaccgccaagacctctgcaaaattttgggaatactgcggggatgaataatgctaatcctctagtcgattggcagcaaatgtttatcgaaatgcgaactattatacttcgtcaagaagaagagttccgccaaattaggagataggtttaggcagctctggtagaacaagcgattcctctagttctggccctagtggtagctaatcctggatcagctctccaaccacatagagattcagttttttaacagtttgtcaagctgcaacctctgacattccttagtggcactgatattataaaggcataataatagatgagtaccattacttgtattctagataatatgggagtagttggaactgaacgggttaaatttgtcattttcatgtttcaagagcatgctcccacttgtgggatttggtaggtcggtctcaagacctttgtacggtgaccttggaagaattaagaacttgtttgaagaaaagttttataatatcgccattcgtacaactcatatgaaagattttgtgaaactggttcaaggtgataagacagtggttgagtatacgctagagtttgatctcctgtctaagtttgttggtgacttggtaccaacagattttacccgaaaacaaaaatatgttactaggttggatgccacgattagtcaggacttaaagattatcactgatcatggcactttgtataagaaagtggtagagagagcactgattgtcgaggaggttgaacaacaaattaagaagcaaatgttaaggatgtcggtatgatgtcaattcctagtgctggtggtaacttcaattaggggactaacggtggtatttctgatcaaaaaaggaaaactgagacttccaaatcatctggatcaaataagagattttggagaaatagaggcggccgtcaaggtcgtagtgatacattcaagtcatacctagagtgtcccaagggtaagaaacactatcagggtgaatgttgggccaagacatgtttccagtgtggtatggtaggccactttcttagagattatcttcaagttaagaagaaggaacccaagaaaagtaacaaccagaatccaagacgtttgtttacagtagtgttgtaaatactgttggattttattttaccaggatcttagatctattcacaagtatgttgtttaa

SEQ ID NO: 124839 - DNA, 2325 bp, Cannabis sativa
aggaagctttgtctcacctccctgtggtccgtgtctcccacattaatcgatctgctaatacatttgcagataagcttgcaaaatgggcttcggggctagacgaagtagcaatttggattggcgatgacccctgcaatcttagtgattttctttccctttaagggctccctttccctaaaaaaaaaacaactttatagtcaaattacatattttgttagagcatatccaacctatacattaaatttgacttgtgattgagaataataatgttacaaaatgaaaataatataaagtacaaaaaaacattagattttattgaggttcgaccctttatagttggtaatagcctactattttttttttgtagtattaacttgtgagaaggtgaaaaagaatgacttattctctctcagaagctcttataatgatctctgagcaatttattcttagatcgaggtttctctcttgagtgttctctctctctctctcactgaatcttttcgtgtccctgaatagtgagatgagtccactatttatagggattaattacatgaaattactgagaaactagtttattttcataattacaatgaagaaaatagaaaacttaggctaattgctttattctttgaagacatgaaccaatcccatgaatgtagcgattgtaccatgacttggaagcttgaagatatacgagatatatctcagaaattgctaacttgcgtcccctagccggtgcatgcgagctacttgcttgatggatgttggtcagatgtttatgcactcggatgtgacaacttgtatctgtgagtttgagaattaatatttcttatacgacttactaggagtagaatcatctgcctaagtacctgggaatcgtgcccttaatagcccaataaacttatggaaaatatctactttcaaggggaaatgtagtctttcgtatttaatcaagttaatatataaatatctaagggtttcattgtatattaggattttacgcttcctatataaagaccttaactctaacctagaaaacctaagtcgctaagtctaattctagcctctaagtcactctaagtctaaaaccctagcctctcttcctctctctcttttacacgcctaaaaggcttctttcttcctgtctctctcatgcctctaaggcaagacatctctctcattattgatctgcatacttgatccatgctttgtaaccttatagaaagctatatcagatcccaccaatagcaatctgaatagtataatctttaagtaccaatacaaccaaaaggggagtaggtcattaaccgttaactaagggggcggaacctctataaaaatccttgtcttatttactttaatgtaacacgtgaccaacattagattcattcgacgccgctgtcagttgatcactttctgaggtcaacactgctaaaatctctattaaagctttcgagaataatcaagaacttcttgcttcttttctcacaagttaatataagtaaaatgggagtaagctattaccactatcacggggccgaacctcaacaataaatttgtgttcttattgcttaattattatttattatctctaataatttaaattggctgaggataattggctaaaggtgaggtcaaaaattatattattagtgttctttgatttgtttgttacaagatgacccctcagattagctcatacttaaattttggaaacttagtatgtcaattgactaggaacgttaatcataaatatagaaatctaaagattctatacttttttaaacgttgaaatgatggtttcctttgagtttcacttaaaaagactaaatagtggagtactcatttcagtttttatattactttgcttaaatatcatttacatgtagttaagtatttaaaggataaaatatgaattttaccctactcaatgtagatcatctatatgggatcaatgattgattttattgtaataatagataattcatagcatatatattggagatagagagcattctatgtaatcaagagtagaattccgagtctatagtgtagtcatgaggaattaatatgctaaaaaaattaaggcaataaagttcgactcgtttttatgcttttgtttatatagattcactcattgttaattactaaataaggagtaataatatatgatttctctctattctttttagggtttctttctaaaagttcttagttgctacttgatttttttacctgatgagcgctccccgactgtaatatccaggttaaaatagtatttaatttttttttctctccttgggatattaattgtgtgaggataat

SEQ ID NO: 124840 - DNA, 1043 bp, Cannabis sativa
ataatttaattactctttatataataaatctttatcgtattattaactaagttatatatatgttaattaattgaaatattaatataattttcaaaataatgcatgcaggttttaaaagggatcaaatgcgtttattggggtgtatccaggactacactagcaaattgtccaaaacaatctaagaaccaagaatgtagtttttgtgtattaaaatacatcagtaacattgttgcatgtgcaaatcttagtaattacttaatcaattaaaaaactgtaagttttaattattaattaacttatttattatattaacaaacaatctaatatatatactaatataaatatttactttctttatagtttgggaaaaaaaaaagacatatgatgcaaaaactgatttgttattgtttcaatgaaagtgtatagaacacttgctagcagtgattcacgaaggcgtggaatgatgctgaattgtataaaaaaaaaattattcctttattttttatgttaacttgtaattttttactctattatttttctatgtttaaaaataaaaaatttccttgaagatgcttactaccataactaaagggaaaattacacagtatactattttttgctaatttttttatttttatactgccatgcggtataaataatatttatattgtataattttaatacttttatatcttagtatactgcatttttttaaaacttttattttgtcatttttggtcacgtgtctcattagggttacaccgtatcaataaattaaaaatctttttatatataaagtttggatgttgatgtgggctatcacttttagtgacaatttcaatttttttaaaatgtttttttaatatttttttatttttttattttttttacttaaaattaataatgataaagacgagacccattatgtgctctcattttaatttttcatcatatttcttattctttctctctccatgttcatcatcatcatcatcttcttcttcttcttccttcttcatgggtttctttttgtttgtttgttt

SEQ ID NO: 124841 - DNA, 1044 bp, Cannabis sativa
ccagcccgtattgtaccatttaatttgatttacagcaaagacaaatatggcttgactatcactccatagtccattccaaatatctccattaatttaaatttcattcataatgaaatagcatcacaaagaaattattccctttagaaactttaaaacactagtgaaaaaaataacattaaaagttattaataatttgaaaaaaaaaaagttctattcaataatatgaattttgaacaaaaaagactgaatattcactttgttacaattgtattaacattttcctttaatttaagtcccacaaccattgccgatagtttgaggttctgtaattgaaattcactaattttaatattttatattatgtagacacatagacaaaaagaaaaggaaaaaaaactaaaaaaatataaatatcaagggacctaaaaataaatattaattgctaagaaaattttatttaatatgttgaataaaaaataataatttattttaaatattgcataattaattattaatttaattttataaatagaatttttttttaataatcacctattacaactcattgtagaaaaatgtatttacattttgaaggtaaccatggaaacctctaactatatattatatatataaatatttacaaagctacaatatttttttaattatctagggttaataataaattactcttaacagctattgaattctatttattttgccattaatttttttattttaagagatcggttatggagatttcaattagaagttttttcaataggttggatacattaacatgtgaaataaaaccttaccttgatctttattttatacaattcttttttttttaccacattttctaattatctattttatgtataatttagaaattgtgtttgatttttctcaaagatccaattttaataatttgcacaattttataaccagagtgtttattggaggagaaaggagagtgaagtattatttgatgctcgtaataatctcatttagcttcgaatttatttggtaattattttgatttgg

SEQ ID NO: 124842 - DNA, 2397 bp, Cannabis sativa
ttttttaaaaaaaaaagaaataatttttagaaacttgccataaaaaggttattagattattaccttatttttatatttctaacagacctgacaaaaattttttagtttatacaaaaccctagacttattaggattaactttaatttgaatttgaatttttttttcattttataaattaattaaataataaagaatatatatgtaatcaatcgtataaaagctgcatttaaatttaaatatatcaggctcctcaaacattcatatttacaaaatcatactttcaggtgtactaaattacttctctttaattttcatcctttccttactaatacttattatacaataaattcaatcattagaaactcataaaataaaaaagcaaagatttgattacttaccctttttagataatctttctatgatctgtcgttatttcttcaatctttctcaccaattaaacctaatataaagtataaacgatttagaggagaaacataatggatttggctagaaatatataggtattatatatataggtttatatttctcaaagacttgacaaaaagtttttttgttaaacaaaaccctagacttattaggattaactttaatttgaatgttaaatttagatttctttcatttataaattaattaaataataaagaatatatatatatatataatcaatcgtataaaaactgcattaattaaaattaaatattttatatatataattatatttttttaaaaatgattaattaaattcttagttaaattaactatttataatttgaactttaatttacagttatttattaatttgaacactaatcaattatatataattaattatcttccttagttttcgaaaattatcttttatatcctttatatatatcatacatatctacaaatatttaccaaaattgacaattaattttttttaaagaaaatatgggaacttcattaaaaggcattaagccaaaaaaattggaattacaaaagatagacaaatttaaatagctaaatcaggggaaactcggccacctaaatctaccgctcgttttgctaaagaatgagcaacatggttcttagaccgattacaatgcgacagggatatgttactgaaagaattccgaatatgattaatatcattaagaacaataccaaattcattgagacaaggagcttttctattgacagctaaaactacccactgacaattggagaaaacagcaatcactgtataccccatctgcacgcagcaagaaagcccatggagcagagctttggcttcggcaacgtgagattccaacaatctcacccaaggatcagccgcactcaagaataggacatgccccatacgattagaaaccaaagccccatccctatttttcgattctcaacacaaacccaagcatccacaaaaagattgaactcaccaagaaccagatcagcctcagatgagcccaatcgattacttgcgttgccaggagccggacccatagaagttggcacaatattattattagcatcttgatacttccataaataatccatgtcccaagtactaaccatgttatcaaaaaggagccgttgatcatgcacaaaggtatttcgcctattccaaattcgccaaccaagggttataaactgttcaagttcctgtcgtctcaagatatccatacaccatggcgagataaattggcataagccaggatgatattcaaacatgtcttccacacaaatttttttatcttaggcgggagatttagctgtcaaagaagtttccaccaccgagaagaccctgaggagcccgaagcttggccccaccccaacctggacacattactccaatatccactatttaccgagaaagaaccattatcagagaaataccaaataagcctattctaactatcaaacaaggagcatgggagacaaaatgacaaaattgacaattaattaaatgagttgatatacgataagttgaaaataatataaaagtcctatatcaaatatgattaatttattagaggaaattatattatatatctattttactttcttttcatattctttaagatatatccacttttataaatgattttttcattagacctcttagattaatgtaaactatatgctagacttagtagagaataataatatattggtcaacccactcaaaaaaaaaataagtatatattaataaaatataatatttctcaacttatcctgatttatccttagcaaaaacaaaaagaattaatatgattaatttatgtgaaaattacatcaaatgtgagtttttaaaaatattttacttaaatatggcatttttaagtttgtacacattttatggtagttttgtatttttagactttattatgggat

SEQ ID NO: 124843 - DNA, 1004 bp, Cannabis sativa
ggcagagtatgtgttgggtttgaggaattgccttgagtgcgtgtttggtatagagcaggtacagagggagattctcctgcaaatagcaagtttggttgaggtgtgaaccgagaggaggaagcaggtagagttgctgaaattgatttcctagccaatcgggtgagaaggggccatgcattcccttttgaaaaatcagtacggtaacgatcgtaactatccgaaggtaaatttgcgcctttcatccatggaccaaaagggagatcatcatcattaccattatccatcctttccataaaagaaacacattgttcaaagggatgcccaagtttcccacattcaaaacagaattcaggtagtcgttcatatcggaaatccacccaaaattcatcccgtatattggggagtttaatcattcgaccccttggtaacggcttggtgacacataacttcactcgaactcttagaaaaggtccccaaccctcattggttgaatcatcataaacctcaataaaatcaccaataagattacccaatgcttcagccagttgtgcagatttactcaagaaaggaaggcgataaatctgaacccagaacggagtaaaaatcagatcatccattgaggcattttgtaaagcatctggtgtgtgcaggacgatgagatgattttggaaatgccatggttctttacgaagcacacgaagtttgtcacctgcacaagcaaaagaaacatggaagatttcgtcattgtaatccgatatggtaactgggaaccgtcccttccataggccattcatttgatcacagaaccggggtttgtatactggtgtagaacagagaacacgggcgagaaggacatgagcagatgaagaattgtttgaagtgggaatggagtcagggattacaaaaacattactttcttcattagtgagtgatagtgtagagtgcaaagaatgcgaaagaggatccatggtaggcaatcaaagtgcagagaaggatgggagcat

SEQ ID NO: 124844 - DNA, 3067 bp, Cannabis sativa
  modified_base (437)..(437): a, c, t, g, unknown or other
  modified_base (1006)..(1027): a, c, t, g, unknown or other
taacacaaacagggcattctcacctatgagagcaatattaatattctctttccatttgacaaagttagctccagagagcttgttgtcagtcaacagtgacataattaggttgttcatagtcattttgaaaactacaaatatcaataaatagaaatcaaataaggtccaatacaaaatcatccacattcagaaattattaagcacttagcaagtaggaatgacaagtgaaaatacgaaaacaaacaatcctaaataatttctaaggtttccaacaaactaatacagtgtcccatttaggcaagagtaaaggatatcattcattgaatagagcagacagctcgtctaaaatagataccattctagcaaccttttattcgatcaagatgagaatccagcattgtcctgtttaggtgagagtcaaggccattctatcttangagcttccaccattgtttcagattttgtaagccatacttttagcagccactattggggtggacgttactaagaataaaagacttaccataatacttatctttcaagattctatgacgttaaatttctaatgaatgaacatttattagggatgaatctcactaaaacaagaactatgtagaaccaacaatagagattgaatttccttataataaagctcattattaaaagtatgtattttcttctaatatttattttaatctatttatattaatatatatttatttaattaaaattactaatttacataactctaaatataaattttagtttaatatttataaaattatacttataaagattcaaaaattaataaaattattttccatcttagtattaattttcaataaatattacgaaaattacttaatttaagttggtctaaaattattttcaattcaaatttaattttctaataaatatatgtaactaaatttgaaatccaatgtatttaaaaataaatacatttttgaaatctatataaagtaaaataaaataaatcttgaaaaannnnnnnnnnnnnnnnnnnnnnaaaattaattaataaattaatttcaacagaaatataagtttcctatttaattaaatttttaagaaaatttttaaatatttaagtgtctttgaataaaatcaacttaaatattaattatatttaattaatatttaagttgggttccctttaaccaaaagtgtgcttgtggggagatttatcccagcgggggaaatgaaaagttggattaagtttaaatttgagtgcctcccaatgatctgctacaagtgtggttgctggggacatgaacaacatgattgctctaaattaccactacgggagatattggtgacgatcggaaagtgttaaaatatggtagttggctgaaagacgaagatccagtccccaattgcattagtgctcacacacaataggaggcaaatgcgatatttgaagttgctcaaacaattgtgccacgaggaagcagactttttgagtttgatcagactggtatataacatgagatcggtgcatcacaaatagagagccaacgggagacagatcatgggctgatcgtccaaaaatagttaactcagaccaagacagatgaggaaacggttaattctgaaataagaggagcacggggaaacgtggtggatagacttcaaatgggctttatggaggatgggtctgggagtaatttaggcctacatgtgaataaaaaaggtgagtgtattttgactgcacctaatatgcatggacgtactgaagacaaaactattatgtccaagcccatttcacatttgggtactgatgagccatttaggagtgagtggtcaagagggggtcctcataaaggggtctataggattgagaatgacaatgagggcgaaggagattctaaaaaatggaagggtgagtatgggcaaattattgaagatagagctagagaaggaaaagatggggaaattgggcatagggataaagaaaaaaatattattgatactattcccttctcatattcgattggtaatctaggggtggaaagggtgggttgtaagggtggagagaatgacagggtttgagcaaattatggacaaagaaagaaactctttatcaaaaatagagcacaccaggttcatggaaaaactttggtggaaaaaactccccaaccaggaatgaaggcggaaatggatagggacatggagtatatggcgggagagggtgacccttttatctttggaacatctataggggcgaatgggactgagttgactgtagctagattaaacaatgaggtgagtatttctcaaaacacagatttctcacttcaggacactgaatttgaagcggcgaaccttgctttgcaaggccgccaagcacaatgaaaatactgagttggaatgtccaaggaattgggaacccttggacattacatgctcttcaatcccatttcaagaatttaacccgagtattatctttttagcataaagtaaattaactagagtgcaagcggaaagattgtgttcagttcttcaatttggtgcaaatttttaagctgtggacagggtgggtcttagtggtgggttgctattgatgtggaaagaggagttacaggttcatgttttttccagctccctgggacatatcgtggctgaagtggcgagacaggattttctaccttggacattgacttatttttataggcatccgaatgctacacagaggaagttcttgtggcaattgttaaggaatataaaaagtgaggtgcgtaggtcgtggctacgtattggtgattttaatgagattgttaatttagcggagaagacgggagcaaggacgataggtactggcgctatggaggactttaaagaggtaattgatgattgttgtttgattgattttagttctatgagattggatttcacttggtgcaatgagcatggatcaaatcaaatcctggaaaggttagataggggtgtttgtaatgaaaattggctacaatgttttgaaaaagctgacattcgtgttctcgattggtgggaatcagatcataggcctctttgttgggttttgtgccct

SEQ ID NO: 124845 - DNA, 1254 bp, Cannabis sativa
atccacctcgatgcatgcctttgagatcttgtgtcccaaaacaatcccctctttcaccataaagtggcactttttccagttaagtaccaagtttgacttctaacacctgattagtactttttctaagttcctcaaacaatcgtcaaaagatgaattgaaaactgagaagtcatcgataaagatctctatacaaccctcaatcaaattataaaagattgtcatcatccacctctaaaattttgctggagcgttacatagtccaaatggcattctactaaaagtaaaagtgccatatgggcatgtagaagttttcttctcctaatcctctggtgctatggctatttgatgataaccaggatagccatctagaaaataataatactcatgtccagtcaaacggtctagcatctagtcaatgaatggcaaaggggaatggtcttttctggttgccttgttaagcttcttgtagtcaatgcagattcgccaaccagtaacagttcttatagggatcaactcaatcttttcattcttaatcacagtcataccacctttttttggcactacttatattgagctgacccatttactgtctgaaatcgggtaggccaccccagcatctaaccacttgaccacttcctttctgacaatctctttcattggtggactaagtcttcattgtgcattaatagtcggtttggctccttcctccataagaattcgatgcataactgttgagggacttattcccttgatatcagccaatgtatacccaatggccttagtgtgcgctctgagtactcttaacggcttatcagtctccacatcagaagcgaagctgacactatgactagcagcatcttgtccttgcccaaaaactcataccaaaaatgataaggaagcaccttcaactaaagttctagtagtttttctacaaatggcacatgcttctttggaatgacccccaactcttcaaagtattttctattcaatggcccatagtagtcaagtcattttacgtattccagcgcctcagttccatcttgctcatttagatcttcttcagtcaaactcacttctaatgaatcttccattagctttctcttttccactatggtgtctacgagatccacaaagaaacagttgtcatttgccttagaaaaagtcatcgccttaagaacattaaagaacacttcgtccccttgcaccctcagcttcaattcgcccttctgaacatcaatcaaagcttggccagtt

SEQ ID NO: 124846 - DNA, 807 bp, Cannabis sativa
gtatcaaagattacaaaagcaattaacttaaacaaaattactccatctaatgatttgttgcaaccctttgtaatccacctcgctaatatgatctctgaaacacaccaagtgaactcccttcaattattgatgcgtgctcactttctcctgaaatgagacttagaaaagtattctctcgaacaactcacacttgttcgaagcttttcttcaacatattctatgaatagcaagagatcattacaagaaaaccaaaacctagttgaacactctaagtttttacaaaagaaacactcttctcacaaagctaaaatatgagaatgagactagaagagatgagaaacgtttggctagctactctctaggccctatttataatacataaaaaccttagagacagctacaaacacgttacatctgtacaaaactttcttaaaaaataccctaatttacagcaacaaaatcacactttgcagtgacagatcagggccaaattggaaaactttctaaattaatccaatatcacgatttgggctttaattcttgtatataaagattatataatctgctatattcataacaaaaccaatattattaattaccaaaaggaaaagtaaattttccaaatttaggcaaatttgtataaagagaattccctctcttatatgacaagtttcttaaaagaaaaagattagctgtaaccaaaagtttcttaaaaggaaaaaggcaaccgtagccacgatattaatacgagaaaaccatatttatttcactataaatattcacattaattaaaaaatattttgacaa

SEQ ID NO: 124847 - DNA, 1325 bp, Cannabis sativa
tatgacaaagaacctgagttttatgctagcacaagagaataggaaacagggagaaatacatgaaataatttaacagacatataataaaaaaatgataaattattaatcatttttgtaaataccatccgtatgaattaattttttattatatagtggtctaacttgaagtcaccaagagagtttgtgattcctaataatatagcccacatacaaatcttagtgccatataaaaaaaatacctccttatctaatacatttttataatggaaaattttaaatatgtacacttaacacatttatcgtgacacatcattatttaataacgaaatagaattcatatcacattttttaaattggtaacaatctaccccaaaaatttcgcacgagcggttaccattcaatatcattgtcgacatgcacaatgctctgacaaaaaaaaacaccattgtcaacattgtaatagattcaataaaatctaccaccaagcaaagatcaactattgcaatcgaaacacaacaaagaaaaaaaaatcatacactaccacaaaaagtaaattatacatatagacatatatttcaattacaccaattatcctgattaattttttaatttaaagttatctcttatgcgaagtaaataagaaactcatgagtatttttttcattttaaaattaactaaggaaataagaaattaattagtaacttttcatttgaaatttaactcgcataccatttgatcaattagataagaaaagtaataaaagtactaaagtggagtactaatgaaatgtcaccactattttagtatactaaattcaaaactttatgtatatcaaatctaataccctaaataaagaacattgaaaaactacatcgttaataactaaagagataaaatataattttttaaaaacaaaagagttaaaatagtagctagtgtgtgggcttatattctaagctccacacgctcacctaagtaaatgacatgatattgttgttctaatattaaaaaggcggtatcatattaatgattcacgttatataacaatagtaaaattgatattaatttaaacaaaagtataattataataaagaataaataaaagattgtaagaatgaatttctctttttataaaccttttttaatgacatcaagaaaaatgaacatgttttgaaagaaaaaaagccaatgtgttgttgctcccaacaaaaagatcctccatgtttaatacatttttatatttagtgtaaagataatatagtaatttaagcaaagtaaatttatttctaaaaataatttctaattggttagaatcatcataatt

SEQ ID NO: 124848 - DNA, 1250 bp, Cannabis sativa
  modified_base (1204)..(1210): a, c, t, g, unknown or other
gacactactccacaacaacaccaaaacttctaacattgatccgtctaaaagccacaacactgccaatactacactaaatttccaattcaactcaaataatgagaaccaagtagttcattgatcaaaaccacagcaaaacttcaatatcacaccacaattgatcaccaattcaaattgaaaattctcacaccaacaatcagcacctattgatcatggcacccttttgaatgcacaaaaatcacatccaaaaaaatttcccaacattactccaatcagccagaaccctcccaacaaattccaaaatatcaatattaaccaaattgcaatatccacacataaacactacatacgacagccaagaagttgtccaaatacaaaattaaaaatcaaaagctcactcttgacaaaccatgaagtgtggagtttcaagtgatgtgcgagtcgagttgaacggagcggctggaagctgtgatttgggtgaagtttactcggatggagtttgctgatggctacgggttgtgcaagggttggtgactcggttgaactgggtcgaagtgctgttgcgaggtcaggtgaattcaaacttggttgatggttgcgatttggtgaaggagggtttctggttgagtggacaggagtggtgcactggttctgaaattttggtcctggtggtggagtcgaccaggcgaagtgaagctgagttgaacggttgctggtgaaatcgtggtgcagttcgaaggttttgagcttggaggtggctcggctgggtcgagtttgggagctggtttgtggtcagcaggtgatggcatgggtgacttcggttggtgatggctgagccgaatgggcgcgggtagcagctggtgaggacgaaccggtgatatcgtggatgagttgagtgttatgtggttatggtgggttgctgttgggttgttgaagcgactggtgcaggggatcgtatgggggaggcgatcgtgggtaggtgcgggttgtttaatggaagtgaagttgatgatgaatgtggtaaggttgtgagcattgggctgacattaagtgggctgggtgaatagtgaagaggggcccagttgactaaaaccaaaagcttaaagccccaataatcaatctatgtatgcttatttggcatttttgaatacatgggtcaactaaagtacatcaatccaaatgattggactgagtaaaaagagtnnnnnnnaatgattgctccattaaaacaacttcaatcacatgttctg

SEQ ID NO: 124849 - DNA, 600 bp, Cannabis sativa
ttagtatatttgaattaattttttttataataaaaaataagaaagagaatatataaaggatgttatgtatgacattttttcttagcattatttttcaattcaatctttaaaagatgtcaaaaatatatcaatgtcatcaaaacattcttaaagcatcaccaatgctctaatagtaagattttggaaaaaaaaaaatacaagttgaacttgttattttacaaaataaataatctaaaattatatctaccttaaaatctattaaaagaaattgataacttttgcagatgtattaatacattctttatcttccattttcttcaacagcaaattaaagatcaaaattaccaaataatgttaacctgaaatcgaaatcaagtactttaaaggtgacttaatcctaactccttttgtgtagaagaagtggattatgagccaagtcaagcaatatctaatgctctacatatgatttgcaaatcaaatttagggtacaagtcactatttgcttacacttaattcaattcttgtagtagtactgagagcactcacaacaagggagctataatagttaaaagctaaaaaaaaaaatagctaagaaagcca

SEQ ID NO: 124850 - DNA, 1670 bp, Cannabis sativa
agagtttcaaaccaaactccaaaatctcaatagaacgattcactttttttaattgattattttttcaaagttaagcatcatgtagatttacttgcatctgttggtgaaaggcttagtgtccatgatcatgtggatgccattttaaaaggcttgcttagtgagtatgacaactttatcatctccacaaacactcaaactaagggatattctgtagctaaaattgaggccttattgttagcttctaaatcttgaatagataaagaaattgagtttcaagctaatgtagctaaaattgagcttgatctagcagaagctaacatggatgcctttgcaacctataatcgaaataggccatataatctactaattcttgttttcaggctaatagtggtgatttcaacaattatgttgggcaaaatttttgaggaggaactcaatcaccaatggtgaatccacaattccatccatttggtcgtggaatggttggttctaatcgcgctggtagaagtccaaatcatagaaaagagctacaatgttaactatgccctaaatttagatacactgttgtggaattcttctatctatttgacaagagtttcaatggtgcatctcagcctggatcaaccacagagaatcaatctaccactcctcaagccaacatagcaaccaattataagaattgggatcaaaactattaccctaattcaggaactacaaatcactatacacttgatcaacaaaatcttattaaaggagctgagtatgatggtttaaaacagatgtttgttggtaatggttaggttgtctataaaaacattggtgaaacctttattaatcatccttctaaacctcttatttttaataacttgttacatcttcctgagataactaagaaattgcttagtgtgtcaaagtttgtcatggacaatcaagttttctttgaatttaatctttataagtgtcatctgaaggatcaggtgcaccacaatatttttttgatggggaaataccagaatggcctatttacttttgaaccatctcaactccagcttgcacctacagggaaatctcaagttccagtctttggtaataaagatctatcctcttgcattttgtctcttgctgtcaataactcatcttcaactaaatgtactaattgcaataagacaaatatgtctgaatatgaattgtgccataatagacttggaaactcttcctttagagttgttacctctatattaaatgattgtaacatttctattagcaataaaataactcattttgtttgtgttgcatgttgtcttggcaaaatacataagttacctttccaaaaatttgccaaactaaatattcaaaacctctctagcttattttgtttaaatttttgaggaccctcacacacattaacacatagtggatactggtattgcatccactttgtagatgtgtattctagaattgcatggttgtatttactaaaaaatgtatcagattctatagacatttttcattagtttagggttgaatctgaattacaacaaggaaagaaacttaaggccttacaaacagattggggtgtcaagtataggtctttctctgaacgtcttacaaaggaagggatctgtaatgaccgctctagtaatgtagattagaaaaggcaattagcacta

SEQ ID NO: 124851 - DNA, 1691 bp, Cannabis sativa
cattcagtttgttgacgtacaattctgatccatagaactcccacgagattttactgcaaattcaataattatttcaataaatcagcttagttctaacaatagcaaattgaagcatgtattaagacagtttgaatgattatataccaggacttataattttgatgcatcttgtcacagattttagagctgtcgtagaatccggccctgcaacattgaaacttgttgacttagtttctgatgaatgaatgaaatgaaatgaaaactatacaactttaagaaggccagtttgttcaccttgcatactcatatcttgttgtgataatacttctgtcacagaagagaattccgatataacttggttggaccccatatagccacacattgattcaggtgatgagctgtgcaatgatatggatggaaagaagaaatcaggcatgattagaattaaaacttatagataaaatggaaagataaaagattattatgataaaagtagcaaattgaagcagggcaataccctgaaatggtatccatagaagctcctatcggtggttggcaagagtaatccatttctccacaatcaaaatcaaaagcacccaacatttcagtaaatgagaaatcatctcccatgacatcaaaattaggcagatcaatgtcaaaaaggtcaatttccttttcagactcagatgtggaagcctgctcaacaattggttcatctgatcccaaattcaccaatggatcagaatcactaaaatcgagtcttcttggattattgcttgtggtttgcctctttgagtttgtcttggagggcgaggaagtagaaatgcactggtttttctccatgtagaaagccatttgtttacatggactcagtgttactcttttggatgatgatattacagtgcatcttgttggggtcaaatctgcaggagtgctagcattgctacatttagaaacatcaagcggagatgttgatttgtcactttgagaggaattcgctcgtggaggcgttttgggaacagaagtattcgtcggaatggagaatgaaggctggttaaacaaacatttaactacatttgacccactagccgcacagatatttggagatgtttcaactgctgaagagggagcctgagtattttcttgactattaacagcactaccatgttgtggaactgcttttgcattaggagaaagttaaatgaaattaagtttttgaagtaaaaaaactggcatgaagtaacaaaaatatgaacaatcctacctttctctggagctgagaatttgctgcgagatctcttcccagctgggggagggacattcgaaacaaccttggcgttttttctcttattatttgtaggttgagcatttgtgttggaaggcatggacattgattgaacagttggattattgagcaaaggaaaccctaatttgaaagggggaaaaaaagtaagaaaaaaaggttaccactaaagacaccaaccatcgaaattcatcaagaaaacttcataataataaagacttagattacaactttgtaaagaaaaggacagcaacccaattccataaacatttccagaatcagaattcacatctaagaataaagaaatcaacttttcaactagtgccagccaaattcacaacactacactagtaagataaatgcataaaccaacatgactacccttaaa

SEQ ID NO: 124852 - DNA, 1623 bp, Cannabis sativa
  modified_base (1511)..(1518): a, c, t, g, unknown or other
gcgaagccaccctaggactgttttgtttacttgtttctattttttgctttgctgatgtggatatttattgtaaagggactggttataagtggaatttactcaacaattcataattacgatgatgaagaaattaatgaataaagtctcatttctcgaggagaaagattcaaagtccaaaaactttggcaacttaataattaatagtcgattgagaaaaagggttatacttatacattaactaaatcttattaatgagtttgagatgacaaaacaaaattatgtacaaatcgtagtattacaagtggaatgaaataaaattctcaattataataataaatcatcttccataaaactactttgatcgtatatggagaaaaccaaatgattattaagtattgactttcctagaccatggaactttgaaaaatggataccaattatttcccaagttaccaaaacattgattgagtttccttgtcattttcctctattttacttgtatgtgccaattaattccacgtcaacgccgtggtttagacccttcaacagaaacgtgagaagtctttcttttacattactcccttgatattatttataggttccataccattccatccacttaacaagcatctcacataatcatctaccttcaatattagaagagtgtgtatgttgaaaaatggaaaaatgtgttatagttgttgttggtgtcatggtagcagtatttgtggaaggcatgtttgcacaatcaacaacagtgcatgtggttggagatagcatgggctggaccgtcccacaaaacccctcagagtattccacttgggccaatcctaacaaattctttgctggcgatatcctaagtaagatttctacatcttattatatatgttctgttaaccatattttgtattttctcttcttaatgttacacaactggggaaactttttccttgaaagaggagtaccaagctgtcccttatatttttaggctaattaacattgttggatttaatgattttttttctaattttaattaataaagaaaatctaacatagatgaaagttcagttgacttgatttagtacatatcaatatttgaggggcatgatttgataaatatcaaatctaaagagtatgatttagtacatggacaatcgaaaattagaaaaattgaataaaattgaataaatttccataaatccaataatctcaatagttgaagagaatttttaatgaaaaaaaatttagagaacatgatttagtacatgtcaaaattcagagacaaaaatcttaattagcttatattttattgttacaatttaataattcatatattttagtttaatatagaaaactcttatataacaacaagtctacatataaaggatcattttctatgatgttggtcgtgttaaaatattaataacaatagccattaacatttattataaattattcaaaattttgtaatatttagtaaccaaaaacactaaggtggtgtttggttcacnnnnnnnngcattggaatggacttgctattccttaagaaagctcaatcaagtgtttggtttctttattagaacttgaaagcccattccaaaggaattacaattcacctaaact

SEQ ID NO: 124853 - DNA, 2107 bp, Cannabis sativa
gaatcaagatatatgagataaggtaactgttgtttgtctcttacagctccatgatggatcctgctaggtagagttcgactccttggcaacatatcactttagtttaatcagcactaaatgaattcagaacattagacaaaaatagttggtttagtgaaagaaatgaggcaaagatgaaatgtttatcttgaggctatgaagtgggactttatagttgaagtgtggaagataatggctttgatatggtgtaaagcttttaggagaagccatgtgtatcacgattcttaggagaagtgatataaaaagcatcagtataatcagcctatatgattgccaaatatagaacgttaaaataaataattaaatatttcaaagttaataagagttacataacatcacatagcattacaattcctattgaggttgacacaattctaataaatagcataataaagtataaagatacgtaacagattgcgatgccattgctaatggaaacatggcactaaagcaaagtcgacaactaaaacaaaatatcttaaaaggaaagggaaacaactctagaaacagtaaatcattcatagtactatgcatatagataagcatcgaaatagttcatttattatagtgaccaaattctcctttttataaataaaaaattttaactcaatttttgagaaatggatgaagaaaaagtaaatttaccgagtattaaatttggtctatatcatattttgtgaaaaaattagtataatttttttataaatttatcacatctttaacatctaaaccaaatgaaaatacaccattgaggctctagagagactatacaaggtgtcattctttcattttgaaactatttaacatttaaacatcaaaggagtagtttgttttttcttacagggaaatcaaatgaatcgttgggcagcttgcaaactaagatgtcgttttttttttttgtgtgtgtgtgttagaaggggaataatttttattcaccggttaaaggaataacaacccaaaaggtcaagcaaaacaagctgtatcgcagttgaaaattaatgtggcgtttggttggaggtaatgaaatgaaatagaatggaaagaaaataatttttattctattttttttgtttggttgcattttaaagtattagaatgacattctaatgaaatgttcttttcactattttagtgaaatgactattttattttaaaaataaaggaaagaccattctaatataacaagtgaaaaaatttaatgatttttttattaattttttttttatacattttaaatttattctatttcatttttatttatattcttatttctatttttattcttatatttccatttatctcaattaaacgaaagttaaaataaataatgaaaaaccaacaaaataattaatcatcatatataaagaagtttgtgcaaaccacaagctcgataagttgacacaacagttaaatggaaagtggccaataattgcaatgaattcgatctcacaaaaccggaaaacatacgcgtgttgttaataatagttgagaaaggagcgttactatatcattttagttcaatgattcatagttccattaaacagatttatagacatgatgttctcatagcaatagcaaacgcacttaaaatatataaaaaaattatacaaaaaagacgtggtaatttcttctaactaataacattatattatcttcaataaaaattgtgtcatatatatttcacaaaaaaaaaaaaaaaaaattactttatataatatatttacatcaaattttagtattgatctcctaccaaatgtaaaatgaattgtaatgtggagttataaagtgagtagatgaaaataagaaccttataaattgatgctagttaaagttgtaatcctcttctccaaaactagtataaatgagttatggtcaaagatttttttgttgtttgagatttagagtgagtttagtataattgcactgtgggaaaaagttgtaggtgttataaaataatataaaataatataaagtagaagagaagaaagaagaagaaaatgaagagagaaagaaaaagtgaataagaatttgtcagttgtttattcca

SEQ ID NO: 124854 - DNA, 2832 bp, Cannabis sativa
  modified_base (2571)..(2572): a, c, t, g, unknown or other
ttgcctttacctgtacataacataacatctgtgagttgatagactcagtaagaaaatcataaaacataaacatataatcgacctgcggctaagcgcccataaacctatcaacaagtcataaaccatgttaaacatgtataaacgagtctcgaacgttcttgaacatagtacaattgaccataataccacatgcactcagtactctagtcgtatgggtattggtagcatcgattcatactataagtacaactagccataataccacatgcactcagtactctggcgtactagtattagtagcactagttcatactttaaaagtatagccaatcataataccacatgcactcagtactttggtgtactagtcttggtagcattgttcatactttctgaattgccaaacatatatattcacgatatcaatatgcaatcatatacaccaactatcgttctaactatatgtcatacatttggcaaacataaatatgtacatatatatatatgtgtgtgtgttatggtagtcttacctcaattttgatttcaggtgtgccggtcaacttgagtgaaaataactcctggtaatcgaaggccctaagtcacaatttcaaaaaaaccaataaatattgtcttaacactttcgaggacttaatttcaaaactaaaagttttcttatcgatatatatcatgtaaataccatatgtatcgagaaaaaactcaatcgaggtcccgagaaaactctcaaaacaaatggtccgctttaacaatggacccccaaattctgcttaaatcgaacggtctgaactccactgcttgtttttaaaacttacataactcattaaattttattctaaaccttgccaaattttgcaggatatctaaaaacataataatgaatatttttcatgaagaaatctcaatcaaattctcaacaaaaatcaaattaaatggccatcctaaaattgcctaattcggatggtccaaagcctccctctacgagtttgaaaatcttataactcatccaattctaagtcaaaccttaccaaattttttagagcacatatacacatcttagtgaacattttttatgaagaaacctcaatccaattcgcaataaaattcaagttattataaccaattcaagtttaagttctttgaactcaaacttgcgtaacttttgccacaaccacccaaaatacttcaagctacttctaaatagtcctaaataaccttaagaaaattttcataacctccctaaacttcttcaacaggccctactgttaggctatttctagcgcattcaggtcattttttataggctaattaggatttttaccccccgaactttgacatgtactaaatcacgccccgtgaactttgaagacagttaaaattccccctgaactattgagattatttgatttaaggacttttgtttaattttagtaagaaaagtctaacatagatgaaagttcaaggggcatgatttggcaaatgtcaaagttcgaggggcatgatttggtagatatcaaagtccagggatcatgatttagtacaaaattaaataaaattgggcaaaagtccttaaatccaacaatctcaatagttcaggaagaatttttaacagccaaaaaagttgagggggcatgatttggtatatgtcaaagttcaggggcaaaaatcctaattagccttttttatagttatttttcttctttatcattatttgtagaatataattatgcttgttttctttggtttcaagtttcgacacttggaatgtataaattagtcaaatttcggaaaacaataatctataaaatagagagaattttgcaataaaataaatctgaaacttcaagcctaaattccactatgttttagttcgattttagaaaaagtcaaaacataaaagttttagatctcttttttagatttccaacacatcttgaataagctcatttgaaatttgtatgtgaaagttatgcatattttagtgagagaggtcgaagtagaaaaaaatgggtccagtgggcgcgacaagggactacataaagccttttttttcacttttctacagtcgccgtggcgaggctattggccgccgtagcatcgactccgtacaagtcaaggataacttcttcttttctcatttttgggctgaaaaactctatttaacgaaagagagttgcgaattatagagggagagacataatggaaccttaaaaacacaagaagaaggctctaggagcgagcatgggcaatccacgacaaccctctatgtagtttctttctcttctcttgattttttatatttttatttgtgtttagtttaattatagatttgattattagctaaactctctatttagagatttgatggatattgattgagattattctatggattaatgctatttgattgttctttctttctctattatgatgatttattcatatttgtgcttattacatgtgtttggttggccaccttatgcgtgatgtatgatctcaatacaaaatctaaaaagtgagtattgagaatactctaaatgaatagacataggtttnnatgtgaaacgagagtattcacatagcttatgcgacttttaaattattgcttaatgtgaattgtatgttattctatctcagagatgcagtagttggtatgcaatttaggacttttatgatctgaaaagagtttaggttaatttataatttgtcatcacaacggaggaagaagaatggttaattagtattaacaattgggtaatcaaagcaattgaaatcatatccctaattttacacccattgttaaacattttatttgtt

SEQ ID NO: 124855 - DNA, 576 bp, Cannabis sativa
tttaaaaaaaaaatatttaaattatggaattaccctttagtgacacacattgtaggatactaatatcaaatgtttagagtctaattgtgcatgtcactaaaaatcagttctaaatctttagtgacctacacttttctgcgtgtcactaaaagtataaattgtagtagtggtatctgaatcatctctctagagctagctatctgtacaagggtagaatgttgtactaaacttcatttttgtactcatggctttctatagactttgttaaaacctagagacgaacttcaatttctaatccgatgtaatggactttagtgttgcgtaaggtcacactatctccctcctatattttccatactaactctgacaccaaaataatatcctgattcatattcaaccatacaaaatcagacataattatggttttaagtaatctaattacaaaatttcaaataacttctttccatttcactcagaaaaattacaaaaggttatttattttaagctcctaatatagtgagaatttgaaataagccttatctaaaaattctagaagaatttaatacatgtcttaag

SEQ ID NO: 124856 - DNA, 1163 bp, Cannabis sativa
caatccaatccaatccgcactttacagattaaattggattggatcgtgcggattggattggatcaactattttatgaacacctctactttcaagaggcaacccaatgttattttcattatgagtttatttgtttgttggattccttttaatttttatttttattttattttttatagttatttctattgttattgtatctcttgaattgtgaaatacgttaaaaaaaatcaaaaaaataaaagaaaaaattaaagaaggttgagcggcgacactactttgagggttaaacatatttcaagtcttaccaccaccaccacctccgccatacagttgtggcgtgaatttgaagtagattctctctcgttgtttttatttatattggagataatgtgaatctttagtttggggcatggacttataatttttagttagttttttttgtgttgagtgtgtgagtgtttattttttaagtaattgttaacctattatttttgtctataattgcattgctttactttgtgaaaaggaaattacaaataaccgtattcttgatttgattgttttagagtttaattgaaaagttttgttgaaattttttaataggctgtgcaaatgtgatatcttgcattttattatatatgcttgattaggattggtggtatgatagtttaaatttaatagaacttgcattgtttggcctttgaggcaaaattcttgatgatttatgctttgaaaaataatttaggcaatttctttgaaacgtttgtgtctttcaagctaacttattttgtaattatctctagtttatccccttttgccttaaactgatttttttatacacactttttgagctaaaaaaaattaacccatttattattttcctttttcctaactataccacgagttttcaaataattaagtttgagaaaaattgtaattgggtattgtattttgagaagctaaaagcttaaaaaaatattagagatgaatttttaatatgttgcaatcttttttttcaaaataaaaaaaaaaagtaaaaaaaaaagtgaggattggggatagatgtgtaatgaaattgaggttcttggaatgtaaaaagtttatagtatagctgagcctaaatgacattttcatctacctttactgtaacgccctaatgcta

SEQ ID NO: 124857 - DNA, 2272 bp, Cannabis sativa
atcaaaaactgctaattcgtatagttccctcaagtgctagaaagcacatagtatatcttgatttttctagatttttcaaaagagttggtggtgactttcattttgtagccaaaatatttttttatacataaattaccaaataaattatactcaacgacaaacttataaaattttgccagcgttgatacaaagtttaaataattaatacatacaattaaaaaattatgaaaattaatatactatatatttataaatcagtaataaaatatactatcaatactaaaatataaaaacgtgaggggactaaaatttcttttaggttttatatggattcgccagtgtttacttttttcttattaataatatgtataaagaaagtatattttaaatattttgataaaaaattaaatattatatgaatacgtaaaatatgaaaatgaataaataaaatatattaataataattattttatcaaaatattaaaattaaaaaaaataaaattatttgaatttaacaaaaaataaattaaagtaagaaaaatatatagaaaaataataaaaatattaatatttaagagtgaagatttaatgttgctaaaaaataaatgtttaaggaccaatttatcaaaaattaaagtttgggataaggccaaaacgtatatagtttaggaatcaatttattaaaaaataaagtttaaggatcaacttgccaaaagctatataatttaagaacctgctgtagaaataaatttaaatatttttcatgatacaaaatttatgttactataaatgcattattttttatttagttttattattttattaatatatttaactataaaaataaaatatagatagtttatattatttttagggaaatcaccttgctgtgcacgggttgggttggccgggttgatggtatttcaacaggtcaacccaattagatcggcctaaaaaattctaacccattcatatcatattttatgcacaacccaaccgaacccaatatattatgggttgggttacaacctttattttttacattaaattttttagatctaaaacgcatcattcttaagtatgaaaatatcattacagtaatttaaagtcttaaaattataaataaaaatgtctataatacaatactaattaaatagtgattacaaacttgatcaaaataacatctaatagtcttcttcctttagtgattccttgcctcaagtttactgccaacaattcaaaacaaaaaattactcaaattattaaaaataaaaaagcataagacaagaacaaatttattcatcacagttataaacataccaaaacttcaataattaaataatctaaataaaattaccacatatatgtataaacacttaaaaaataattatatatctacaataacagtgataatatatattattattattataaatatacatgttgcatatgagaagagaaataaaagaatttgttaaaaataaaattgaattaatataaacagagatcatttcagaatatatatatatatatatatatatagaaagggaaacaaaatgttcataacaaatataccacaagatgtcaagatcagtttaggtcaatcacaaggtatttaagaatcaataaaatcaatgatataaatgaagagtcaaaccttcttaatctataaacagggtccaaatatataaattaattaccataaaaaaataaaaagaaaaaagaaagaacacttgtttataatacaaagaaacactaatatttaaacatgaattttacaaaaaaaagaagccttgaaatcaaatatgtccaggtcttcagcaaatcttcacaacttctaccaagtgccaaacgagatgaagagaaaaatgataggaatttcctatcatttcggtacaaacagtagcaaaatagatataatagagatgatatattgatattaggagataaaagaacaaggttgctgggtattcgagagaactaaccacagtcaagtaaagtccgttggtagctcacttagagcaaactaactaactgacgataacgacttataactgcctaacaaactaaactaactatctgatagttagattctgttattcttgattgcttaatattcatactgagtatttctaacatcaccaagagttgtcttgaacaccgtcaccttattttttttttgacaatgaactttcattgaaaatactcaaaagtttatacatagagaaaagatgaaaaatcatctatccaaattagtttatcatccaccctg

SEQ ID NO: 124858 - DNA, 1087 bp, Cannabis sativa
aaatttaatgtaagcccaaataaaaagtctaacaatttcttcttctccttgcagtagcagttgcatggaaatactttgaattactatccccttcacgcaaccaaagctgcttacttctttgcttccaaaagatctcctactgaagcaacacattgctcaaattagcagaagcagttttatagttctccatagacaccccatcacggcctctcttccattttttaacctccaacttacaatctttaattctcttaggaaagtttccagaataatcccttccccatcgccataacacatcaccacaattttttattttttcaataataccagtcggctctccattgttccaacagctcttcacaatctcaaaaaataaaggctctttcaaccatgaattttcaattcgaaagaaatggtttctagcaaccaccacttcattagccataaccagatgcaaaggagtatgatcggaagtagacacttctaaattataaagcttggctaaaggaaagaaatctaaccatgattggtttactagtgcacgatcaattcgaacctccacccaaaccggcttgcctcgacaatgctcccaagtataaggatagccatacaaatcaagatcatgtaagccacaatcagccaacatatcgttaaagccatcaatcaaccatctcggatagggattaacacctttcttatcttcatgagaagtcacattattgagatcaccaatgatgcaccatggtaaactcgacttgcacttcaactcccttattaaatcccaagtcctcttccttagatttctattcggctcaccatataaccccgtcaactgccaatgtccttggtcactatcacaaaccacgacatcaatataagacacctcatactccaacactttaacttcctcttccactttccacaacaaagccacccctccactcttcccttgagcatcaatcgcaagggcaccatgaaaactgattgccaccggcaaacgttcaaccacttccttttttgcaagagtttcacacaaaaacaagtaactgggcttcttttggaccacaaggtccttcaagaattgttg

SEQ ID NO: 124859 - DNA, 1354 bp, Cannabis sativa
tgtctgacaacgaggaaacggcgggtgttgctcagcaacctcgccgagaaaaatgagtctcattagttcattgtctaaaatagcagaggaggattttcttccatctaaaatagttcattgtctatcctaagggtgcagagatactccaggagaactagactatagaaccataatatcagaaaagaaaacctcaaaactgagagttgtcacttccgatccactattagaacacctacaaaataaagagaaaaaaaattaatacataataaatatttaataaaaaataaaatttcccttacaaataaaataaaaatataaaattttatataaatagttacatagaattctttaatgtaaaatattagaacttatctattctcttctccattgctaacggtaactacactacatttgatgtgttattattaaataaaactgaccttataaaattaaaactagccatataataattttacaaaactaaaaactagccatgttagccttataaaactaaaattagtcatactgaccttacaaaagaaaactagccatattggtcatacaaaaaaactagccacattgaccttataaaatcagaaaaacaagacacttacaaaactagacatattgccttacaaaatattaattacaatagttagaaaaaaattagatgttaacacaatactaataaaagctaatcaaaatatgaagagaattttaaattaatcaatataataaataaaatatgattgccaaaaagccacatataaaataataaattagttaaaaataataagacaaataatataggataattgagaattaaaagatacatatatttattcaaaaaaagatattacatacataaggtatttgtagatcaaacaagtaataaaatttataaaaaaaaaattaacattaatagacatttaataaaattattttaccataagttaaaactgtaatttgattagtaataataattaaattacatgaaaattaataccaaagtttaaaatcgagattttataaatcattattataaaatttcaaagctgacacaagagaagaaaacctactataaatataatattttaaaaaataaatgataataaagaaagacaattaatatttaaaataattaagaagctaccaatttttttgattggtttatggaagtgttggcagtaggcaatatggggtgagttgaagaagttgttatggctggttgggcaatttgaaaggctcagaatgatatgctttggaatggtaaacgttgtagtcctgctgatgttgtttggatggctcgtaccactcttcgacaatggacgtgtgctcagtctaagaggctgga

SEQ ID NO: 124860 - DNA, 539 bp, Cannabis sativa
ttaaattctgcgctattttggttagtaatcccgattaggggattagggtttcataaacatttttgggtagcgtgcctaattattttagggcgttacatctatggtcctcgattgttgaaatggatagctcgagtgaagctttccaagtttcagaaacaggtgtttgctacatcactggcaacaacattgtaccatctatggtcatgccgaaatgaatcattatggagtcaaaggatttttacgataatagtgctaataaagagaatgaaataacatgtaaaaaatagagtgagaggtgttatacctaaaaaaatacaattaatagataatgaatggtttgctagtttgtaatagatttaaagaaggacttgttttggatggtgctgcataggatgtaaatgatgttttttgagcaatatataattctgatttaaaaaaagaagattgtgcatatacgtagcagggtcggcccaagtattttgcggatcttgtgcaaaattttaaaattgggctctttaaaaaaccgtgtacattaaaac

SEQ ID NO: 124861 - DNA, 2698 bp, Cannabis sativa
agcattcaaattgatttaggcaaataatatgaacccctataccaaactttcaaaaacatgagaattttaaaaagaaactcttgtcctcatacccaccagcaacaagggagagttgaaaggaaacataggcatgttgttgacatgggccttacacttcttgcccaagccaacatgcccttaaatttttggtgggaagcctttgcttctgctgcctacctcataaacaggcttcccacacctacaaacaacctactctctccctatgaaaagttgtttcatcaaaaaccagattataacatgctcaaggtattcggctgttcttgtttttccttattaagaccttatgaaaatcataaggtgtcttttaggtcctccaaatgtttgttcatcggatatagcatctcctcaaaagggtatcgacgtttacacccaagtggcaggatctatgtagcccgaagtgtcactttcaatgagcaagagtttccctattctcatctattttcaaacccctcaccccaatctccatctctgcctgttgtcattgactccacagcttatacttttccttcttttccttctaattctccaaataacaacattcaagaacatggtgttcagcatactcccatcctcagccccacagttacacctcctacccctcatattaccaatcctgacacttctgtgtcttttattaatcccataccagcatctcccaacataaattctgatgctgacagtcacacttcacaaaccaatatccatcttatgatcactagatctaagcatggaatctgtaagccaaaaacatatcttgcaagcacaaatgttgagactgaaccaaaatcactcaaggctgccttagctagtcctatttggaatgcagctatgtcgactgaagtaacagccttgaaaagaaagaaaacatgggttcttgttcctcccacatcagatatgaccattgttcacaaaaaatgggtttatcgggtcaaatataataaggatggctcagttgatagacacaaagccagattagttgcaaagggttttcaacaactcccgggtattgacttctttgaaacctacaacccagtgattaaaccttgcaccatttggatcatttttactcttgcagcaacattcgactgggacattcaacaagtggacatcaacaaggcattcttgaatggtgatcttaaagaagatgtctacatgtatcaaccacaagggttcattgatccggaatacccaaatcatgtttgcaagttgaaaaaagctatctatggcattagacaagcccctcgggcttggtttgacaaactaaaaacatctttgctgcagtggggtttccaaaatagcaaatctgacacaagcttgttctacactagacaaaatggtcaactattacttctccttgtgtatgttgatgatatactcatcacaggagaaaacatgactcacatacaacaagttattacacagctacatgatcagtttgcccttaaaaagttaggctctgtcagctattttttagggttcgaggtcaacagatccaatgatacaataactcccactcaacaaaagtatacaagggagctactaaacaacactcaattaattgactctaagcctcaaaccactccaatgtgctccaccacaaagctgtcctcctcagtaggcaccccaatgcaaaatcctactacttatcgaagtgtgattggcgccttgcaataccttaccatgtcgagacctgacattgctttccctgtaaataagttgagccagttcatgcaatcaccaacctctgaacattggggtgcctacaaacgtattcttagatatctatctggtactttggacagaggtttaacattcaaagctctcgatctacaagggttcactgatgccgattgggctggatgttatgatgacagaaaatctacttcgggctactgcattttctttgggggcaatctgataagttggtgttcaaagaaacaaatagttgtggcaaggtcaagtacagaatctgagtaccgtgctcttgccttggccacttctgaaatcatatggatccagtccctgctctctgaattacagcttactgtttccaattgtccaattctttggtgtgataatttaggagcagggtccttagcttccaaccctgtcttccatgctcgcactaaatatatcgaagtcgacattcattttgttcgtgacaaagtcctcgctcaagagcttgatgttcgttatgttgactctcaaaatcaactcgctaatctcttcacaaagcctctggcagcatctccatttctatttttcagagacaaattaatacttggtcttcaccagtgtcatatgtagtagttagtcggttattactgtatataactaactgtctttacagttagcaagttagttatttttctgttaacttgtccagctggttttagctgtcttgtaactagcttctttgtacaattccacctatataaataaagagatcaaaggccaatcaattgattgagcttcacagtatttatttcatccatctttcctttctttcttcctccatttcatcacttctctctcagctcaaaaactctggcttacagagtttcttcacatttgattctcaattgtttctataggtaaactaattctgtcaggctccctttctatttttgttaagtaa

SEQ ID NO: 124862 - DNA, 772 bp, Cannabis sativa
aaattccgtaaaactgtattttttgttgtttttttgcatttgtgaaattaaccctagttcaaaacactggaaaaactacaaaaactaaaaaatacaaaccaaaaaaataaaatatcacaacagtatgataaagtctatccctaacacaatggattcactaagacaaaccaaaacaaaccgaccaagggcaaaggagggctgccaactttcgacgagcgcagttcactcttggcctcccatttaagtttagaatgctgaaagagatagaacaagcgaagcacattcctttgagaaaagcctgtgtcctcccttctacatctacaaaacttcgagaactccaaacaagcacttgtgcattgaagccatgatccttgaaaagaaacttaggagctaacaccgagatccaaaaaagtttattgcagattcagtttgttgatttctcaactacgaatctcatatgttcatgtcatcttataatattctaagttagaagaggctttctttttgggtattgctttgaggttcatgttggacgagttggtcatgaaatccgaacctccactggtccaaagagtggctttggaagttccaaacatgtttggagaaaaaattgtttaccaattaattaaagacgcatttgataacatattttttttattcagttttatgttataaaattggaaaagtaaaactatttttcaaaaatatattttataaaactgttttcacttttttaattttttaattgagaatcaaaattttttttaaaaaa

SEQ ID NO: 124863 - DNA, 781 bp, Cannabis sativa
  modified_base (329)..(366): a, c, t, g, unknown or other
actcttgaatgctttcctttatatatatattgatattgatatgtatagtaagaagccactacctccttttgtaacaccaattaaaaacttttcatgtgcatccaaataatttgctagtcatttaaattactaagtatttttccctcctgacgttctttttcacatttctcttagcgtcttcttcagccaatttttttgtgacaaacttcttccctgatagaaccaggtcatgctatgcacacccttcttacattattattctcatattaaaaaagaaagaaaataaaaattattaaatatagcttaccaaaccatcgtcttgaatagannnnnnnnnnnnnnnnnnnnnnnnnnnnnnnnnnnnnntacaaccctctgtatgtaaacttggcaattccaggttgaatactgccattttgttaattaaataatagtattgtcatcaatattattattattaagattattgtcatctgagtggtgttaaaataacgattactcataatcattaaagccaagatctaatatttatttagagcatcaaaaacaataaaactcatacctcatatgccatccatgagagccatcaccaccaagatatttgagcaaaagttttggagagaacacttgtggagcaacccttttgcctttcaccacacaaaaccatcatacccattttccacacactacacacatatatatgctattgcccttataaccctaaggggttattaaccaattgggcttatggggtcttttatggtatactataatttaatgg

SEQ ID NO: 124864 - DNA, 929 bp, Cannabis sativa
aaaatacagagtccattttgttatttaacaaaacacaaagtccaattagtaacttttgtaaaacagagggtccaaaataatatttactctaataaaatattgtcatactatatagtaataattctataccattttaattaagttaccaaactatatatatatatataacaacttatggaatatataatattgactaaattatacaaaagctatagcttggtagaattgtatgtgctatatatatacatatgtatattatgtatatgtatcacatgtgataaatttattattgtaatatccttctctccttttgtttatcaatatagacgctttatattatattattaatcataatcatgtatgatctctcctatttatattaattaatcaaaatattatgatctattaaagctaattatcgtggcaatcttatatatatatatatataagttaatatctatggtacgatattaaattaatttataggattataaatttttaatatatgcatatgggacatttataagtactacttaatagtacgtaagagtactacttatagtactatagctagtaatactgccgatattaacgcaaataattaacaatattaatatttcattattaaataattaattatatattattccttaattaatatatacatagtcacaaaaattaagtttgtatatatattccatgcatagaacatattaacttattatataaaatcgtataatctctttatatttgtgtctatatatatatgtaatgaaaccatattatatatctataacaatatatatatatatatggttatggcctgtacgtacgtagttcacatatatatgaactaagtaaaagaagatttaatggaccacttaatgatatatatatctttatatattaaaagtgtctatttaacggca

SEQ ID NO: 124865 - DNA, 1347 bp, Cannabis sativa
atcaaaatcatatccctataaatatacttctaaattagcataatttacgcatcttaatcataattattttttttgatattggattgtagttatagtaaaactcttgtactttttaattttttttttaatattttatagtcccgaaaattaagtttaagcaatttgttattctcttgctttttttttttctattttttttttttattttttatgtttttacccaaatggaagaagttgttttaaaatttaaattctacagtataaactattcacaattttttgaaaacttttataataatgcttaaattgtgtaaattaaaaaaaaaaaaacagatgtattaataatggaaaggtatattttttcaatgtgctggggctctaattgaagacaatatatttttattggctaaatttctgggggcagttttgtcccatgtggctcacgataagatttctatagctcatggtttggcgaaacatgcccttcggttagatgatgagctatcctagttcgaggaggttctaccgccaattgtggtttactacattattaatcatgtgtgattctgttcaccacataaaaaaaaagtgatgtattataaccatgcacacacaaaaaaattgacggagtcaactgacctcccttacttcttcataagtctaccatatacatttaaaaaaattcattgatttgatcatcctttttgctcttattgtaagaaaaaatttagtatttatgaagaaattgtaaattaatttttttatacactataaaaaattgttacttttagtgacaattttttactcacaacataaaatttttgtaactaaatgtgacttttggccacaacaaaaatttacttgtgactaaaacatagtatttagctacaagttgtcactaatttagttttagtcacaatattttattgtgactaaaaatgcatttagtcacaacaaattataattttagtgactaatacttttagccacggatcttttagttacaacatagaaatgataatttataatttaattagtcacaactttaataattttttttttgtagtgatatgatcgttacattataattttaatagatattttatttaatttcgaaaaattataattaatatataatattaaaaatagaattcaaataataataagttgtatatgcttatgttttattttataggcctatgattgattattatgaaataaaatttttaattttaaaatttttaaaatttctagaagacaaacaaaatgtatgttataattgtactgtacactaggggtgttcgcggtgcgggtggtgcggtatttgcactattttttcaaaccaac

SEQ ID NO: 124866 - DNA, 2233 bp, Cannabis sativa
aatataatttctcattaatacataattaatctagttagggttgctaatctggttccataaaccttagggtattacaaagggtttgaaaaaaggcataatgtaggaactaaggctcaacaatgtgatgggtaacattaattacttggatctcatgttgtttagatcttgccaaaaggatatagattttaactttattttagataactaggtttcaaaactccatgagtgaaaattaacttttttgtctaaagctggtcgagctactctaataaatcctgttgggcttgccttgccagtttacaccatgcaaacaacaaaactatctaagaagcttgcctctaagattgatggtatggccaaagatttttagtggggttgtgagcaaggaaatcatggtttgtacttaaaggcttaggatcaccaatgtctcccgaagtcccagggtggcattggcttccaaaagtctttggcaatgaatcaagcattgttggcaaagggggactggtcccttctcgatgaggaacagtcactgtgctataaagtactgttaagcgctaagtatctcaagggttgccatttttttattgttcctttaaaaactcggattcttagttctggaagagtgttgtaagaactaaagatattctgaagaaatgtgcgtgcctgcaagcctattttagatggtaaagagacgaatatctgggatgatttgtggatcatccatggccaggacttctacctaaagcctaatgcccatccacttgaggatttgaaaaaagttgcagatttactcctcgagaacagggagtgggacatctctaaaatctgcactctctttgatcaaaagatgagcaataacatcatcaagggtggtaagtcttgtggtcagggaagagataggtgggtctggactaaagaaccgaatggtttgttttctacaaagtttgcctgcattattccagctcttgagtgtgccccttaatgagatgttgcacctgcattatggaataagttatggaactctaaagttttggaacgtcacaaggtcctttggtggggcattctatctaatgctcttcctatccgcgccctcctcgctaagagaatacatattgaggaggtttcttgtcctctttgtggggagggagaggaaacgatagggcatcttttcctctattgtaactttgcttttcacctctagcgagaatcaccttcgggagtgatgccaattttggatttaggcgctcgtgtttgggattgggtgaaatttttgtggaatctaaaatcttagggtgttgatgtggagaagttgttcctctatgcatcgattatggtggacacggtttggagggctcgcaatgacaaggtacacaataatttaagaagtaaaattaaacattgtattgactctatctctagttgttacgtagactatggatcttgtttatttgcttcgtcaaaggctattgagtttcttgtttgatcccttcctcctaatgattgggtaaagatcaactatgatgtgaaagttagttgtggatccatgtgcactgtggcgttggctagcgaccacacgaagtctgttttgtgggtggctacaaacatgcttaacttctctgatccttttattggagaagatgtagcgtatctgttaaccatggagacggctgtcttgtttcaaggctctgaagggaacctgttcgagttgaggagttaattacttcagaatgatcttgtaatgcccagatacgaagacaattcctacaatcgtgggattgagtcagataaatatggaaagctgttatagttttctatttcttatatcttaattatgtaatcattgtaattttacgcattgtaagcaaaagggaagccatccctcatgcattaagtccctataaatagtggcttaacctcactgtaaaggggatgaaagaattgcttcaaagagagattctagagaggaaagagatatctaagagaattactcagagatccattataagagtttttagagaggaaaacactttgttctttctctcaagttaatacaacacaaggggagtaggctattattaccacactcacgagggcgaacctgttcaaaacctggtgttcttcttactttatcatttttgttctggtgttctttttactttatcatttttgttctcttttaattatattattaatcgcttattaattgacacactgttgttggctaaaagcgagg

SEQ ID NO: 124867 - DNA, 711 bp, Cannabis sativa
aattatgattggatatccgattctattggatcggttggaatcggatcggtcggttgggattggattggataacttcctgcacacccctaagcccaaatgtcactatttaatgaaaatgtcacaaaaagtaaataatagtaacactttataatgccacctattcaatatcttcttctagaaaatccattaacttaaaaaaatactaatataaagctttaatagaagacaaaaaaaaaaaaaaaaaccctttacttcacaagtaaccttcaaaactaaatatattccactaatttcaaaattaactaaaatattctgataccacaaacatgtatatatataaaatactgctatgatgtttttaaccaaccaattgagtttctattgttatcgaacttgaaaatattttattttacatataacattcattttacatatatatttcaataaaattttcgtaattaataaattacacttaaatttatcatttctaataataactctattttctcaaatttaacttaattaataagattataatattacttattattttgttgtacacatatttcataaaatatgttttaaatattcataattaataaaaacctaactttcaacactcaatccaatttattgaatatttaattttttgtaattagattagatcaggggcggacccacattgtagcgagggggggcaggcgccccccc

SEQ ID NO: 124868 - DNA, 715 bp, Cannabis sativa
ttagcaacccaaactttagattagattagaaaatatatggaataaactgcccacaccctactcacagacaatttcgtttttctaaagatattatgcaatttatactacaatatgtcaataaaataacatataatatatttgatggttattattaaaaatctgttttggaatgagtcaaagatatgaattactagacattatttgtttttttctttttccttctatgttatttttccagctggaaattgatggccgggtaataaaaaaaccggatatatctacaaattaattgagaaaatttcatacaaataagatgcaatattaatgtaattatattggtttttgttttaataaagtaaagacgtatataagtaataacatgatgcaaagaataacatcattatccttttgacaaaatttgcattacttttaccatgcagttggagtgttggactcgtagcttttctttattttatttttattgtatacttttttatttatttatttattaatgaaggaaagatcatagtgtaatactctattagattgatgaggaaaagtctagtcacatttatcatttccatttatgagaaaatgagagactcaaccgacctcaccagtaggggtgttcacaaagtatccgatccaatccaatccgcacgatccaatccaatccaacccgcaaaatgcagatatacgcacttgtgcggattgg

SEQ ID NO: 124869 - DNA, 788 bp, Cannabis sativa
  modified_base (40)..(47): a, c, t, g, unknown or other
gatcgtttgacaaaacacaactcaacattatttaaagatnnnnnnnnagtacgaacatcatgaactaaaagaccaaaagaggatgacaactattgatatatttttattaaaaaaaattattttatttttttgttttatttacttgttctcaaaaaaaaatatgactaaatctcaaatttattcctagtgagtcaagtttaatataagcaaatgattgatgattgcactataataaaaatagttttttcagacattttaaaacaatcgggtaaagtatttcagtcggtttctataaccgtcgcctatacaactattgtcaaatgggcagaataggtgagtgttcaaaatagtcgctaatttaataattctgatgatttaaaaccgtcacctataacttgttataggcgacaatttcaaatcgtgccctatactataggttacgtttttttattttaaaaaagttttttttagcaacagttttttcagtcgttacattagaaaaataaggggaaaatacagattttctgcctttttttcctatattaatttttaaatttttgacaaatctatatagatcgtaataattaaactaacgctagtatcatctaaatatacttaaaaatctatatagtaacaataatcaaactaacactaataattatctaaatatatttacaaatctatatagtaaaaataaatctagatatatataggggtgttcatcaaaccgcccgcaccgcaccacaccgcaaaaaaatgcggtttaaaattctttgcggtgcggtcgc

SEQ ID NO: 124870 - DNA, 2009 bp, Cannabis sativa
gtcacaaatgtaggaaaattgatttatgattagtcacaattttttcacttttagttataaattttattatgattaaaagtaaaaaaaaaaaaaaaaattgtagtgtcttttgattaaattgataaatttatattaattaaatcttactttaagatactaaatatgtataattttaaaatataaaatattaaatactaaataaatattattaaaaatacaaaataccaaatgtatatttctgaaaaaaaaaaacaaaaggtattaaataagcatattccatttgaatatataaatattacattaatgattatttgaacttgcataaattaatgtacttacataaatgtatatattgtaaattataatagacaattaaaaagtaatccttttttatttgtttattatatgtttttcttactaatatcatattagatttgaaaaaggtgaatatattgtcaattgactttcatcaatcctgttgttcctattcattgatcatattaattaatgtggtatatacgtagcctaatagtgaagtggataaaatgaaatgtttatgatgcgtatgtttgtgaaaaggaaaggaccgaatttaagaattaagaggaagaaaggatagtgaaagttgtgaaagttgaaagaaacaagtgaacaagtagtgtagtagtggatatccagcccaaaacaaaaacaaagaaaaaaaaaaacaagtggagatccaaagggtgcacgaaaacgtgtggtgcacactcctctcacatttctcttctcaaagagagtgtgcaccattaattcaatttctttattattattatcatatcagagagagtgggccgcattcaattattgactcattctctaacaattatctttgagcaaagagtagttttaataacttttctattctattatttaaaatatatcactaaaataaaatttgtgtgtgtttgtcttatattatttatgtgttaatgtgtgagtaatttaggtgttcatattatacttagtagctattaagacataatcatataataagagttttggtaattagaataaatgttatgtttagtgaatttatatatataaaaaaatatatgtgtgtttatctgctcatgtattaataatgtgattgcattgctcacaataaataattatattatatacattttgtgtagtttaaaaaaatatattatcaaaataattaatacgttgtaaatgaactgattttagaaccgatgagacatcattttttttagtattattttcacaatttatttccctatttatcctatgttttttgctcaaaattttacaccatgaaaattagctaactaggtaacatatcatcataataacgacggacccagtaaaaataggagattcaatgataatccaaaaaactggtccatgctgttctctacgatcctttattatctttttatttttttatttgaaagctatgatcctctatatgtaatcgtaaattattccattattacctatatttatggagcactaaaacaatatgcatgttactatttcattgatatgtttttatatgagatatgtacacagccgatgctgggattgcattttgtatttttgcatgtgttcacctaataatttcaactacctcatcttatattacagttggattttatatatatatatataatatatttaattatatgtgtgtttatatccacactcttatatcttaccctcgtataacccaccccgaaaacctaattcaggttctttgttacattccccctttctaattcctttttaaatcaacatatatatttaatttgttaatatatcatttcatatatgcaattgtattaatattactatattttttaattttaataatataagtttttctaattgtaatcgtatttatatgtatgtattattattttcattgaaatatatatttaaatttaggataattgcctacagcactatttttttttaaaaaatacatttttatatttaaagatttt

SEQ ID NO: 124871 - DNA, 639 bp, Cannabis sativa
tatatatatatataaggatgagataattaagaagggcaatttaaggtttgtgggagagacatgaaatgcgtggatgaaggagagtgagaagtaccatttcaaacatatgtttatatttaggaattgacttttcaatcatactcattcactcatatatattaaatataccacataattaataattactttaaatagatttatatacatatatgcaaaaatccatctatagtcattaacatctaagttgttttgccactaaataaataaataaagaaaagctatgtatattttagggttgaacatttgggctccataccctcgaaaaccgaaccacttgcctttacttgtcgccaaaaaagtcgaagcaaagaaaatttgcccaaatcaagtctgatccgatccaacccctgtataatcaaattcgatttcgggtgttaattttattatttatcaacccttattatttatcaataaaataaataaaaattggtttatttaattaaaggtattctttacatgttattaatattattaaatctcgagagatggaggaagacggtgagagaggaaggcgatggtgcagaggcgtgggtgggattttggagagttaagattttcgttttagggtgtgggaaatag

SEQ ID NO: 124872 - DNA, 819 bp, Cannabis sativa
gtgggcaattaaaataattaaaaaaaaaattagttaaaaagtaaaagaaatattttttttaagcatgggcttaagcccacactggtcctacattgggtccgccaatgattacaccacatattgaaaattttaatttttttactttaatattgtgggacgaaatattttcaaaaatactgtataagttttatactatgtaatgtattaagttttcactattattttacggttattttttagctgttctattgttgtttttagttgttctgttttgtgttccattgttgttttataaaaacacaatattttttaaaagattttcgtgtgacagtattttataaaaattaatctaaatttcccttttatataaacatcatctacaatacatatacatattacacttgcaactgtttattaggatcaagaccagtatacataattaaatttatatgtatgtacatattatatgtatgaactatgatatagataataattagtatagaatgtatggatggattataaaatataaactcaaatttaaatttttagtcataatttattttgataattttagtttttattatcatgttgattcgtgttcattattcattattttcataaataataaacataaatttgacgaataatttgtttgtttttgaattattggatttacgtttttatttcagatttttttttattatttataaagaatttgggtaataaaaaatagagtaatttacggcataaatacctaagtttaactcccagatgtaaataaatacctaagtttagtttttggcggtaataatacctaag

SEQ ID NO: 124873 - DNA, 620 bp, Cannabis sativa
accggcgagatccgataatttcaggttcagtttagagaaggagaaagataaatacatacaaaaatggcgtctttcccaggcaagaaccaaagaagaaaaggaaagtgggagtgtcctatttgtcatgcttacgtggctcaatttgattgctcgttgattttaaataataacgttaaaactttgaaatcaagatgccttgtttgttggtgtctagtgttaaattaattttattattattattttttttgaatgggtgttaaattaatttaattcctttccgattatctaaaaatgtaataaaaattatataataatattatgttatctaaaaatgatgtattctttttcttttttaaaaaagaaattacaataataatgatgatatatattaaataggaaacaaactctacttcgcttacggtagtattttatttaatgataattagtcataaaagtctattaaatttaaaattttgatataaaggataaatactattttagccaatgtgttttgcaaaaattatcaataagattttttgttttgttaaatgataaaataaatcttatattttctaaaatggtacaaatagaaccctgaattgattttttatcaaaataaa

SEQ ID NO: 124874 - DNA, 967 bp, Cannabis sativa
tttgtaaatatttgtatatagactgtataaatgtttaatgggccggcccaaagtatttttgtaattttttttccttttttgtatttttttatttttttccctatattttatgagaaattgaagatatttttgctatatcttcaatttgattttgcaaatgatagaaattataagaatggaatcataaattaatatttttacttatcaacataaatccaaacccaaatatcaggttcataggcctctccagttaatcacctacgtgtctattatcaaacaagcctaaattaactttatcaaatatcaataaataaactgaaacaatataatctgctatgatttttccaaaaaaagctatgtacacctctcttttaagttatgattggtaaaaatagtttccttatagtataagtgcaatacatgaggattgatagaaatagcctatatgtatatataactaatatatatatatatatatatgaatgtctatatgtatttggtttctaccccaatgtgattttgttaaagagattctagagaatacctttctcaacttaaaggattggtattggtccatttttacaaaagcttatgacatgtttgattgcactctgattttttaagagttgaaccaataataaatttataacgaaattgataatggtagaatattgatttctcgtaaaataactaaagagatgagtttatttatttattatacacaacactttgttttaaagtagggttgtacataaatttgtataaattgcctaattcgaacaactcgttcaaactaaaccgaataacccgacgaagaatacaagccgaaaaatttgatgaaaatataacctgcctaatctttaaattgagcggattaaaaataatactgttgaccgaggttttcggcaactaataaaatattataaagttactgagctgtaagaaagtgagagaaggatttttacgt

SEQ ID NO: 124875 - DNA, 1073 bp, Cannabis sativa
cctcttcaacttcatcatttgtttgaaaggtttattcacatcaatggaaaatctatcggattcaacatacaacccaatatggtttaccacgacttttaaaactctatcggaacatgaccccgattgtaagtcatatgcacttgaaactataaatccaacatattcaacttggcgtcttttggtctctctccctcatttaggcattgcaaaataagatgcttaagatcaaaagtccagggacacccctcaataacactagtagtatcaactttatgattaaattaaaagaagaataaattatggctcaatttcttgacaaacatactttgccctggatgccacagcgatgccatcacattttgaaaaacgttaaattttgaaaaccttttggtaagcaacctccacactaaatgccaccttgtatcaaaagtttccttctcatccgcctctcttgacacgaaaactttgtcatcctcattctgcaaacaaatatcatcccacctctccatcaaattattaacagataaactctcggactctataaaagcacaccacgaccaccaaaataaaaactaaaaatttgaatggggtatttatttttatttttataaaggatctatatataggaaaagtgcgtgataacataaaaagcggtatatatatactagaataatattactaggttgatattacatgcaatgcacgtataattagttttttttaattagatttaattaggtgatgttaagtgcaatagatgtatgtttaattttttttaattaggtaatgcattttttttaatttttgaaatgagatttgaaattttgattttagaatttttttttagctagtgcagctacattagtgtatatatatgctttctatcaatgattagtacttcatattgtcatgatattttaagtttgacttaccttacaactataatttaacttaaaatattttcaattttgatattaaaaaataatttttataaattatattatgtgctttttaaaaattatgtaaaaatgcatgtagatatatattatgaataaaaaagaaaaagttatata

SEQ ID NO: 124876 - DNA, 663 bp, Cannabis sativa
ttacaaaaaatagtgccttatgtaattattccttttttataagctttccttccatttttctactttctcattctttttaattgcacttttttaaatttttgttaatgtttagtattatttaattaaaatatttttgtaacttttcattctcataactcccattaaaaaataaattttttagcctctttcatttcacatttaattagtttatttttctaaaaaaaagttttaagttttacgttaaaaaccctaccctttttcttatcaaagaaaaatagttatggaattcatctatttcaatttgaggtatacatatattttttttatatatatatataggtagatttacaataaattaatatttatataaaaataaattaatctatctgtctatatatttatataattgtattgttagagtgaataacatgacatttctatagttgtgttgttgggataggtgacatggtattttattattttagtattgttatttttttattttataattttttaaaatttatctatttctagttatatttttcttattttttctatttttagttatattttatttgcctattcattcacataactcttttttttttttttttttggtaaaacctttttatgttttaacttttatacacttaacccctttat

SEQ ID NO: 124877 - DNA, 585 bp, Cannabis sativa
  modified_base (529)..(536): a, c, t, g, unknown or other
ttttctttttctttttttaaattccattttcaatggctcacatcaagaggttaacaaggagagtgaagtggtttagtgcccagaaaggtttcagcttcattgctctaggagaaggccgtgaagatctcttcgttcaccagacttcaatctgatccgatggttttcgtaccctttcggagggtcaaagtcaaagtcgagaataatctagctagatagatcacgtcctcctgtgtattgagacggcgtttggcgttctctgagacccagctgcactcccactctctttcccttctcctttttgcgcaaccactgcgtagtgctggtaaagaccacctccggccacatccaatccaaacgaaccccaaaacccaaccccctctctcgggctcactctccaatttcttccctctctttttgatggatctagatctagaagattttttttttttcagacctggatggtagtttaaggaatttgaggtttttttaggtgcgtttagtaatattttgttttttaattttttaatcnnnnnnnnaaagtaaaatttttgtttttgaaaaataaaaatgctttctgtaaccact

SEQ ID NO: 124878 - DNA, 790 bp, Cannabis sativa
tttatcccactggcatacatcccggttttcatattagcgaaaaccgggataaaaagccttaaaaaccgggataaaaggcctttccttgtagtagtgagcccttaattagaaaacgccattaaagctcgaacttaagtttcaaaaagttccaaactcaatttctaactcaaaatcacctcaaattcaacaagtaaacatagaaactagtcccatagctaccaaagaataattccataaagtgagaatctccataactactctaaatcacaaagtcactatataaaaccaattgttttcaacttaaaacaaaaccaatccttaccttaagctttctgtcttcgatgattgactatcccgctactattgaagcttgaattactaagttttgagttgaaaatttaagaaatagattaagggggagaaggctctgacgaaagagagggttttgcttcgttcttttcttttctgtattaagttttaacacttaatatatataacttaactgatacattttaattttattaataaataataataaagataatgataataatcatatatatattattaatattattaatattacaaataaaatttaattaataataattcttttactattttttaaccattaaaaaatctttaatcttatggtatttggtcagcttagggtacctcaaaatactctgatagttctataattaacttatctcaataatcccaccaatattactaactaaaactattgtgacatttttgacctccaattgggtctccagggtcgtcgaac

SEQ ID NO: 124879 - DNA, 1978 bp, Cannabis sativa
tagctagaccaactggttgtctttggtttcacatgattttttatttctctcaacggtatagatgtttttctttaaaatttacatgtgttaccaagtgtctttaagctcttgaaattaaactactggcttgctcaatgtatttttcaacttttagtagtgaaacaaattgtgaatgttttcttaattttatggtgttaaagcaatcaaatgttgtgaatacgttgattgttgggctgatcactagtgtcttctactcgagttttgtaacaatgttttttgaaaaacttcatgctttgataactttactggtggcgtagaggctattctcacggtcatttgtttgtatatatgtggctaaatgtctcattcaattggtgaaataaagcttgttgacaggccaatttgatctgtttaaattcatattcacaaaaacatatttgtcatcccctacacacccttggaaataggacgaatgccattaatgctgctgtctgaagatttttctattgatattgattatcatattattttgaagtctcaatataattaacttccaattctttcagattagaacaaggatggtagctcctggtggcgaagccttaggaggcgtaattggtgcttttcgccatatgattcaaactgaaggcttcttctcgctttacaagggtctaggcccctcaattgtaagcatggcaccttctggtgctgtgttctacggtgtttatgatatattaaaaacagcatatcttcagtcacctgaagggagggaaagactaaaacatatgaaacaagaaggtcaggaactgaatgctttggaacaactagaattgggtactgttagaacattgctgtatggagcaattgctggagtttgctccgaagctgctacttacccatttgaagttgtgaggagacaacttcaaatgcaaagccgggcaacaaggttaagtgcattctcaacttgtgtgaaaattgtcgagcagggaggcgttcctgctctctatgctggattagtccccagcttattacaggtatgttattccaatgatagttgagtgttgttccaatccaaatatattagttgtttatttatttttgcttggtacgaattgcaggttctaccgtcagctgccattagttactttgtgtacgagttcatgaagattgttctcgaagtggagtccacgtaatacatatgattcctagtcaagattgcacctgatggttgagagagagcggacacattttttagttcatgagatgagatatatttttatgaaaatacttttgagagagtttgagtttggggtttatgaaacgattgaaataagatggtgggaagtaagtaatggtccattttgtccatatcttattattctcataggcatttatgttgtgttgtgcccctcgcctcgccgtggcccattgttttttgtttttgtactacagatggtgccgaccaacaagtctctgtctgtttctcaattctcaaaaagactaaaattgactaataaataatagtaatagaacaagaggagcgctgaaaacactctatattgcactattttttgagtgacatgttattctagttttcattctcttgtcacaccatcaaattactaatatattaaaaacttattcattaaaattagtgaaaaatacatattactaatatatatttgtatacactaattaaattatatcctataattaaaatatatataccatgacaataaaattatatagcactattgtatataataaaatagaaactaaataaatattattttaaataaatatatatctataattaaaatatataaaaataataattaaatatacatagcatgccaataaaattatttatatacattaaaatatttatattatgttaacaaaattatataccactattatacatagcaaaataaaaaagaaatatcatctaagaataataacatactatacaacaaaa

SEQ ID NO: 124880 - DNA, 1597 bp, Cannabis sativa
cgaaccctagatctgaacctagaccctagacctaaactcggaaacaaaatcggatctcggcccagaccaagaccaaaatctagactcagacccaaattaagaccccgaactaggacccgaatccagattcgaccttgcaaaatatatatacatgtaataatatatttttaatatagacattctatatcattaccttatttaatatatatatttattatatagacatgcagtgagatggtgatacccataggcattgagaatgatacaatgtttgaagcttacccattcaaagtagaagatttcattaaggattgcaaagactcttatggggtcccacctcgtcctcattgggtcacttcatactatggaggtcatgtaagtataataataatatataataataattacttcaccaattaaatatccttaattagtattcatcaataattaattaattaatggttaatttcaggatattaagcttatactaaatagatttggcagcaacataattttctccaatggcctcagagacccttatagtagtggagggtatgtatttatatatataattatttattaatttatatttaataacttttaattataataaataataatctcatcctaatatgtagggttttggaaaacatatcagatagcattttggccatcaaaacaaccaacggttagtatcacattttcattatttcataaaaatataaaaagtatatatattatatattaatttgtttgatcatatatttaaaattaattatgttaattaattatatatatatataggatctcattgcttggatattcttggaagaaaatcaagtgatccagattggttagtggagcaaaggaagattgaaatcaacatcatcactaaatggattactcaatactatgctgatcttacatcattaaaaataatataattataatatatttatatatatatatattttgtatggtgctcaagacttaagtcttttagtattaatatttattaaaatactttaatctaaaactcaaatatataataattacaaataatttttcatatatactttaatggaacacttttcaatgcatatggttactattaaggccggctatgatggagtacaaagtgggctactgtacagggccaaaaaaaaaataaagggcccaatatattttttctttaatgtccaattaatagtttttttttaatgaacctaacttttgaaagagctaacaatttgtcattagtcacttctatcccaatgcctaaagcccattttcacttctattaatgcttttaagtaaaaaaaaatatattactgctatttattattttttcaaatttttataaatagttggaattttttggtgttttgtaaaatatataactgaataataatatttaaaaaatattatttataaattacattttttttgtaggggtccaaattttaaattaaaacaggacctccaaaatgtttaacacggccctggttactattaaactattaaattttaatctgataacgaataataaataaaaatttaaatttttattcttaatttaattatttaattaaagaaa

SEQ ID NO: 124881 - DNA, 828 bp, Cannabis sativa
ttttttttaattttttttttagatggaacaatccatatgatataaaaatgagagattttttttaattagataaaaaaattaagcataaaaactcaaaattttttaattttactcgttcataggtaataccccccatatatatatatgttgacaaaccattactttatattttagctgtgtaattaagagtgttcatctttttcatcttgttcttgttttttttttttaattaattctcattatttgtatcattttgttttgacttggagatcttcatcatattttcttttctatttctatttatttgtaattttgaacataagtgtcgtaacttttatttaattattattttgtccaagtgtatttctatcatattgagttgtaatattttgtttctttattctattgtatattatattctccaacatttttgtgctaaatgttacacatgcatacatatagatatagatgttatgttattttaaggttagactactttaaaagaaaaaaaaaacaaataataataatgataaagtatcgcatgtggttcaaaatcatgcatgcctaacttttttgttatttcacttggtgaaatttacctggtacaaatttggtactatttaactcaatatattaaaggaatgcttttatatgttacctacttttgtatggtagtactaatgcctaagcatgatgtatatatcatttacccatgtaaacaattgttattttattttttatataaaaagggcatttaattttaattctaatatgaagcaaaacattatggtaataattttgtttttaaaatttttgatcacaaatata

SEQ ID NO: 124882 - DNA, 1935 bp, Cannabis sativa
  modified_base (1067)..(1070): a, c, t, g, unknown or other
cctacctgatcgtaccgtacgatcgttctgaaatacctccttattagggtaggcatgtaagatatactacatagtgtgctgttaagtcttgatctacaacgatcgagtaagtttgacagcatattgtcatagacgattacagttatttgagcgatccaccgagtagctagtttcttctacccgatcggacaatacgatcgttctaaaatatccccttattagtgtacgcgtgtaagattttctccacagtgtgccgctaggtcatgatccacaacgatagagtaagtttgagagcatatcgtcatatacacttacagttatttcagcgatccaccgagtagctagtttctactacttgatcggaccatacgatcgttccgaaataccccctaattagggtacacaagtaagatttaatccacagtgtccagctaagtcttgatctacaacgattgagtaagtttgagagcatattgtcatagacaattacagttatttgagtgatccaccaagtagctagcttctactaactaatcggatcatacaatcgtttaagtagctagcttctactaactgatcggatcatacaatcgtttcgaaatacacccttattagggtaggcttgtaagatttactccatagtgtgccactaagtcttgatcttcaatgatcgagtaagtttgacagcatatcatcatagacagttttagttgtttgagtgatccaccgagtagctagtttttgctacctgatcggaccgtacgatcgttccgaaataccccctaattagggtgcgcatgtaatatttactccactgtgtgcagctaagtcttgatctacaacgatcgagtaagtttgacaacatattgtataggcagtcacaattatttgagcgatccaccgagtagctagtttccgctacctgatcgcatcgtacgatcattctgaaatactccttgattagggtagacatgtaagatttactccacagtgtgtcgctaagtcttgatctacaacgatcgagtaagtttgacaacataccgtcatagacgattacagttatttgnnnnatccaccgagtagctagtttctgctacttgatcagactgtacgatcattttgaaatactcccttattaggttacgcatgtaagatttactccacaatgtgcctctaagtcttgatctaccacaatcgagtaagtttgagagcatatcgtcatagacaattatagttatttgagcgatccaccgagtagctagtttttgctacctgatcagactgtacgatcgttccaaaataccctcttattagggtaagcatataaaatttactccatagtgtgtcgctaagttttgatccacaacgatcgagtaagtttgacagcataccatcatagacagttacagttatttgagcgatcctctgagtaactagtttttgcaacttggtcggaccgtatgatcgtttcaaaataccccctaattagggtacgcgtgtaaggtttactccacagtgtgccgctaagtcttgatccacaacgattgagtaagtttgagagcataccatcatagacagttacagttatttgagcaatcctccgagtagctagtttttgcaacttggtcggaccgtatgatcttttcaaaatactccctaattagggtacgtgtgtaagatttactccacagtgtgtcgcttagtcttgatctacaacgatcgagtaagtttgagagcatatcgtcatagacagttacagttatttgagcgatccatcgagtagttaatttgtgcaacctgatcagactgtacgatcgttttgaaagatctccttattagggaaggcgtgtaagatttacaccacagtgtgtcgttaagtcttaatctacaacaaatattatttattctctccttaattctctattttttaaattt

SEQ ID NO: 124883 - DNA, 1860 bp, Cannabis sativa
aaaagtaatccccgtccccgccccgttccccatttagacggggaatccccgccccattaggggcgggtccccgtggggaaaatgtgcatccctatgtgcaatagtatattaattatttatatagaatgagtaaaatataataatatttaaatgatatagaaaaaataaaaaagttgatgtatgatataatgtaaaagtttaagataaaataaataaagttgaattttagtgatatattttaaagaatatggtagagaaactattagttgggagtacttttagcttgaactgttaattgtcgcaaattattagatatttaacttattattattgaatattttccatttattctcatattaataataataataataataataaaaaaatgaaccttaaaaagtttttttgaactataaattttatttaattagataaattcaacctcaacaatattagtaacatcaaaagggagattacattccgaaaaaatacgatcaacatataaacaaaatgctctagctataagatgagcaacctaattagtagaccgtttgacaaaacgtaaagaaacatctctaaaagaagataaaagatgtttacgatcttcaacgataccaccaaaagtagatgacaaaatattcgaatttctaatagcttgtactaataccagacaataagattcgataatactaacacccacaaaattgcacttcaaccatgataacacttccttgagagtcatgacttcaacaatctatggaagaacttgcccaattcgcaatcccgtaatcccaaccacgacctgacccttgtgatcccgaacaaccccaccaaaaccatgccttccctcctcgtcaaacaatgcaacatcaatattcacctcgagttgtccatattctgatttagatcatagttgagccccatccaaaagatatcaagcatcaaatgaatgaaacaaacttctttcttgagcttttctccactgatcaagagtgatacgagccaagttgacaatgaactacccgacttttcctacccctccttaagagttgatttcgtgcgaactaaatcgcccaaaccaacatcaccgcttgaacactttattcctcacccaatcgtgaaaataaattaaccttaatttcatgacaacattaaaccagtccccaaataaaccctaaagagttagtaagtcaaataatgttaattttttttccaaattattcacttataacctcacaactaaaatataatttttaagaaaaattctataatacacccctaaaacataggtgcatcaatacacctcttgtttttaatattcagatagttttaatcttaattttttttaaaatcaataaatatcataattatttaagacattttgtaaatttttaaaaaattcaaaataatatactttttattattattttttattttatacacgtgtaaaacagactatactataaatttatcaaaacattacaaatgacaagatatcttaaataactaacgttataaaatatctatttaatataaaatgtggctatgtaatataatttttagtttaacgacattttttaattttctacgttaattttaatagaatattcaaattacttaacataatattctttattaattttataatattattatatatatttaaaaataaaaattatgtaaatattttatataaaaaattaatttaattatatatatttaaaatataaattacatctatatataatcatatttatgtgggtaaacccccaatactttcgttttggtttcactaaacccccacaacccaaatttctgcgggtaaacccccaaaaccacgaaactgttagcaatttaccc

SEQ ID NO: 124884 - DNA, 1219 bp, Cannabis sativa
tcgataacagcttcggctggtgccttctctctagacagtgttgtcccatcacccttaggcttcttgggcggaggagatgagcttgagcttcctcccactctcttattcagaacttcaagcatcttctgagacatgtctgtgcaaaataaaagtaacgtggttagaagaaaaaagcactagaagtataaaagtgtaataatcaagaggattaaaaacaagacggagtatcctacgcttcgggagaagcgtttgcctgagcaagactcgaaagttcatcatcacctgacaagtctcctatctccgccatgacagttttcccctttcctactacaagagtggatggtcgagcaggtgaactgggctacctatttcgaatggcatgttcaacaggcgtgggctcggccggaagtgtcttcttcctttttagtggagtcaccggctcttcctcaacctcatctttaggattcagaggctcatgagcatgctgttttgctcctgcaccacccttcaacatagcttcacgcttaagttgaattagttcattctccttatgagctccctcatcttggccagcactggacttcctcttcttctccttcacatgtcaggcaatgaatccttcgggtaaagcccgtactccacaaagttgtcctcggaggtcaacaaaatgatgtttcgggcatcacccagcagctgagtaagattttgagctttatccttgagagcaagtgtgagggctggacggttatatacaggaatctgttggaaccgagtataggtggtacccatgccttccaccatatagtattcatcagtaaaatgccaaattttgctaatgcccttgtccactgtgcccgtcaaccacttgaagtctggctgaaaagagtagaaatatcccgacctaccttgtttgggagtagacttgaaatcgaacaaccagctaacctcattgggagaaggcatatcccacttctaggtggcatagagaacgaaaaggggcgatagatacttcatgcccttaggagtgaactgggtcgggcagagacaaaagaagtctgccaccttcctaaagtacgggtgcagaggcagcagtgcccttgtttagcatgggcaccctgttgggattttatgccataaataaaacccattacaatctaatcttatttgttatcaataagagattagaagtgatttatgttaacatgtagttttcatgttt

SEQ ID NO: 124885 - DNA, 2169 bp, Cannabis sativa
  modified_base (2135)..(2144): a, c, t, g, unknown or other
tcaagaccagttaacacatttgacaccaactatttctctgggtaggggtcaccagtgagagttaaaaacattgggccactgctatttttgacgaagatagtctgccatggtcatcgcccctttcttggatgtctggattttaggtcgatactcatccattttgatgcgagaatgagcaccaaacataatttctaaagcttgccgcaaactaaagaagagtcacgatccatgacttctgtggctatgctttcggtcatggatccatacaaccaaccaagaagaagttggtcatggactatccatgttttgaactctagattcacatcagtagaatctccacctaagatttttggaggcaaaaactcaataggtttcacctttgcaccattcaagtagccatccaaacgatgaccacggactatagttgacaccatcgtcttccacaaggtatagttgtttctatccagttttaaagtgaatggttgagtcagtgtgcctccaacttatggaccagggacagttgttgatggagttaagggttgagcaacagtgctggaggcacttcttccagctgaaccaacttgttcaccatgaatagagggcgtagatggatcgaccatggagaagatgggttaatgaagaacaccacctgtgtagagaaaggctctgataccaacttagaaaaatatcaaatggagaaaatgaaaagctcatctcatttgaacatgaggctggccaattgtatttatagaccaatgattacaactgaatacaatgtataatcattacaaattaattaaatcttttacacaaaaaaaggaatatcctaacggtacaaaaaatgacaaagtttgttaaacaatttggggaccaccaaaggttagtatgccatctcattatatctaaccaaatatagagagaaaattatttcacatctgccattcgttcaaccaatccgagctagtttgttggtgtacgtgcaccttatttgggtatccacttttgtagaagagagaggagtcatacaaaagctcacctgaacacctcgcggtcatccgtttaaccgatctgagctagtttgctccaaagggtacccacttttgtagaagagagaggagtcacataaagactcacctaaacaccacacgcgcatgctgctgccatctatttaaccgatacaaactagtttgctggtgtggtgtgcaccttatttatttaattaattaatacagttttaaacgtgtttaactaaatggtaaacaagagatattttctcctcaactttttgagtcatgatctaacgcactctcccacattcagaaacaaaaaagactttcttactgtttgatttctctgagcattccctatttagcgcatcagaaccaacgggagcaagacatccctttttacaaacaattttcccattcgatataattttttagcagtaatatttttagatggtgcattcgacaattcgctacaatgcagtgatgttctgataaagtgtatgacatggttgttttatccacagaacgacaaataatttttcgctacttacacattcttgggcaatgtcgtgaacgtcttaaagagaatgatctagtttgcgactcaacccaaaaatttcattcagtaatattgttctttttttttcagtaactgtgtttataacccaatctagtagggtgcaaaattcaataagaaaaattgctatttattcttttttaaatataacctatttttgactttttttttccttaagtttctgggtgtataaagtttttttttctttttttttttaaagcaacgaacaaattcaagtgtaaaaatattttgattcttttgtaaattgctaagggtacgtttggtaacacttttttaatgagttttttgtttttaaaattagaaaagtgaaaatattttctaaaatcatgttctataaaattgtttttactttttaattttttttaattaagaatctaaattttaaaaataaaaaaaatcacttttaaatttttttttaatcaatattttggacttcaattccaacttagacattagaaattgaacccggacccagccttagaattggacttgcccccgattctgacctcagacccgacttaaataaaatnnnnnnnnnnaaataaaaataaaatttacaaaaca

SEQ ID NO: 124886 - DNA, 1197 bp, Cannabis sativa
attttgattgaagtgttaaaataaaataaaaaaaaatcccaaaaaaatgtacattctttagaatttcaaataaaaaaaaaataattactaaactctgccaaaatgaatcaatggtggtttatgttattgggtagagtagagacgttaatgaggccaacatgataagaggagaggacttcacaccaactgtgtctgtgaccaatcaatctgaggtggccagtagtacaatctctacccaaatcataggagccccctacaatcaatggcccaaagtattctctaaaatgaacttttacagtcaatagttaacggcaaaaaagccattgcactctgaaatctacacaaatcaacaaatataaatgcaaccatctttgtgtttcataataaatataaacaattttctgtctagtgccttctaggaattcctgtaaaccattgtttgaggttgatttgttaatttattagacaaatgaagacacaatctgtaatatctttaactctattgcaactaacaattcttaaaacactttactcctatcacattattggtataaagcaattgtgtatgtatgttacaaagaattatcaagaaaaatccatatgcatttacctggttgaacaacttatccaaagtagacactgttaaaacagcattagcatttaatttaactgctcttaaagaacttttaataacagatcagatttcaaaaggagtacagtgaactaagtaaaggctcggaccaacctggaatagatgatggaagagcattggagctacaacaactagtagttgatgctgtacaatttcagtaattacaataggcaagaataatgatatttaaatcaactctagtttacttgcaatacataaactaagtttaaaaattactatagtgataaaagtaaaactttatgatatacaaattaatgtgcagattgtacaacagttcaaaaaaagagccttcttaaatttaaattattacacaagcccaaaggacccaaatttggtctcaactcaactcaactcaatacattgcttgtcatattcctggcacagccctggtacaaagttgatgcaccaccaattgtaaatgaaaataaatttagctaacaaaaaaggtctaactcggatacacccatgtaacagattcacagtgaaaaagaatctgaattgttagctaacaaattcaatatgaa

SEQ ID NO: 124887 - DNA, 841 bp, Cannabis sativa
tttgaatttaaatctaattagatataactttatttattttcacattattaatttgatgaacattgttttggtatattttacaaatttcttcatttataaaagtgagtagttaacttattgtttgatttgctttatgtacagaataaacttatttggaagaataatgatgatgataagttagagactgtgatgcgactacaagtgaaattcagtgattacaaagattttgaaatcatatatatgatatttgttttataaatttatcatttgcaacatttttttgttaattccaattcaatttattcaaacgatgatatagtattttaaaaacttacaactatataataatatataataaattaattaattaagaattatcatatactaatttgaacaatacaaatttatttttcttataagagtaaaagtgaaaatttaatagaataattacccattatattaatacatatttatactgaattttaaaatttgaagttttatataagtttatatgacttaattataacttaacaaaatccaacaggcaaaggacagagtttgtttcctagttatttagatatagttgagggagtatggaaggagatgtaaaaggaactcatatgtgtctgaatatgaaattcccattgtaagctattgggtagaggagtaagacaccattttgtaactagttcttttgttcttaacctgtactctcatgttcactcattcatcaataaagcatgtaaagtcttttttgggtaagttagttgacaaaatattttttcctttatggtaagattattttgcattcatacccgattttttaccttgtatattcggt

SEQ ID NO: 124888 - DNA, 1544 bp, Cannabis sativa
aacgatacttcgaaacacccaaattaggagttcaaatcacaaagttatgaatattcgaattgcccagaaacgaggggcgggtcgcgacactccccatatggggccacggcaccagggttgaaaacccacgattttaacagaggcgagccgcggcgcggcgcttgtgttctaaactcaggaaatcccattttctagcttcaaaactaagctcaaaacacatccaaatatacccaaaacttcaacaaactctcaaatcataaaccacaattataaattatcataacagagagtaaaaacactaaattcaagctttaattcacaacagaatatgcatccaaaattcatatttaatcacacacaaagcaagcttaaacttgagctaaaattcaacataacttccatataaatgcttgaatctcaaaaccaaatcttcatacatgaacacaaccataaatagggccaataatcagaatccaaccacaaactcaaccctagaatctcatctaaaacatacaagagcaatatatatcaactcaacaacttaatcatgcataagacaccacacttaatccaatttccaccgacatgcatatatgaacacaatcacaaataaaacatgctttttcaatcttcaatttcagcaaaaaattcaaaattaaagtgatagaaggactacctcaagctatactcaaatccaagcaccaagatcaccaaatttctagcttgatccaaagcaattttcaagaattaaccaagtgttgagatgagaaatagaaagggtgagggagggtcggtttaggccaagaaaaatcagaaagtaatgcatttcattttaccaaaaatcccattttgttgaaaatagaataaatggtcaaaaagaccaaaatgcccctagggtcaccaaatcacatattcatgaaacaagggtataattatcattttatcacatatcacactcaaataaattcagattattcaatcaatcatagaaatgccaatcccaaaaaaatgtatttcggccccgaacccgattcgatccgaaataccgattgtgactataccgcgccaacttgttagaaaatacctgtagaaagacaaaacaagtatacaatataataatatcgtccataagcatgcaataatattaaaattacagttttacccttctcgggtcaaaattacgaaattgcccctggctttccaacggggtcttaacatgtcatttatctgattaattcacatataataaaaaatataatgatataattccatattaatacatatttaactagttagagttcgctaatccgttttcttaatcttaaggtattacaattattccctctttatagaaatttcgtcctaaattttacctgaagaactctggatatttctgctgcatatccatctcgagttcccaggttgcctcctctattttactatttctccataatacttttatcagtgcaattgtcttgtttctcaagactagtacttgcactggttgttcctcgtatgataaatttggctgaagttccaatgct

SEQ ID NO: 124889 - DNA, 843 bp, Cannabis sativa
tggtcgatttcttggattttttgcctatcttcaaatgaaaaacacctgctgccatcaccatactacctcacaacatgaactaccaccacacagaactaaaaaagataaataaaaattaaaaattaaaacctatagcaaacactaatttcaagttagaaattcttaaatcaaaaggtcgaaacttaagaaactgaatatataaagtcttgtaccaaaaaataaaatagaagaaaatcattaaagcccaaacacgtatttgttcttggtttatacttgaaaccgagattcaaattaatacaacaacttatatcaaaacattcaaactaatacattatcttttaagataatgtatttattgagattataataaaatgtagagatttttttttgttgatataaatgtagagattttattttaaagtaatattaaaatttcttatggtcgaaatgtgggagtgagccacaaatttaatcaaaatgtgatgagatattgtgtgattaatttatttgattttgaactcaaattctaaatcaattttggctacgtgcataaaaaattttgacatattttggtgtcaaattttgttaaaaataatttcaagaaggaaattatggagacaaagtggtcttttatattttaaaattaagatattgtccttataatgaaatgtgaaattgtggaggtgataatccaaagtgaaaagttgaagacatgtttggtgtcttaaactaaagtgtaatttagacatgtttggtgtttaaattagtatttaattttgatatgtttggcatcaaaattattgagaatttaagttgtgtaaaaaattaatcttttatgattga

SEQ ID NO: 124890 - DNA, 731 bp, Cannabis sativa
taattattaattaaaataaaaaaactaaaatattaaataaaactaacactacgtgacttggcacgtaacaatcacctagttatatcttaaatgtgtgtaaatttatattactatttagcacactattgtaatacatttttcgctaggtgagatatatttgaattttgtattacttatttgcatttacaataaaaatgctaaacatggagatgtaaatcggcatatattgctaaactatattttattttgcacaaaaattgtcaacaattttatcaaatttgacacaattacaacatttgtgtcaaatagcataaattttacatctctccttgaaaataatgcaaactattttgaaatttatcttgatggtttattttattttttatttttgaaacggatctttacccatttcaaaaaaaaaaaaaaaagatcttgaccatcatattaatacttgtttatctcattttttgagaagtacttgtaccatccccgttttaagtttttattgggcccttacacccacataatgatagtttttatacacgaatcatcactttggttgcttcaatgatgactaatcctacaaactaacacgagtatttccagcgtgtttagtcctcaatcgcacacttcctggaaaaactttccaggggatcaaccatcttaaaattatcccaagtcaagcacgcttaaccatgaagttctttcgtgatgggctaccgaaaaataag

SEQ ID NO: 124891 - DNA, 799 bp, Cannabis sativa
tataataatgatattatagtctaattcattataataacaaatatataaagaactatgttatataaaatttttattttttaaatatttttaaatatatttttttttcataatatagattaatatgcttttgataaaataaattataatatttttaaattatatttttatcatttgtaaaaaaattataatttataagaaaaatttattgatgtggtttgttaataataaaaatataaatatttttttatttctaaaatgtctaatatatgtttcgtgttttttatgcaaaaaaaaaaaaaatctaaaacaaaggattatcccaaatcgatgccgaggaattgatggcaatctcaaatatcgcagtagaatgtccaatactttatatcttttaagtaaaaacttatattaaaagcattatactttgcctcttcatgtatttgtacaatttttttttttttttggtatttttaacatgtgccatattttcttaaaaaaaagagtttaagtttgtatgcatttttgtttattcccctttataaattgcttttgcaaaaacaaaagaaaaagaagtccacaattgttgttagaccaagagtcactaaaacgaattattgctgtaattatgctccaaggaaacagtaattagtgtaccattaattttttttttttacagtgcacgacatatcttttttatatatttaattaatatttatataaatttatagtatctatctatttatatatctatatatctatatttatcttttttttaatatatatatatctatatttctatata

SEQ ID NO: 124892 - DNA, 2557 bp, Cannabis sativa
tgaatagatttagtattacctttgtaaaaaaatcactaggtcatctgcgaagcataagttgatgagcatcagattcttacagtatggatggaaaccaaagcctttcgaataagaagcttggatcaataaacaggtcaaatattccatgatcagaacaaataggagtggagatataggatccccttgacgatgacctttctcccctttgaaagacctatgaagacaaccattgagcataagagagtaggagatccccctcaaacaaaccaaaatctaatcgatgaagcgggaagggaagcaaagacccctaaagaactcataaacaaatggccaatcaatcgtatcataagccttactgagatcaatcttcataatgtttctcgttgaaatatgttaccttgtatcaccctttaataattcctgaaagatcaatatgttgtgtgtcaataatcagtttttaacaaacgcaccttgattgttttggtccagaaaaggcagcacctcagcaagccgatcacacaacattttagaaatgcatttgtaaagtgtgttacaacaagctatatgtctataattagcagttgaacaagggttatcattcttgggaataagagatataaatgttttattaagcattctaggccttatactatcttggaaaaaattaagaacatccatagaaatttcctcacaaatctcattccaaagccccttataaaagcatgctccatggccatcaggaccaaggcttttatttgaatgaatatcaaataaagattctttgacatcagctttagtgaagggtcttatcaaggcaactagttgctgaatattaagaatatcaccaaacttcaaacagttcagcgatatactttgagtagcactgctcttattacctaaaaaattcttgaagtggctgaagtagtgtttaataactgagttatagtcatcaataacttcaccattattaacaaaagttgtgattctattctcaagctttctctttttcagcaaaacatggaaaaaatgagagttttcatctccaaattgtaaccaagtaactttattgagttcttgatcatagctagcatatttcaatttggctagattaaactcctgctgctttaaactttgctcctcttgtagcagcaaacaagtagggttattaccaagatttccttgggccatgctgagcttctctttggcctcttaaaacatagtaggaatttgccctgaaacctttcaaaaattagcctttaaaacatgcttcagcctgtataatttgcagatgacacctctaagacctctcttaacagtaggtaagttccatttctcttaaactttggcgtttttagttactgttaagcatccaccaattaaaaaacctgaaaggtttgattccaacattacaaatatcattttttaattgtacagtaactatggtcagaaatatcatcccacttgcaaagagcccttgtattagggaaatgatcacactagggttcattcacaaaaactatatcaagctttgaatagatcatattttccacttcatgtttatttgtcttggtgaagctagaacccaaacactaaagcttttccacttgacaatgagctaaccaattttgagcatctagaacatcattagccgtgatttatctctgccccattttgtctttatagctaagcgtagcgttgaaatcaccaaaaacaactcaaggatgattcaaacacccaaaaccagccaacttttcccaaagaacatttctgaccatagcagaattagaaccatacacagcagtaataaagagaatagaattatgatcaaccactttaaccttgcaatgaacaaattgagaatcttcaaaaataatctgaacttggacaaagcatctctgctaaagaataaaaattctaccagataaaatagtactagaattgaaatcccaattagggaaattattcgaaactatatttgcaaccttcgtatgacaaattttagtgtcaaaaaaagcaccaaaaccaatcttattcaatctacaaatatcaaggatagttttctgtttactacctttattcaaacctcagaaatcccacctgatcatcttacactgctttatgaggtataaccatagaagtagttaccgaattcccaacatcaagctcctgaagagctgcataaacattactagttgaagaattagaaggctgtgaaccagtattcttaaacgctttccttctaggagtgatccaatcacccttaatataagtaactacatcacttgatgaggaaactttcccagccagcgaatctttaacctggaaaacagaagcattagaaacaactcattagtaacagaagttgttatatcagactcacttttctctggtttatccttaacagtgttatcaactacaaactatggtttattctgcacaatcttcttatcctgacccaaaccaggccatgatcttctgagcaattggcaacagtatgtcccaataagtcacacgcagaacacttagatggcaaccatatatattcaataaattgatc

SEQ ID NO: 124893 - DNA, 1282 bp, Cannabis sativa
aattccggttccttgcagacagaacttcaaaaaatcataactcaaccaaaaaaaatccaattaacctcaaaccttccagatctgttctataggctccaatctctcttccccatccaagacagccgatgcccaatgtgttcccttgaagtagaaacctccttccaccttttttgggaatgtcactttgctcgtgccatatggttcggttgcatctggaatataagaacttcaattcccagctgtgggggatgggaagattggattcactagttcaaagtgggagctaatagaccgcctaatatcacaaaatgtactttcatggaaggagcagccactatcttcgaaactatatggagggaaagaaatgacttagtccacaatgggaagtgcattcctttgaatcaactcatcattcacaccaatcgaagactattggaattgatacagaatcaagacacaacggaggtcactcccacaacctggcttcccccaccaatagggtggcacatgtgcaacactgatgttgctatgggtgtcaatagttcagctggtgcagccgtgtttagaattgatgatggtagcatcaccgacatccacacaacccgcatcatgcagtgtgatcctttagcgggagaactctacactctcacttggggggctgaacaggcagccaaactgggcctcaaaaatgttatcttccaaagtgactctaagggcgtagtggaggccattaagggtgttttctccaaagattcagatttgcatttcaacattactaatttagtggttcgattccatgctactgctaagaagttcgagctttgggaggcctgctggatcccaaggatagcgacctgtgtggcccatgacgtggccagatgggcgaaccggtcttctcgtttcggggaggttgaaccgtccaattttcacagtttcctgcatgtttccactgcagatggctgttctaatgacttatcgtaggatagttttttattgactctgttagttcttcatttggttttttttttctgttagtttgttagatttcctgcctagtttcgtttttttcttgacaaccgcttttggcttgtgttttgttctctatttgttctctttgtttgctttgagggcaacttcaatcaaaaaaaaaaaagaaagatagatttgtataaaaaaataatatctaaaaaatacttcattcaccgtaacttattatatctatcttttagaaaataaaataataatttatctctagaattttatcatgtcggtaaatattgta

SEQ ID NO: 124894 - DNA, 1040 bp, Cannabis sativa
gttaaaataaattccaacatattatactcatcaggcaaccttttacttctcttgtcctagccatgatttcaagattccttacaaatcaagagaagtcttattaggttgtgaaaaaaatttcaagaaatttcaaagcaggaaattttcaattaactaggaaagtattttgaaatttttgaggtcttagaaaaaagaattcaaggatttttatgagtttgagaatcattgaagcaagatgaagatgaaaggaagaaaatttttcaacaagaaaagacaccgatcaaaaaaaaatattttctaccttgaggatgaagaacacttgaaggattgatgaagatgaaaccccaagaagctttttaaaggctcgggcatggaagactaggatgggaagagttaaaattttaattaaaaactctcttatttatagatgagttcaatctcgtaattatagagcaattgagagtcttttaaatttaatgttttaaagaaagaggtaaatgatcagaaaaaaagataaaaatttatcctttcccttctcattgaagcatgaatttcaaaattcttatggaaatatgactatgaatttgaatttaaaaggcaacatccattcctaatgctacattaaaggaaaattagagatttaaaagaaaaggataaatgataagcaaaagatcaaaattattttctcttcttctttctctcttagatttttgaatggcatatgagaataggattaggatgtaaatcctattagtcctaatgccataaaaaatataaaaaaatttcaagttttttaaagaaaatataaaagataagtgaaaaaaaagtgataagtttttcctctttttctttgttactcaatttttgaaaatccccaagtacaaagaaagagagttcaaagtcctaattctattgggaatgcttgaagaatagaaaaaaatttctaagattgtcaaaattgatgctcacctggttgtttcgagagaaatggacttggttcacatcatcaagtcaactccacacaagtatgaagttaactt

SEQ ID NO: 124895 - DNA, 565 bp, Cannabis sativa
caaagttgattccacgtgtcaccatcatgtgatgctacgtcagagtacaaaaattgggataacaattatgaataatagtattataaaaaattagaaaagaaatatgagatatatttaggaaaaaaaaagaaagatgactttaatgtatttttaaaccgtcaccgcttcatacttcttatttatatatatatataaatagatatatagatggtgatttacttaagaataggtcacaataatattaatttttttcattaaaataatacagtagttattatttttttttaagattgtaaaaaaaatataaaaataaattaaaaataaaaataaatgatagtggtcactcaaagagagaatataataaaaaaaaaaaaaaaccaaaagatatgctgtgacaaaagaaaaaattggatactttattttatatatagggcaaattaacgagaatggtatgatttaagggaaaaaaacaaaaaaatacaaaaaaggaaaaaaaattacaaaaatactttgggccggcccattaaacatttatacagtccacatacaaatatttataaaaata

SEQ ID NO: 124896 - DNA, 1068 bp, Cannabis sativa
  modified_base (260)..(263): a, c, t, g, unknown or other
  modified_base (541)..(550): a, c, t, g, unknown or other
aagggtaattttagccaatttttttttatcattttttaatgtcatataatttaaatctaaccctaggagaaatcctataaaaggaataagatggttttcattctatccaacctaagtaattctagttttcattttttgtcagacaactagagacttgagaacctccttctatagaattcatatctcctcctcttcttcttgataaattttgagccttatagtgaaagagtacatgcccacccatagcaagtcaagtactnnnncatagtgtgtaagactgaagaatccaacacttgaaagagaatcgggctcaggtcttgataatactttacgacagaaaggaacaagggttagagatttgagtgaaatgagacatattattctgctgcaatcaatgtaaagttttttaactttatatgtatttcaattccattgttttatattgttcatatttaggatgttaagcacatacatggtagtaaatatagatcctggtaaaataatccccaacaactggcttcagagccatggtaatgatttnnnnnnnnnnaatatggatttaaaacaatgattgtgatgatttggatgcattcatgttggtttatgtgcttatttgatgaatgtatgcgaattataaacttttgatgaaaaatatttttactttcgtcttgaaagtattttttttggaaagtagacaaaaaattaatgaatttaggcttttacagaacttaatttgaatttttattgaattagttatggttttttgaattttgaatgaaaatatctcaacctaatgcactacatgtgcgtgcgcggagcctgggaacacctcggtcatgatcgaggttaagacaacctcttgaccgaggtttctcaaacagctaattgtccgaaggaagctcatgccaagctagctcggcccaacaggctgtaatgcagcctcttccgccattttcagccttatgcgcgtgcgggtagtatgcattgcatactcccctgtgccaaatttcattttgtgatattttgagtttcaaaaattatttttcaatgaaacaaaattcaaatttt

SEQ ID NO: 124897 - DNA, 815 bp, Cannabis sativa
ttaagacctcattcaggttcaaatgttcttttataaacttgtgaagaaataaacttattttaaaccctatttaagatttgaattgtagaatgtttcaataatatattgttgttttgttaacgaagttgcacttaagttccatctcccactacaaataaaattaaaatgaaacccagtatattataagaagatctgaaaccccaattagtacactaacgcgcacgcacatatatggatatataccttgtaagcagcatcgacgtccgagaaggcaaagcatacctcgacaggttgtctctcaccgtgagacctggttgcggtttggaccgatcctgtcacctcatctgtttcatcctgatgtagcggagtaaaggctatggtgctctgcccgctctctagctctccccataagattaaaaattctgccaataaagtatcataatatattttatgacaaaatcctgtattattaagagttgagatgaaagacaaaatatataacaaaaaggtccttactttccatgtgtattttccaagcagataagtcttgtagttgggtagacaagctctcctttggggtctctaacgaaggcctcgatagatatcacctggtataaaaccagcaacagagaaaaacagagagaaacaagaagaggaaaacaatggagcttattattgatgaattgaatcaatacaattgattacaaaatgaatagaagatcatcaatatatagctgacaagaatagacttccccgattcccgctgtaattactcggaaattgatgttctgttaagcgctgtctttgttcagctc

SEQ ID NO: 124898 - DNA, 788 bp, Cannabis sativa
  modified_base (26)..(46): a, c, t, g, unknown or other
  modified_base (746)..(747): a, c, t, g, unknown or other
aagttcttatttaggatgttaataannnnnnnnnnnnnnnnnnnnnagatcctggtaaaataattttcaacatatagaacactagaagtctcacatatatattactctttgttataatgacactagggtaactaaaagtattgtcacaaaacaacatggagtataaaaacaaagacaaattaagtactacgatcccttacatacaaataaataagaaaacattggaccacattcttaaaacgtatctgtgaaacttgtttgtgctcaagggtgaaggaccacaccactctaactcttacggatccataaaccgtactcaagtagtagtagtaatagtattttgtgtggtttctttttgtccaagccacacttccaaacaaggcacaacatcaatcagatatattttatattttattgtattctatttctttgtcacctatcatagcttaatcagtggctgtaaacaccactctggtggatatcataaaccacgtgaccatgcattttctatatactataatcataatatataaacacatatgtatatatgtacatatatatgtatacacatgtgcagccatgcaagatttgatttggtaagcaaagtcggctaccttagtagttagttcacattacatctgaatatacatatgatttctcattaaaaatttgaagagagacataaagtaagagtgcataaatattaactaaggtgccgtttggtaatacttttgttttttaatttnntaatcacaaaatgaaagtaaaattcttgtttagatcggaag

SEQ ID NO: 124899 - DNA, 1630 bp, Cannabis sativa
  modified_base (49)..(55): a, c, t, g, unknown or other
ttctctttctctcttcatcttctacttctttcttctcatctactttatnnnnnnntatattattttataacagtttttgtatattctctgcctattttctattgaggagaattttttactttattttttttttcataatcctgtatgttgtattatataggatcacttgtaaatttttataaaattttgaattgtttacagtgctgaaaaatatgattcaaatttttttttcatgaaggggttgatttttcttgtacaactagtaagtaattgttttatccttattttcggtgctacaaacaattcatattttttttatgaatttataaatagtataaaataactacaatgtacacgatcatgaataaaaattagattaaaaaactcttctgatggaggtttaccaaaagaactttttagataggtgtaaagtagacttacctaataatattatataggagtattcataaaatatttaattcaatccaacccattccctaaagtacaatttgattggattgaaaaataaaaaatttacacttatttttatttattttaaaaattataaaatataactaaaaaaacaaatacatggtacatatattttccaaaatcctaatatgtcaaatgtatatatttatatacaaaagataacaaaatttaaaaccatgacaaatcttttatttttatataaattcttttttctcttttcttttattaactttttgcttatttattttaattttttgttagagacttattttattttggtgtttgagaatttaaaaggaatattatatgttttatatttatgtgattttggtgatgtgaaaaaaaatatattttataattaatattaaataatttaatgttaaaaaaattatcaatccaaaataatttatcaaatctgcactattagatttagtttgatttgattagagctattttgcagatacgatttgattctaaatataaaatctgcatttattgtagatcagatgcactttaaacaaaatagtacgtactcgatctcatgaataccttacatattatattatttctaataacacttcatgaatgtaatttaatgacatagttttcttttttttgtattaaatgacgttagaaaactaattattaactcattggattaacggtttagttgtaaaatgatacgactaaagtttttagtaattctccgaaattgttgaacagttggaatgatacataaataatagatatttttacaaaaacaaatataaaaataaattttattacaaatatagatatggacagtattttttttttttgaacgaacatgaaaaatttattcaacttgaaaagtaatcctcccttgcaaaataaaaagtaaatcagatggagcagaagcctcatcaaacatacgatctgacatgagacgagactgtctagcaatgcaatgagcagccctatttgcagatcgtttaacaaaagaaagaaaaaccttatgtaattcagaaagtaacaaacgacaatcatgaataagtcacccaaattgagatggcatttgaaccgagccattaatagcatgaacaacaactaatgagtcagtttcaatttccacttcagttaacgccttcgtcttgatcca

SEQ ID NO: 124900 - DNA, 689 bp, Cannabis sativa
ttttggatacaaatctatccaaatttgtgttccaatttggtatctgatgtattacatgacatttacagtttagtactattaagttgtataacactttataaatagtttcttccatatatttgttttctatttgaattacttttaattataataattgtacgttattagattttatatatttatattttctaattagtagctaatttattaatggatgaatgattacttttgtatatataatttatataaataaccatatgcatgacagttaaggaggaacttacagtgcagataaaaactctcgtgaatgtccacgtaagttatatagtactatatataatattacatgacactctaatactagtaaaacatggaagctaattaagctaaactaaggtacgtacatggtaaataaacgtgtctagaaagaattaaggttattttgagtggtaaatattgtgatatgtgtaacagacttgctaaataacgtgattaaagtcaaggatttgctatgtaagatcaccattgaagttttttcctcctgcccttttaacctaatgtttaactgtgaaggttactactagcttcgcttagtttcataacaattttctgttgcagtagtagcttcaattctgttgtatggcttttaatacgctaaaaatttgaaaaaaaattacaaaaatatatta

SEQ ID NO: 124901 - DNA, 1963 bp, Cannabis sativa
aaaaataataaaaaaaaaaatcattttaaattaaaattataaaataaataaatattttttttcttttttttctttgtctctttccttcccaaaattaagagcttccacctatttctctctctcctaaaaacacaacagaacaaaaaaatttaaaactcctctctttgcctcactctcgttcattgccctttgtgtgttgccttctttaatgctcgagtgttcggtgaagaaagtcgaagagcactggcttcaacgggatgggtttggggtgccggcggcaatatctcaatcatcagtcatagtcgtgttggacggacaaaggaggtcctctcggcctagaaagctattcatgctacgaaccaaagagaaagagagagagcgtggaggagagaaaatgtaagagttgcataaaaaaaagaaaaaaaaaaagaaaattatttggcatttgattggcttcatttttatttggtgctaaaaaattcttttctaggaattttagatttggcaatggggagtttgtatgttttgtatttttatttcaaatctcaagtagtgttcttttttttttttaattattattattactgatttaaaatataggtcatgtggtggttcaaagagtctgataaatgaaaaggagagacaaagagaggaagattcaggggaagagagaggaagaaaaaaaattatgttttaaaatttttatttatatttttattttattcattgcagtgctagttgcaaattttttttttttaaaaaaaaaactattttgaagtgtaaaaatgaaaaaacccatataatttttaattttaaaaaatatggcagtaggataatttttgggtgatttgttattgccatataagtaaaataaggatttaatgatgaagagagcaccttaaaaataaatttgaagttgaatggtttcttacaaagtaaattaaaagttgaagaagttttaataataatcacacagattcttctaaataataataataaaaaaaaaacatcattcgaccataaatttagttaactgttaaataaataaaacttaatagcctcggtaggaaggtggtatatgcttgagtgtaaaactaaaaacaaaaatatgcttgtgagtgaatcacgtcaacttagaatttaaagtgataaatgtatctatacgtatttaaaatcacaaagcatcatacgacatacatactcaaatttaagcaaacagagatctgagattgagaaactcataagaaagaactatagctctaatctaattaaataaggcctcatagagaagattagtttttcaacataataataatttcagacatatgcttgtcaaaatttaatatatttaatcattggccactaaataaaattagggactcagaatatgggtggtgatatgtcagaatggtcggcaaggactgtatgtataataacacagcccattacgacgaacgagaccttaatatcaaaatcgtcaccgtccccaaactcaaagaagagatgtcgaaaatacagatggaaataaattaaagaagaagagatgcggccttatagctgctttggtttcttttcttttttcaggtctatatataagcaaacctaaacaaaccctaacttgatttcacctttattacccaagtttaaaaaatatttataaaataaatatatatagaacaactatggtaatttactatcagtgattgctagcttgtacgtattaaaatattatacaatataataatatttgatgttatatttattttaaaaataaaataatattaataaattaaaaaatttattaatttttaatttaaatcattattattttttaaaaatattaatttaaattatttctattctatataaagtttgtatatataacagaattcttgatttatgagaaattcatgaatgattttttatttatattaaaaataaaatggtttattattaaaaataa

SEQ ID NO: 124902 - DNA, 1254 bp, Cannabis sativa
gagcaaaaaagaaggagagtatctatgggaattaatggggaattgccacaggagaatatgacaatggaacatgatatgtttgatgtatgtggcaatgagcacgtgatgggtgatgttaatatctcatccatgcaaaaaaacttaagtggggcgggctctggtttagaggcccgccaagagttatgaatattttcagctggaattgccgtgggcttgggaacccatggacggtccaattcctaaaagagattgtttctcaaaagaggcccgagtttattttcctttgtgagactaagtgtgctaagagcagggtggattgggtggcaagatatgtgggctttgagggagtgttttgtgttgaggcccagggaagaggtggtggtttagctttcctttggaaaaatcaagatgatggttacatacatggtttttcgaaaaatcatgttgactttgttgttactactgggacacgagatcattggcgaattactggaatttatggggaaccgagaaggcatttgcgttggcaaacgtggaacttgttacgtgaacttaataaccaaatgaaccatccttggtgcattattggtgatttgaacaatattgtttgtcaagaggataaaagtggtggtaatagatatccaagagctcttattgaaggatttgtgcaagctttgaatgattgtgatttaaatgatatggaaattattggtcatccttttacttgggagaagaatagaggagatgctagttgggtggaggtgcggttggatagagcgttgctaaactcgagatggttacaaaaattcccgaatgccaaattgtataatctacaacactcaacctcggatcatagtccaatttttttggaacccgaaactgtagttcatttgggagggaataaaagtttcaagtttgagaatgcatggctcaaagagccaatgtgttatgagattgttcggagctgctgggaaggaaatattggtgaagatttatggtctaaacagaagctttgtgtgagtaagttggaagaatgggggaaaacaattactggcaacttcaagcagcgtatcaatgcatgtaaaagagagctcgatttgttaaaaaacagaagggacatggcttcggttcaaagatataaggaggttaagaagcaactcttaaaagttattgatcaaaaagaggctttttggaagcaaagagctaaacaattttggcttaaagagggggatcaaaacaccaagttttttcatg

SEQ ID NO: 124903 - DNA, 787 bp, Cannabis sativa
tttccttaatacacaataactcaaaaaaagctgactctagcaagattagaaaaagaaaaaaaaaaagaatattattgtctttagaatgataatcatcatttaacaatttttttacaagttcacaaagttgataattatcatatacataagtagtatatatattaatattctattcattgacatctgtagaatactcatccatagaaattgttgatgagaaagatgtctcattattattgttctcttgcttttgaggatatagatgaagattgggaggtacttgcaggcattcaaggtttccttcaagcatgtctatgacttcactcattgtaggacgatcacaaggttttagttgtatacaccacaacgcaactatgaccatcttttttattgtcttcaaatcttcatttgttgcattttcgtctatttgtatgtcatttccttcgttgaattgcttgtgtatccatataggaaaaaaaatgcggcttgagttttcagtaagtgcatttacattttttcgttgatttgccatttccattaataacattccaaagctatacacatcggctttagtggatactcttccaatatttttatagaacaattctggagctatatatcccaaggttccccttgcagcagttaaagagactaaattattttccaatgaacatgatcttgctagcccaaaatctgaaacttttggaataaaattttcatccaaaagaatgttgtggggtttaatatcaaaatgaagaatatgcatctcacaaccttgatgaagata

SEQ ID NO: 124904 - DNA, 702 bp, Cannabis sativa
tttttttttttttttttaccaattggagataaagtgtcatcccgtcaccagcaagctcttagtgccagagggaacacaaaactcaaccactcctccatcttagcctgtccccaagcttcaaaagaataggtagagggccaaaagcgccaaaaacggccgatcaaagacgactaacactgttagaggcccatcggtgcctcttccagatctcagtcgcaatagaccacaaaagccttaaaaagctcgaccttccctcgacgacgactccgaaaaaaacattcctgtcgtcagcctccccatgctcgtcatgcaaggaaccaagatcaagagaactaccaacaaacagtctttctcgactagagaacaccaaatacacaaccaggctggcaagtgggtctctagccgagaaaagggaataaaagagatgaaaccctagcttagagagagaaaagagaagaaaacccttatatagagagttcctactaagcactttttataacttttataagaaaattagttaaaggagttgaacataatgattatgattcttttcaataaataaataaataaataaataaaataaaataacatgaattttgctgtaaaaaataaaggctaattagtaattttttcctcgaactttgacatatacaaaattatgctcccagaattttttttttgccgttaaaaattcctcctgaa

SEQ ID NO: 124905 - DNA, 1236 bp, Cannabis sativa
tgtaacggtaaattaatccctatacaatgtttttctttgaatagaatgatcttgtaaaaaattactatgaacaggatgcaaatgacataaatgtatgtgatttgtgatcttcttaagtttagttacaacaaaattcttagaaaaatgatgtggcccatagacaagttaagatggacaattaaacattctcattttgcaatattaccaattttttttttttggtaaaatatttccaatattcttataacattaatcaaagacaacgagaagaaagaacataccactgtatttatttagtattacgacaatatatgttggtcgtaatttttatacatggcaattatatagtaaaataaattcatcacaaatatgatattaaagatatgagaaactaagccccaaactgtttctgaagatgttgaatcacatccttatccaacatgaatgccttagcaagaacttcaggcataatgggagggttggacccaaacaagctattagcaatggtaataattccaccattctggcttcccaagctagcaaaggctacagctggggtctttccgatattgaattggaagtgaatcattcctttggggaacacaaagacatctcccttgtgaagaaccttcgtgaagaatcggttcccatctatgtttgacgaaatgaaccccacatacagtattccctccgccacgtacaagatctccgaggctcggggatgtgtgtgaggtgggttagttccgttcggtgcgtagtcgatacgcgctatcgatactccaagggtgttgagccccggtaggttttcgacggacacgtttgtcacatttgatccgaatgcgttgtctgtgtttgtcgggatgttgattcctgagatgaaaaagtcatctgctttcaccagctctggcttcttgcagaatttcccattcacgaatactacattaaatgattcaaataatagagaaaaatgttaatctaacttgcatatatactatttaatcaatttcaatatgatagtaatatatagtaataaaaaaagtacatgatgataaactcaatatggttggaaagatgttttcgtaagaaataatcaatattgataactaaataccgctaaaccatctaaaatttctaaagtgaagttctaatttgggtcagttagttattaataacaataacttctatattgtgattacttaagaataattacatcttaaaaaaatatatacatatatt

SEQ ID NO: 124906 - DNA, 663 bp, Cannabis sativa
agaatataatttacttggtcccaagtgtattcttggatagatgttctactgtatatatattttttattagtccaaggaagagtctcttcggttccaattatttttttcatttacattactacatctttttaataatgtattcataactatttttaacaactgtatttttatatatttttttttatattatgaggattaaatttaagtattctgtcatggtatttattaagactaggttttcttgtttatttttgcaggaagttttttagttttataagcagaatgtatggtaattgtggtggctgtagattagattgtctcgtcaggatttgaaatttgttgaatctgattgtttagcaattgtatttacttttaataatagtcatgtttacttaaatgacgtgggttctttgttagagaatattacaagtttgttttctagatttttaagaggatccctaattcatgtacaacgaataatcaatacagctgcacatagattagcagtgtatgctcttcaaatgaatgaacaacttgtttgactagaggatttttttttttttttgtgacgtttgtatagtcttttagcctgtacgatattactttattttttaatgatattattgtttgcaaaaaaaaaaaaaaaaaaaaaaaaaaaaaaaa

SEQ ID NO: 124907 - DNA, 1106 bp, Cannabis sativa
  modified_base (159)..(159): a, c, t, g, unknown or other
aaacactaatatattgcattcgattcacttttaattgataatattataaaatataatatttagatacacataataatagtctcactttcaaataacataaaaaaaaaaactagcataaatttagtatacgtgccttagttttttgctagtatatatatntatatatatatatggaatattaatgtatgcatttgtctctgaattttatttaaaaataaaataaaataaacagacgaaaacatgcatgctcaagtttatataatagataaataaataaataaataaattagtgtgtaaagaaatttatttcgacacacaatatttatacacaacgatatctaattagttgcaaccatacaatttgagtgaatattactacccatatatcctttgttgatatataatttttattataataatatgacaagaatcacacaaatttagaaattgttaatgcatgtattgattagaacaaattcattacttatgccattgcatgcatgtgtacttgatttatgtgtgtttcctaacacataattattaattaattaaaattataaataacgagcattaattgagccaaccgtccacgaccaattcttgagaaatatatcttgccatagaagtttagagaaaattaacttactcaaaaaattcacaatataaaatttgtttcttacttttctttgttggtttcattactaattaaattcctcaccattatttttctctgctactcaataaatggcactgatttaatagtgtgtttttctttttcttcgctttctgtggtcagtaaatggcactgagctctagcaaaaagaaataaatgggcactgattgcgctgcatccaaatattgagtaaagaatgagattgattttacgatttttggctttggcagtgaagtaattatattaataagtggtaaaagagaaaataaaaaagatagtatttattttggtgtaaaatttagttaagttatattttagagttattagaatttttgctccttgaaatttgacatgtaccaaatcatgctctttgaacttttaaagtcgttaaaaatgcctctgaactattgagattgtttgatttaaggacttt

SEQ ID NO: 124908 - DNA, 540 bp, Cannabis sativa
aaaatgtttaaaattccgtgaaacggtatttttgttatttttttttattgtttttgtgcatttgtgaaattaacccttttcaaaattaatataattacatatttatatatggtgaagagcaataaaattagataagtgatgtaacttaaaattatttctcttttaaccaaatttggcggtttttaaaaaatgagatatatgaggtcatgtgtgaaatagaaatatattaaatatattttcacacatttcgattctttattaagagccattacgtagtaaaagaaacctcaccacagaacaagtcatgaagatatacaagggttggtcgcaaaggtgtatacgtacataaaagattgaaaaagaaacaaaacaaaacaaaacccaacaaaaaaataaataaataaataaagcaaaggatataaccccttttttcttatcagtcatccctactcctcttttgttttatttttacgtacccttttaatttgtgaacatataataactgaaaaaccgtgtttttgcaaatgtcagttgtatata

SEQ ID NO: 124909 - DNA, 667 bp, Cannabis sativa
aaatttaatgtaagcccaaataaaagtctaacaggtggtccacgtcttgatgtggagcaatgaggcctacttctcgtaggttcttagtggtaacaagtctctatacttgcagctctttgggcgagaaggatttgtagaaagttatcctctcttccagctccaaggtcaaaggaaattgaggaatgtagtctaacatatgtgaaaaaatgtatcaaaatacatcaagcaggaggaaaaataaaatcctaaagtctaaagaagagaatgacacttacttgcagtattgaaatccaaactaagggtaggaaccctcttcaatgggaagccataggtgtaaaagtaataatccatgaagttgttcgtgtactttgtggagctggtaggacaaggaatactcctagtgtagtgttccagcctatagatcccgccttctccttattacttctcatggcctaaaacttgatcttgtaaaaatataagatctcctctggcgtcgacacggacttgtcgtgttgaacacaaaaaacgtaccactctaacagatagtggtacgcttggggaaattgaaaaggtgctactccagccacggtgcaaaagttagtaaagtagcacctcaaaggtaagtgtgcacccatcttgatgtggggtgtaacgtccccgcttcaag

SEQ ID NO: 124910 - DNA, 1875 bp, Cannabis sativa
  modified_base (1835)..(1843): a, c, t, g, unknown or other
atgccatatatatcaaaacttatctttattttcccatatttttgtaaatagccctttttatttgagaaggttgggctgggcgctgggcttcagataggttaggagtagtctttattttattttgggatatgtacaaaattactgaattttaggcgaaaatttatactattacacgaattttttttaccaaaatacaatatttttataaaataatcataaaacaataaaacagaataatttaaattaacagtgaaacaactaaaaaataatcgtaaaacaacaataaaaacttaacacagtacacataacacggtattattgaaaaaaaaaaatttgccccatagtcaaaaaagaaaaaagttcagtatgtggtgtaaaaatcctgattatttttttagaatacacttgttattaaaatttccacaacacgtatatttaaattacaacaaaattgcgcaataatttgatgtttttaatgccttttatggattttatactttttatggcttttgtgccttttaccgctattgtgccatttattatggcttgccattaattgtttagggtagtttgtggtatgttcattgggcaagtgaagtgattcattttgtgctcaagacttctacttcaactattttttagttttgacagataagtatttcaagtctttacatttgattatggattgttttatattatattatagattgttttgtcatcgttcttttacattatttattttttatttaattttgttgtaatataatttcatttattattatttaatttgttgcttgattttgtggtgggcctacaattattaagactttgtcgataaatttaaatttaatataatcaaaatcacacgtgttttgttaagtgttcttagtttgttgcttttagccaaaaggttatacttttggttggttctctataggttttagtcgagatttcgttctctttttgtagttgagtttgagttttttagttaggtgtttaaatctgaatttagtctattaaatttaattcaatgattttgcttttttaatacctattgtttctttgaattgtttgttttttcaggtagtatttttgtattacaggtcgaaattttggctctctggtaacatctatctacaaaagaagggtgattctaatgagctggaggtgttgtttgagaatgttataattttattgtctaaatttctagagacagttttatcccatgtggcttacgataagaatttttcagcacatggtttggcaaagtatgccctttgtggttagacaatgaactattctggttcgaggtattgccgccaattgtgaattgctgcaatattaatcatgtgcgattttgattgcaacgttaaaaaaattacaacaaaattcaaactaatataggacatgaaataactaaaaaataatatttaaaattttaaactccaccaaatatttaaaattttaaactccaccaaatcttaatggtatacataagcttgataatattcacttgaagaagacttaaatcaatatattttgaaacttcaaaatttactttacaaatgtgaattattgtataactttaccaaattaataattggcgtgtaattcaaaatcgcaaactagatcccgccgcttagtttaacaaaaatgcaaactataatagtaccgcaaaatatttcaaaccacgaacataatttttatgcaatgttagtacggatggtttatgtaatatgagtagtttgatggacaccgttatgagagaggccaaagtgatcagcccctatagagctacaccgatcagcctgaaattttttacttttagtcacaannnnnnnnntgactaaaaataaaaaagttgtgattaattat

SEQ ID NO: 124911 - DNA, 1536 bp, Cannabis sativa
  modified_base (35)..(40): a, c, t, g, unknown or other
ttccgtgaaaccgtatttttgttatttttttgttnnnnnngtgcatttgtgaaattatccctaatttaaaccatatgatcgaaacttacatgtaggcccataggttttgattttatcattttatgagattttatctgtcttttcattctaacagtataaatgataattttatatatttaataattataattaattattaaataaattgtcatttgatttatttattagtttgacttttaaaaatctcttagaacaaaccctaaaatctctttttcttaaaattgtccttgcttagtaaaactcataaataagtcatagtcttattcagaattctaatcgattaataaaatcaattaattgagtctacaagacaatattatctcaagtagcatgggtaccatgagtctatataattaagctcacaacaagtagttttagaatttaccctataaactctttatcttattaatttctcctgactcccctataaattcgaaattgcactcttgattacatagaacgatttataccaagtatagatacgctatgaatattgattgtttcaatctaaataattagtgatcctctatagataatttacatcgagtagggagaaatttaccgttttagccaagctttaagaagaatttcgtttcacttctatgtgattatagaagctatagattctatatctatgattagcactctcactcaatttcactaccgtgttcccaagatgtaagtgttaggccaatctaattggttagctttaacgaacaagtcaaagaacgcatgtaatacatttaagtcagtatctatccatctcaagattgagatcatcgatctaagatcaattaagtgatatttacttataaaagatattacggtaagtttatgatatcttttccactatgaatatcggtctagtccgatgtataaccaatccaatacaagcttattttgctaataccttgaaaaagacattttcacttatgcaagtgtaagtaaaccacattgttgattatcatatcagtgtaaatctagtacactgataaatcatgagactaattaatttaattacataattttgattattttttactgagtagacaacacaataatcatgaataataatttgataggaatttaataaaaatttatatatcaaatatatgatcgtaataaacatgtgaaccaagcattacactaaacaattaataaaataacttctgttcttttatttataatgaaattcaagattacattgaaatagagttttagttaggacactaaacctaacaccaatgacggtatatatgccaccatctatggtgtttagcacctcccatagcatttttcttatcatctccaatgaatggtgtataatttgagctaaaaaataagttaatattatatttgacccaaattttataatattgttccaatgcacttagggtaaaattaattattttttgatagaaatgtataaaaaaagctagcaaaagtattaaatttttattaaaatatataaaaatt

SEQ ID NO: 124912 - DNA, 818 bp, Cannabis sativa
  modified_base (757)..(765): a, c, t, g, unknown or other
acgtatagtataattagtacgtgtgcatgtgtacattgaactatatataatattttagtttagtatagttaactatagtttatatgtattaatttaattacaaacaatagaacatatgtatatatatatatatatatatttagaattgaatattgggaaatgatcaaaaaaagaatgatgaaactttttgttcagtttggatgatgatatgttgttggtacatagacacaaaaaaaaggttaataattaataattccaaggaaagagaataaggaacatgaacccttttcctattttatttattttagatagaaaggaacatatatgaacttgaaaactaacatgaaaaatattatcatgaatgatcacactatatacatatataaatatatatatatatatatattcattgaatggttattatggtttggcattaatgtttgggtggcgtgctcttactatacaaggactgtaaacatcatccttcataatttctgatctagtacaactacactagtcattttttttaaatcactacccataagtataatatatttaaaaaaaaaaaatgattattttattaaaaattcataaaaatgattttatcattatgatcttctaaattacttaaattattttttttgaatcttttcatgacaactttcatgagaatgaaatagttttttttttccttttattttcgatcaaaataatggaaacaatttttaaaattttaagtgtcgtttggtaacacttnnnnnnnnnaattttttaatcacaaataaaagtaaaatttttgttttagaaaaacaaaaatg

SEQ ID NO: 124913 - DNA, 870 bp, Cannabis sativa
ggaatttttccagacaaattattctttgataaatttagtgcacccaattgagagagatgagtcacttccataggaatctctccattcaatttgttacttgataggtcaataactcttagtaatcccaaaatcttcatatactcatgttgtacccctttccatgtgactgatgcattattttcataagaaaggggatcacgattattacaattacgatttaaatcacaacgcgttttatcatctatattcatgtgtgaagagatggtcgtctttgaagaatttatttgaaccattgcagtgaaatttttaatacaagaaggaatgggtcctaataaatcattagaagagaaatctaatatttgtatttgagtaagctgacaaagactcaatgggatacttccataaaacttatttgacttcaaactgagaaaaactaagttgtttagttcttctccaatccatgagggtattgaactttctaaactgttgctccccaaatctagaacttcaagtgaagtgcaatatttcaacgaggaaggaaactttcctgagaagttattgtgcctcaattgtaaagttttaatacttctcatattaatagagttagggatatttccagataatttattgtatcctaaattaagtacaaccaattgtgtgaaattttcccaacaattaggaatatttccaaataaattgttattagagagatcaagtatttgtgagaacctgaccggctcttttgcttcacatagggaggaactaaattcggtgaacttgttattggagagatacaagcgagatgggttaacaagaagagaaggtgggatagaaccttggaattggttggaacttaagtcaactattaca

SEQ ID NO: 124914 - DNA, 848 bp, Cannabis sativa
tcagtccatgaagcagccagagcgacgtactcgtgtataagtgccattcattctgtgggtgtaaggacccaatggagacttgaagcggggacgttacagatacaccttgcataatcagagtctacataactattgataacatccaagtcttcactatggttattcatgccaaataccagtcccttctcaatagttttcaaataacatagaatttatttcagggcatcccaaagctcctttttgagatttcccatgaatctactaaccatgctcaatgcatatgctatgtctggtctagtgcagaccatgacatacatcaataagctaatagcactagcatatggaactcttgacatctccgacttctcagtctcatcttttggcatctgagtagcactcagtttaaagtattgtgcaagcgaagtactcactgccatagagttactcatttcaaagctatcaagaatctttttgatgtaactcgtctgattcacgtacaatagtcttttttgtctttttatatccatgcataacatcttactagttggacctaaatccttcatttcaaactctgtctttagttggagcttcaagctagtgcttggtctcttgtacactcttgctggcgatcagaatatcatctacgtacagcaacagatacaaagtatctccatttctttcttggaaatacatacaaggatcaaacttacttctctttagacatatcttggtcacataatcatcgaatctctttgtaacgccctaagatttaggcatgctacccaatatgattaagaaaccctaattccctaaacgggattggttttaaaataagcgcggaaattaaa

SEQ ID NO: 124915 - DNA, 2271 bp, Cannabis sativa
aacaaaaaaaaaaaaaatcactttcaaaatttttttattaatcaatattttgaactctgacctcaacttagactttagaaaccgaacctggacctggcctcggtcccgacctcgaatctggtctcagacccgacttaaataaaatcaacaaatgaaaataaaatttacaaataacacttttattttttgttttcaaaattgaaaaataaaagtagttgtagaacacatttttgtttttcaaaaacaaaaattttatttttattttgtgattaaaaattttaaaaataaaagtattaccaaacaccaccttaacaaaaagttttatctgtcatcaaatacctacttcacaaaatatcctaatacaataaattagaaaaccaaaaaagaatctaaaacttctccaacagcaaagatatacaaaaaataaatgttccagcattaacaaatagagcactctaaagcaaagtagtcaaattcatttactaaaaaatctcaataaaagtagcacttagcaaaggaaaaataaaatcaactaaaatatgaaatttttgttaatagataatgattctaaagagggtgatatccacatcaaggtttctttccagtctaactcgttcttcatcagtttataatgaatattaagtgtgagatgcttccaattaaccaagggataacgaattaagttcttcaaatttttgggcaagttttctggcgagatgaactcctacaaaattatgaaaacatataaattatagtcttaacaatatgaatgaaaacaaatacacaatacaagtaaccaacataccttatctgtaccaacatacaattccacaaaattccaagagtaactgagattcacaagaatattcatcagatcaataaacccttccatgtcatagtttctcttccaattccaaaacttgtcaatcacaatttttccatttaaaatcaaactaggtgactttattgatatgttaaaattgggagttccttcataacaaatgtatgttaattttggagcagattcaattgtgacactcttcaagtgacaatcattaattcttctttcttcaaaatgaaaaaacttcaagtgttggctcgagattctaaggtgctctgtctttaatgtattgcacattctcagaatcaaattctcaattggaggaattttatcaaatattatcaactacttagtacataatttttttaaaattaaaaaatatcaaaaattaaattttaattttcattgattataacaatcgggcgagacacgggtggattttaaaaatcgcgcgatcacataactaatttcatacggtacttatcattttaattgttaagaaagacaaataaacatttcattataaaaataattatacatacaaatcatgacttttctttgaatcattacaatttaaggtatacatttcacatttacataatttattaaaattaatcctcttaatttaatatttcatatagaacattctatcacttacatttttatataaatctttcacttttcagtttcaaaaacagataatgttataatgccatcttttataattattatgccaaattcacctttagagagatgatattccaccaacaccataaaacaaaatttaaatttttcataatattagttaaattattattattttttttttgaaaaaaatgggtcgtcttttaaaaataactacatcatcaatcacaagcctattttattaaattcagaaatattattttttttttatttgttttattagaaacacacatgcaatttcttttttagttacacattttttaggatttttacaccacatactcaaattttccactttttttactgcgtttaaaaatactatgtattttttatacagtgtactatgaactatgttaagtttttactgttgttctactattatttttttacttattctactgctatttttaattgtttcgttttgtttttttttgtttttttttataaaaagatagtatttttatttaaaaaaattttgtggcagtaaaattgtaaatttttaccaaaaatttccttctcttttttcagatttcgttgtgaggcccgtgtaattttctccagaattttttgagcccattaagtagcccagcccaatattctgtttgtagcgataaaacctaataaaatcccaacacatttgttaagcaaaaattttacatttaaaatattaaaaataaatgctaaacacaatttcacatatgccaaatttatagcataagagttta

SEQ ID NO: 124916 - DNA, 724 bp, Cannabis sativa
tggagtattgttaattagtttgatccaaattaatatttaaaattcattataaataaaaaaatattaaatatggtgtagtttccaagaattaatttaagctatctgattaaatcaatggctataaattattatatctatcaataggtaaaaattgcaatacctattgtattaggtccctatatgtttataccaaaattgttaaaagataataatggtgtctagtattttttttaataactattgatataattaaatattagattcatataactttaaacaaaaataattttttaataaatatcgctaacttacacttatacaaactattaagcgctactagtaatctctttatatatatcataacctagtagttaaatcattagatagtccaatttttttttttttttttgaaagggaataattcaacttaaatgcctctataaaccctttttatactgaattaagtggtggcacgtgctctttaaacatattatattaattaatacatacagaattttattatattataaatattctaaaattttataattattttttttttgacgcgatttataattaattttagataaatctaaatttagaaatttcaaattattattacttatatgtagactagatagatgtcacgtgtcatgtcacgtatgttaattttattttagtttttagttttattttaatatcataattttaaaattaataatat

SEQ ID NO: 124917 - DNA, 1001 bp, Cannabis sativa
  modified_base (840)..(840): a, c, t, g, unknown or other
actcaaacgggcatcaagtgacagaccagctccctcatagtagttggtcggctacccctgggaaatgttctcccatcaacaagcaggctctacaaaattttctcccatctagaggaatctgccaaagggatcctctctccacatatcttttactcttatgctcagaaggcctctcctccctcattatctagaacactcatcagtctcaaccatgaaaacattcccttggtattaagatcgcctatactgccccaacaatttcacaccttttctttgctgatgatggcctcctatttagtttagcttcaccaatcacagtggccaccattaaggatgtcttgcatgattatattctggcttttggccaaatggtaaattatattaagtcatctctctatttctctcccaacaccagagaggacatcaagaaccatatcacttctctcctcgacattcatgtaagggactcaattgagaaatacctaggcttaccccaaacctttgggcaataaaagaaagaggcttttaattaccttaaggatagggtttggtcttatttgaacaaatggaattcaaaacacttctccaaagggggcaaagaagttctattaaaatcggtgatccaagccataccctcttatgccatgacttgcttcaagctcccagctttctttcaatctgttgttgaaggaattttacaacaccaaaataaataatagtaataataatgataataataatgtgatgaataagtgcaagtattcaacctagaatggcgagtactcgaactgggaacacaaatacttaacaaaaattggaaatacaaagaacacgagagantatagtggttcagttagatcacggtctgcttagtcaactattgcaaggactcagtatctgtctcatttcacggtggatcactcctttatatacaaagcaagtgtcctatcatttacacaaggattgcattcatttttgatccgttcatacattgatttaca

SEQ ID NO: 124918 - DNA, 1643 bp, Cannabis sativa
ggacgtatgagagtccttgggcgatgaggaagactgttcggacagtatcgaatggggcatgattagaagcgttggcacgtcaacttagtgttggcatctttccacacctgctactgtggtcacgagtgactaagtgagcaacgacattgggatttgccttatcatagtgggaacctatggaaattgtgagtatcttggctagagagcctcgatgcatggatgcactcatggatgcttgcgagcgtgactcgacgggagttatttgagagacagaagtgtgcatgagccacacggtcatgtgaaaaatgcgcccattgttactcgaacggttggaaggctggccttggcttagagaattcaaggtaccgcacgggtgttttacggcctaaaaaggtgagcctgtgacatagtgcaaacgcagttggatcagctcaagagcttgcccgacccaaagctctccgatctggaacttgacatggctcgagggttgcctttctttatgcacattaatgcattgctactaccaaccaagttcaaaatgccaacttaaaaaaagatcatttggctcatattaagtattttaagatccagatggatctgcaaggagtgatagacgatgtccactgcaggagtggtatttcaagctgtcccctgagagatttgattcctgggatgcttttataccactgatttttacacacacttttcatcctccagacaaataccttcccaattagaggacttggttgaaataaaacaaaggttgggagaacctttgaaagattatatgtaaaggttcatgactagagccacaatggtcaaaggtctgacagaagaagggcagtatacaaccattctaggggatatcctacctctgaatgacctttggagagacatcaaaaaaagatcaaccaacaatatgagagatttgttagactgagttgacggtttcataaaacttgaaaccaactgtccccaacaatacacctaccacagttggggttagtaatattgctcagtcccaagctaacaataataatggagggaaacataacaataatggttttggccaagaaaatggcaagaagtggaagttcaatcatccctctgcacaataacaccttcaggaaaagtagaagaagttcttcaccgtcctgacatacactccagagactatatcctgatggccacacaggccattatcccgtgcaaaaaggcccctccactgaagaaagacattagcaagtgggatcccaccaagttctactgattccataaaattttcggtcacgacactaatgagtttaataacttgaaagaagagatcgagttcctgataagaaggaataatctccacttacattggtatgtccaagctgaccaaaaccaggcaaaagtccaacaaaataataacaagttgcccccactggtttctagccatttacaagtcatcatcagtagaccccacatttatggggactcaaataaagcattgaaccgtatgctctgactctccgtcacgaacaaagaaatgaagtcctgattatagaggaaagaaatctgaagcagccaaaggtagaagagtctgccatcaccttcactgaagaagatgctacccatgtaagtgttggatattattttac

SEQ ID NO: 124919 - DNA, 1604 bp, Cannabis sativa
tgcggtttacgaaaaattcaaaccacaatcgcaccgctaagaatttcaaactacatttttttttgcggtgtgggcggtttgagcggtttgatgaacacccctagcctcggggccttgattggttaagaggaatcagtcaattagactgatgtcctcatagtagtgttgtacttgtggaatagttcctccaaataaatagattttcgaaacatattcatcttccttgaaagttaattgtcacccggaagaatgttttcagaaggttactttgtccatccaaaaggaatctctaataaagttagccttcctctgaaaaggagttcaggatggctagctgctccctcctagaagggaggtccagatagtcgactctagttatcacttttcctattcgaaaagccctttcagtgtgcttcagtccatgattccgaaagtactttgacttatggtgatgtggagatctcgctaacaggagtttgtgaagtcttaacttaacttaacaacttattaacacttacagccaccaactttaggatctgatgaggacacaaagactaaagatccaagtcaagttccagttgatccggtgacgagaacacgagccaagagattcaaaaaggaacttgacaacctagtccatagagttctaaaataggaggagaccgcggtcaacactgaaggagaacaaagatttggactgctcgctcatcagagttgacttaattcacactactacaaaaatgggtttcagtgacacttctttgcatgtcactaatgtgggtgttaggaaaagtaatatatagtgactcttcgtatgtgtcacttaatccttttagactctctcaaagcgcgtccttgtagacttttagaatctcaaattgtgagactctaaacacaatagcgacactctcaacgtgtcactgtatctatttttattttttaaaaattaatttccctaataagaccacactaacagagtgtcactatatcatatttttctttaaaaaaaaattggataatatatcaaatttattttagttctattttcatttttaataaaaaaattaaatttaaaacaacaaacaaaataatgtgtatattaacaattaaaacattaggaaaaaaaattgttgtgtatttgttttcttatatttaattgtacctaaaaaaacagtacatcaaaattgatataaggtatgaaaaaacttgatacaaattttaataatttgaatcaaatatacagattaatcatacacccacagacccagaaatttacaaacatttaaccaaaaacaacaaaaaaaatacacccatgagtgtaacaaacccaaaaatctaacaaacaagaatacagtgggtttattcataaagtttaaaacataaattaactcagaaaattacaaactaaaacttaacagaaaaattaaaaggaaatcaaattcttcatgaacgcgctgatatctaacgagcttcaaacgccaccaagcacaaagcttgacaccatgaactcgagatgtaatacgagcatcaaactccatcttcgtccaccacgaactcagacaataaacaatgagatccctgtaaagaagagagagagagagaga

SEQ ID NO: 124920 - DNA, 912 bp, Cannabis sativa
aaaaaaaatcgaacgacaaagtgaagagatttcttccatccaaaaaaacttattgtttattctaaagacatgttaaaccaatctatgggtcgcaacattaacgttgcgacttacatcagaaataaatgccccgaaaagctagacaataaaactttaatataaaaaaaaatctttgaaagtatttctatcccaccaacaaatctacaaaagaaaaaaaatatatatcaatatcaaaacaagaagaataataaaagtataaaagtatctaatatgatgtgataattataacttttctgttgagtttctacttttaagagcgtaaacattatatctaattctttttaagtcaaaaaataaaacctttaaaggttactttcaatgggcatatggagaagtatcttccatccaagaaaggtcattggcgatcccaaggacatgtctagctagtccatgagccatatcattaacgttacgactgacataggagatagaaagtccaagaaatctagacagtaaaactattatatcaaaaaagataacccctagctcattttggtactcgaaggataactccagtactaaaactagtgacaacgaatctgagaagacctctgtaataggtagtccaacatcttaagcccattttaatcctaccaatagagctaaagcttctgcctagaagactattagtaaacttgtatcacaaaaatatctattaaaaagcagtcatcattcttagctaagtatcataacctttagcaatgaatcactaactaaagggaactatccctttgtttaagcattacttttctacaatttaagtaaaagtaaatctcaattaagcaaatataataaaccctatgttgcgatagagacaaagtgaaagagagattgaaagagagagagagagag

SEQ ID NO: 124921 - DNA, 2028 bp, Cannabis sativa
tttttttttttgtagtaattctctgtccttcatattcattcattcaattctactttccatccttcctaccaaacatagcctaaagggatataataatgagaagttatttaagattttttcctcttgaattatgactatgacatatgcattatattgtgctccttgaatttttcagctcgttacatagtccttgaactattcgcagtattgtaaattggtcattttgtcaaattttgtcacacgtagaaaaaaaaaataatgacatgactacttacctaattgtcacattaacgccacatgtatattttaacttaaaaaaaattatatatttttagaaaatcattaaactaaaaattaattaatgattatttaaaaaaataatgatcaagaaaatttcacaaaactaaaccaaaaaaagtttaaattatttttctcaaattaattacaagcgtggtattgacatgatattgacgcggcaactgactaagtagtcatgtcatcatttttatttgttatatgtgataaacttaacagagtgactaatttacaacactttgaatagttcaagaataatttttaaggggctaaaaagttaaggcaacacaataatgcataagttatagttcgggattataaattctaagagcatctccaatgataaaattttagaggatgcttggtgaggtggacatagtatatggtaaaatattaagatactatactattaaagagaaaatgatgtcattttaaaaaatttgcatagatgttatgttgtagcattgatgctattcatttttttaataaaaaaattaaagctaaaaagttattgtagctaaaaattaggatatatattaaataataatatgtgagatcataattatagcatttgtcaaggatactatacattggagtgtaaatagccaacaatttctacattatcttaaaatattatattttattttttctttcatccatatcatttttgaccactttactcttaaaattacttcaatgctaaacaattttaaaaattacgagaatggacccacactttattatttaatatattattaaattactttcaatattttaaatattatggtattgttaggtaacaattatataatcaattttttgattaattaatcaaaaactgtgaacaaattacaaaattttgttaagtgaaatttaaaaaaataaaaaacataaaggttaccgaacaagccttatattaatacaccttttttatagaaaaataactcacttactttgtttgaaaatagcaattataacagctcgcacaatctttttagtggttaagcaattttgattgttgttcttagaatgacaaaaggccgatgagcaacgtgaatatataaagcattgaagctgctcttaaagaatactatcattggagaggctttaaataattttagatgaaaaggattaaaattagtattattttaagccaattatgtattattttattttatttttttgctaaaaatctaggacatgacataaaatgcaatatgtgtagagttaacggagttaaaagacgtagctagtaggtgaccaacattaatggcatctttttgaattttcaaatttgaatttattttaaaaaaaaaagtccaaaaaaagaaaggtgtgttgttatgggtccacaattccacatgtagtaacaaggaaaataaaactaaataaaatataggaaatttgcagcaaaaattttccaaaagttgactttgatgtagattagtcccaacttcgaaaaatagcggcaatagttctcaaggtcatgtttttttcaagtccgtcgatacccagtttgacagccccgttaagtactggcaagaatgacacgtgttaaagtattattggtctaaattttaattttaattaaaaataatttaaaataaaacaaactaaaaaaatataattttttctatgaaaaataattttttttttatagaaaataattatttttatataaaaaattataactttttttcctttttttttttc

SEQ ID NO: 124922 - DNA, 1929 bp, Cannabis sativa
  modified_base (35)..(39): a, c, t, g, unknown or other
  modified_base (1846)..(1863): a, c, t, g, unknown or other
cgctcttccgatcttgtgtgtgtgtgtgtgtgtgnnnnngtgtgtgtgtgtgtgtgtgttgtcgcatgtgtgtgccagaggagggctcgcattcgagtcgtggtgtgtgtgtgagtgtgtgttgtgtgcgagagggggttcacatgcgagccgtggtgtgtgtgtgtgagtgtgtgcatgtgtgtgttgtgtgcgagagggggctcgcatgcgagccattgtgtgtgtgtgtgtattgtgtttgtggggggctcacatgcgagacaagcattcatgcatgcgagtgtgtgttatgttgcattgggtgaatagtgtagtgtatgtattttgtggatctaaggtgaaattcaaatatgcattgaagagaatatcgttggaggaggaattaaaggacgaggcgtgcaagagaaaagtgtaccaccacgtctcctgcaagctctgagagtaaggaggtacacctagttgagtgaatgcacctgtaaggtctgaggacccgaccaagggttcactgcatccatcacctatgtgatcgggaaccacctgacactagacaaaggtatgaggtgcaagaccaccttttgcacctgcagtttgcagcctgaaaatgacaacttgtcaatttgggaccactatgtaactcaggccattagagccaataaatgtcccattctcaactgcgagagagggttataaaatcaatggtgtaacttagacattaaatgcaatagaaagaaatctcttatccataaaaagctgtatttcctttcatcttcatgatcatcttatttttgagttttgcttagattttctggccacgaagttagttgacgagttctcattgtcaaaattttggcaccgtctgtgggaacgacaaactcaagtcaagttgtttttttgcacacaatcactacaaaatgaccagatgctctcgtcgtcatcagtacatggagattcaccttgatggaaaccagttgatcgcgtcggagcgagacccatcaacacccaccattagaaaagggaatgtgaacattagaaggcctcaaatagaaggagaaggcacgaacgagccagggtcttaggcaaggcaaggaggcaatcgccatgtggggatcccagtggacgagtaatgtagtggagcgatttcctccatcacgaccaaaagggacggtggggcacaagggaaaaaagttccatcgcccgtaaggcattctccatcaccaacgccaaaagaccctagagtctcgcaccataaatcgagggaatgtcgaaaagaaaatcagaggctagatggaggacaccaacaaaaagtacccggctaagtccccgaagtgttaagagacattaaaactgtcataggaggaccttgcataggaggggacactcgaaatgggagagaaaaatatgctcaagaggccaggcaggaaactcaagtctggagcatagaataaagtccactaaagaatttcaagggagaaataactcagtcacctttacgaaggaagatgcaagaggagtgcacttctcgcacaatgacccactggtgcttatagttcagagggctaacaccatggtgcaccgaatgttgattgataataggagtttagtggatatcctctacttcatagccctaaagaagacgggactagggcttaaggatttgaaattctatgcctcactgatatatgggttcacaggggacaatagagttagccctcacagtttgggaatgacctcaacatttcacggtgatggaaacctttttggtggcggattgtcgctcaaccagttgaaagcgttcacttcagtatatcatctggctatgaaattgttgggaattattttaccnnnnnnnnnnnnnnnnnnacaagtatgtttattaacatcctgaatatgaactttctaaaccgataaagtaaacacatataaagt

SEQ ID NO: 124923 - DNA, 569 bp, Cannabis sativa
tttggatctagtgatcatatgatgtttatttgtattattgagagtaggtacaatgggatgtattggattaggtactgttgtagggatagtggtgtctggtgtgacaggttgttgatcatgagatgtgggaggaatgagagggtttgtgatgttgcagctgttatttgggaaagcagctgaatgtgttggttgggaaaggacattggtggtagggtcgggtacaacttcagcagcaaatggccttggatcaatgacagtattcctcacagcctcagatagaggagaatgaatatggtcagtagcagacataggtgtattaaaagatgcagaaggaaaaatgtttaaaagaggaggatgtacctgatcttgagcacctggagaaagagcaggataatcttcctcattaaaagaaacattttgtgctatatacatgcggcctgctgaattttcacacatatatcccttgtgatgcatagaatagccaacaaatatacatttctcagatcttaaggagagtttgtgagagttgtatggccgtaaatgtgggtagcaagcgcatccaaagggct

SEQ ID NO: 124924 - DNA, 2812 bp, Cannabis sativa
  modified_base (2227)..(2232): a, c, t, g, unknown or other
  modified_base (2563)..(2564): a, c, t, g, unknown or other
attttttgtataaattaagtggagggtatatattttgaaatggggtattttattagggtcaattaatgaaatttcccttttattattgaattacatatatatccttttagatgatacttatagtaacaaacgaattacttgtaaataattgaaattaataaccaagtaaactttaaaaataaatttgtaattttaatattttaaaaaaattgtacttaataaattattattaatttattattggattgtaataaaatttaatatgttagattgtttatttaatataatatatcttgtgtcaaatacttaaatatattacatactttaattaaagaataacttcactattttttttaggtaatgtttttagtaagaagagagaaaattctactaaaatagaaagatgatactaaaaatattacattaacaaatgaaagtggagctatatgagacaaaagcaatgctaggtgtagactaagtagggtggtcacctcatatgaaaatattaagactagtcttaaactatttggagtttaggtctaaataaatttttttaaggctttatacaaatatatttgtggtcaaataaacttaagtaagattgtttgatgtagtagtgaaaatccttttaaaagttaaagaggtcacaagtttaacattccacaccttaacttttttatttttatatttactacattttttttaagaataactaaaatattattgttgaaatttgaattacctagaaaccgtgtcagatgaaaatataaaatgttattctataaaagtcactttaacataattaaatacattttattatatctaattctataatcttgttgaaattttgaagtatggataagatataaaaatatgtagtcgtctcacttcaattttatttctaacttcgcccctgatatgacataggggagttctatttgtgctccacaaagtaaaaagtatactctaatattttaaaaaaaataagtttaatataattttttataaaatcacttttaatatttttttaaatttttttcatattattttgtgttaatttcagtacttattttaattttatttttcgtatttttttaaatcgtgtataatttttttctaataaatttcacatatatatattttaaattttttttataatatttataatatagtttatttttgtttaatagatatattttttaaaaaaatgatttggaagaaaaattaaaaaaaaaaactaatataatgaaaaatatatatttaatgtaaaatataattattgaaatgagatttatttataagtttttggggtgtaaataaaacttccctataagataaaaataacatagaaaatttaaatacacaaaattataaatttttaacttatgcaaggaaaaaaaataacaaacttagaaactaaatttaaaagaaaattatgtttattggataaaatataaatacatgttataatttcaaataataaaaaaattattgacttatttatgcttttaagtttttgaaagattttttaaaaagaggttttttcagttttacacttcaaaatatttttcttttatatttttactaaatttcacacagaaatacttatagcaattaacggagcaatctaatttgcaatcaaaatccgtataacaacccatatagtaaccaccgaataaactaccgaagcaacccaaaccgtaaatttgaaaaaaaaataagttaataaatagtatatgaagtaatttatttttaaaaaaattactataatattaagagtaaatttaatgtaataccttgtgtaatcaatatactaaccaccacgtacgaaatacgtaaaattcaattagtacatgataatgccacttgtcttccaataaacttagagaaatttggatatatatatatatatgggtgcatttttaatgggtattatcatgaatgggtaaattttagtttttaagcttaatctcttatttttacattatatgagttagggttgttctatcgactggaaaaaaataaaaaaaaagtttttcgacagaaaaaaaaaaagttgagtttgacttaaatattttgtatctaaatatatttttgatgtagtgtaaaaagagatattttttaacattttttttaattaagtagctaaattaagcatagatattaaaatttctcttttattatttgttattggatcaaaatttaataatttaatatttttaaaatnnnnnnttatagttaaatttatttagtaaccatcaaacggtaatacacattgagaagtgttccatatatgtatatataaaaaaattaactttaaaattttactctttttttcttagattggatggatccaatccaatccaatacatactggacctaaaatattagatggatctgatccgatctaaaaaatactaggtctaaattattgaacaaccccaaattaaaccaataaatatataaaaaatacatctaagggatagaaccaatccaatccaacattcaatagatgttgaaatcgattagatgattgaaactaattggatcagatcggatggtnnaatctaacatccaatatataattggatcggatctggatatgtctaaaaacattggatgtggtctaataaatactcctagtatagactacacttaaatcttctcacttatggtaaagtacaagacaataaggttgatgctgtctttcgctgttcaaatggagttcgaggttgaacaacttgatgttaagactgttagacatttatatgtataaactgaaatatatgtatgtatatataaaatgcggaat

SEQ ID NO: 124925 - DNA, 743 bp, Cannabis sativa
attctgtaactacagaaaactgttttcagtaccagttttattattccgcatttaattaatcatttaattaaataatcaaactgggaatattaaaatacggaatttcagaataaaaggataatctacaattgtacataggctaaaaattttagagcaaaaagaacaactaagaggttgtttggcttcataatttaaaaattgttttttattttttaaaactgaaaacagtttttaaaaataataggattcgcaaaaattttaaaaatatcaaaatgtttttttaaaaatatcaaaaatttttaaaaaacagaaaatatcaaaatgtttttttttaattttcaaaaacaatttttttgtctaacatattatattttacatttttgttcagatactcagatcctagacttggaaccaaacccgaacttgaactcggatgggttcatgtcatagtatagtaaaaaaaaattaaaaatagttttaaaaaatttgtgctaaacaccattaaatttttaaaataataaaaaactgttttttattctcacttttaaaaacacaattctaaaaactaaaaatgcagccacacaggctgtaagcctcccttaaaaaaaagggttaatttcacaaaagcacaaaaacaacaaaaataaattttaaatatttttacgattttttttttaattttatttacataaaatacggtctttttttgttaaaattttattcatttattgttaattttttgt

SEQ ID NO: 124926 - DNA, 848 bp, Cannabis sativa
ttaacaaaacagaaggtccaattggtaacttttgcaaaacacacggtccaacatggtatttacccttaataaatatataaggtaacgacaagttttttaaggcggatacgaaatgtacagaaaattaaaacatgcgttaagttaggctttgtatggaaggattttttatttattttctcttaaaaaatcaaataaaattaaaaatatttacataatcgaagcttaactcacaatgaaaaatccaagagaaacaataagcatattctcaaataataatagactaattaatagttcatatatggtgtttgaattgaggggttaatttattagagctgagaaatattgtcattggaaaaggaccacttactttgaagtgtaaaaacatatttatatggacagattctcatgtacagcagtacaaatattgtctggaaaatttgattctttcattgcataaataatacacaaaatcaattaaatatatatatatatatatatatatttatatatatgcccagttgaagttgtggtccaagtactccaaccatcatcataactcaataatgtactactatgttaattaattccataaccatacatattcactacacattacacaattgaactacttactactaaataataatattatttagtactttgaattaatagctttatacgcatataaagataggtatgtaataaaataaaattatttattttaatttgaagttaattaataacctcaataatattggggtggcccgagattctcagggtcgattcattgaaggcttcacagttttacgagtggggtgtgtggattcggctatggctgaattggtagg

SEQ ID NO: 124927 - DNA, 2047 bp, Cannabis sativa
ttatttattttatattttaaattgaattcacacaccatattttttgtaaagtttagaaataaaaaacctttatatcaaatttacgaatccaacctatataaagacacgctcaaatttcgttatctgagttttggttaagaataagtaaattacaatatatgtattattagatatgttacctaattaaaaaaattaaacatacatgtattgcacttaacatcatcttattgaagctaattaaaaaaaaaaattaattatacgtgcaatgcacataacatcttattgatgtcgaaaagtggctaacatcagcttgctagattggtgagatgattaataagttaagtaaataatttagaaagacattaaatttgtagtagtttactccccatgtcgcgatggtaatggagctatgtctatttcgagattttatttctcatgagaattacagaaaaaagacaaggtgtttaagttctagtttctagagagagaaaatttagaaagagaagctctgaccttgtgagtaattttttgaatgtgaaaaatgagttaagtgaactctccttttataggcgcaggaagttcacaaaaatagggcaaaaatacaaataagatgtttttgaccgttgatgatgatctaacggagaaaattagctcttggtagtgaggccttttttggagctcgacaagtttcgctgcaggtaactcggagcttattttcgtaattcccttaggagtgaattttgacaacgatagcttcagaattacatctatagtgtgagacatgacttgatagagcattgaattagctttggaatgcaagtttaatcgcgttaagtagatcaaaattgagtgaattatggctgttttactgaaggcagtttatgacccaacgaccaggttgacatcacagggaccaggttgacatataacgtcagcctggacgttgggtaagtgtaaaaacgtccaaaggatatactttaagatgcctaagtgatattttgataccacttagcatgtttctgcgttctagggaagttggtcaccaattctcgaagattttgctatctacggaaatgagagactcgaaactcttcattttcaagtgagttggaaatgaaaaacgcaaagttgtgaatttaacttctctaacttcatatatctttgtcattgtgaaaaacttgatagacggtcaaaacgacatcagatttagataagcagaatataacgcaccagaccatttgtcaacctgggcgctaggtacttactcccgagctctcgggatttcattttttatacttccaaggattctaaacttgaggatgaggtctcctaccctgtttgacctttgggattcaatggtcgcattagatttgacatttgagcaattgaaggcagcgacccaggtcaattgtcaatctagtcataaggcccaacatcaggttaacctgggcgttgggccctgtttccagcgcctcaggattgtggttttcttttcgagtttgtttgaatcttcattattttgatgacagaaaaatgcccagaagtttttttgctgaacttagcctaggttgacaatatgtcaacctgggcacttggtcccccttttggcccttcgaaaattttgtttggtccctggaaatagttgaatcttaatattttctgaaaacgaagaagatgcttggaattgttctcgaaaagctacaattaaaatggcctaggttgacgaaatgtcaacttggtcacaaggctagccccaggtgttaacttgggcgctggtccctgtttttgtcacttagaaattgttgtttcttctccgaaaggatttgtctcctcatttttgatgaagacgaagtagatacaaaattcgaatctccaatcaaatacttagaaggcgcccaaattgatagattgtcaacttgggcgatctgtcaatctgggtgctgggtgctcggggcttgttgtgaaaattgtatacgcaagtgtacgcaatcgtaataagtaataaagtgataaatcgagtatcgtctccacagggattgaaaattgg

SEQ ID NO: 124928 - DNA, 1382 bp, Cannabis sativa
  modified_base (361)..(361): a, c, t, g, unknown or other
  modified_base (609)..(610): a, c, t, g, unknown or other
atagtaaaaagtccccacaaaatagttataattttaatgtaaagtaaataataaatatttttataacaattaagcccctacagatcaaaaattctgaatctgtcactgggcataagcactttttaatatatatacatgatatatgtatatgaggtttttcagatgaaagcatattgtatatggcttacataaaatacttcatatatctattttatataaagtgtgcctatataacaaaattcttggtttataaaaaattaatgagtgactttttatttattatattaaaaataaaagaatttattattaaaaataaaataatttataagaaattcatgagtcactttttatttatatatantaaaataaatcccattaaataaaaaaagaaaaatacaattggatttttgctgttgtacatttaccattggattttctgtaattatttattgtattcattttcctattacaatttagacattcccattctaatttatatgagagctagctgaaaattaaaagacttccactctcattaactcaaaacccatttatatctcatttcttttctctttttttctatcccaatatatatatatatatacatanntatatatatatatatatagaatcagatatgccaagaatgcattctcatcaatgattattattacattgaatatttttaattttaaaattataatattaaaaaaaaataaaaattaaaataaaattaacatacgtgacttgacatgtaacatctatctagtatatatatatatatatttatattattttgggttttggaatttttggatatggtacacgggtacattaatcatcatattatagttatttcattttttttttcaaaatgcaagttttgttatgactttattgggcagatttatattaacgttatttaataatttttggcttacaatgtatttatgtgtatatatagagtttatgataaaaatacaggttcaaaataaataatattgcaatgctcaaataatatattttaattacataaaacacaaatttaaaatagtaaaaatatgttaatagcaacataagtacttaaaattttaagtttgtaagcggcataaactcaatgtttaattttagcggtataagtactaaatgtttgtgtaaaattgtaatttgaaaataattgatactacatatttttatttagacccaagatttagaatttgagtcttatatgtacgtaccaattaagacaataatatagagtttttacaaacattgagtgtatgggtccgtttggcacaacttttggaaaagctaaaagttacttttcaaaaaaactgtgacaaaaaggtgtttggtaagcagttaaaaaacagcttattgaa

SEQ ID NO: 124929 - DNA, 650 bp, Cannabis sativa
tgaagacataagctccattggagtggtcttcaaattagataacccaaaatcaacaaaaagagatttcaatgttaaggcacgctttctcttgtcaacaagaggagtacaaggaagagcgtcatcctcttcttctttagaaacattggcatttgttttttcaacttcctcatcaggaagggaatgtggaacctgcaaaaaagaaaaataacaagtaaacaactcacatgttaaaaactagaataaagctctattgcaactataaatcaactactctaaaacgcaatctcaaaaaatttaaaatataaaaaagcaacataccttgatttttgcgattgcctccaaaccaacgaaaacaacttgatctttatcaatctcaagtacgcttaggcccttgaaaaaaattatctccctttaaatcaacttctttgcccttgacattatcaatatccttggacttattgcctttactacctgcaacaacattagaagcatccttatcatcaaactcatcctcattatcagcaccatcagcacgatcttcacccaactcatcaccaccattagactcattttcaatattctctgattctagtaatcctttctcatcatcatcatcaacatcattagaattagggtcatcaatattatca

SEQ ID NO: 124930 - DNA, 1159 bp, Cannabis sativa
ttccccttacggatcacgagactactgactgtcacactttactacaatttttcaaaactaaaatggaaatggcaaaactatttgataataagaagaataagaaggaaaggatgaagacaatattttatttgaatgataaaatcgaagacgaattagttcatcatattactgaaattcttcatttcaaggtgagttatatactagtctaaaatttatccctacaaacaaaaacaactttcttgaagtgttttattcaaagggaaaggatttcgaaagtaatattttcaaggacaaattgaaaagactcaatgataagatgaaggaacattgggattttcataatgatcaatattcagtccaagaaagtaatgatgatgattataaggaagattttattttgagttgaatttttttttggaaagtgttcggtgttggaattcaagaaatatggagtgagcatggttcgaaattatggtacttattgagattgagactcaataaaagttagtttatagtagtggacccacatttaatatttcttaaaattctaagcctattaattaattagaagttaactttttatttaaaaaaatatttgattcaacatacctgtctaatcttttttatttagttagaattaaacaataataaaataactttataaaattatttaaacttaaatattcaaaatatctagctaactaaaagatataagagatattttagttcaaaaagacaaataaaaagatattttaatattcaaataaaattaatttaaaattattataaaatccaaataattatttaaattagaatattgaaatatctcaaccaaagatattttaattttcaaaataattaaaatatgaataaagaaaatctaagaatagtttcaaacttagatattaaaaaatatcttttacctaacatgcaagattaacaacacaataattaatatctcattaaatatcaacatcaaatattaaagaatatatgttttgaaatttagtggacttaatctttctaattaattaaaactaaaaatgaatctatatatataaataaaggaaagcataagagcattgatgtggcatcttttccttccatttctctattttctctattttgttatgttttctaatttttttctattgaataa

SEQ ID NO: 124931 - DNA, 680 bp, Cannabis sativa
tttttttttacaatagttttattgtgattaaaattaaaaattttgtagtagggctagtttttgttatgaatctcttatatgtaatttataaattaaaaattaataattatcattaagctaactttatataggaaattaattaatggctttttaatgaatatatactaattctttgatattctgtattgttagttataagcttggattaatggaatgtatatattattacaatatgcacacgtatatatgtactatactatatattataattaaataaatcgtgaattttatggaaagaaattaaagaagaattaattgcaatggttaattttgtcaatatactaggctgaagaaatggacaaaagtaattaatgcaatgattgaacaagtttaatcctattattaaatacgactaaattccaagaatttgggatgatttggcaccgtaaaagtttttattatgttaaaacacgtaagtcgttcttatttataatttatattatatatatatgcatggcgccctatgagtcaatggggaaatataaacattacacataatttataattaatattgtattttattggtttggtccaaattaggagtattgtcacaacaaaaaaatcttacttttagtcctactaaaatttgtgattaaaattaaaaaaattgtgactaatta

SEQ ID NO: 124932 - DNA, 637 bp, Cannabis sativa
  modified_base (48)..(48): a, c, t, g, unknown or other
  modified_base (610)..(612): a, c, t, g, unknown or other
ctatttctttattgatatttaaaggataaagattacattgaaatgganttttatttagggcataaaaccccataggcatatccctgatctccttcctcaagtcctcaacaagcttctttgcggccagaagttgcttgttaatctcacttagttgagtaatcttctactcagcctccttcttagcttcctccacctcctttttcaagttggtggtggccgttgtatctttcaaggccttagatttggattaaaagtatgtatattcaatctttaggttgagctgcataatgaaataaaattgaagcctgtatggataaaagaataagtcaaaagaccaaaggaaaattacttacataggtggtctcctttaatacattgcccataaggagctccacagacatgtcttcccctccagctagttggtcattctcctcatgatgcacccagtcctggtaaaactaaagcatctccttacccttcttagtcttagggtttagcacggtaggaatcactgagggtttgggtagcccgggccattcagtacttcctttgttagaacccttggacgaggtaactgtcatatgggacttaggtggcgtttggttggagnnnatgaaatggaatggaatggaaagga

SEQ ID NO: 124933 - DNA, 670 bp, Cannabis sativa
ttttaataaatgtaaaaaaaaattatattaattaaaactgaaaaaaaattttaggaaacccttatggagtcggttattttataaaaaccgactccatagggtccctctggcgtcggttatttaataataaattaaataactgacgccataggggtgctatggcgtcaattattacataataatcgacgccatagggtccctatggcgacggttatttcatacccctttagcgttatccggatcaatgtcggtagcgaatttcgccaaaatcgacgttgaaagaccttaaaaaccgcctctaaaacccaattttatagtagtgtaaaaataaaaacaattaaatatttcataagtttgatgacattgttaattaattaataactattacttaattggaattctacccaaaacataaaaaggcaacacccacttaattcccctagttttatccaattaatctgaaccatccaaatcgtccgactatatatatttgcttgacttttttaccaatagactttattaatattggactctccatttccatcaaaaaaaaaaaaaaaaaaaaaaaaattggactctacatgatccattagtccttccccactagccattgtgaaaacctcttatggtcaatgtttatcatttgtgtctttgtttttttttttttttt

SEQ ID NO: 124934 - DNA, 1086 bp, Cannabis sativa
tatcaaataatttttaaacttatttctatgttattaaatttttttcaaaaaaaaaatgtgtttattaaaaaatagtaaatcaatatagaaaactctaaataatttttttaaaaaaaaatatcatacaatttcttatataaataaaaaagcacataacttttttaaatgtacattatagtgaagaaaattaaaaactaaacaattcttacacaaaatagagatctaaaacagaaagaagacaataaatttatagaaaactctttatataattttaaaataactatcattactgtatctcatttatagcctcattgtatttaaagttgatttaatcaccgtatctcacttgaaattatcatgaatatccttcctaataggtttgttatatacataaaataaattaaacaataattggtaagtatttacttttattatgtgaagagagagaaggttataaaaaaataagcaactttaggtttgttctttttataaattatattagttaatattagttatatctttctctaaaaaaaatgtgtatgtagattattttttttattaatatatatttatttattagttatatatatacaaatgtatagtttttttttaattaattaatgatatctaattaaataaaatataaaaaaattaaaaatatgagagaattaaggagaaaatagatatttaattttttttaatatatttttaattattaattaattatcataaatttaaaaattataaatatatagtaggtctttgatttgttaattattatgtatgattagatagttttttattttttaattattaattataaatagatagtttgtttttgttcttaaattaattattactaagttattatatatgttttttaaaaaaaattggaagatatatacgtatatagatttgaaaaagaaaaaatattgtgttctaattcgatataatttcttttaattagatatttttgttttattattattattattttatttttattcgtagcttaattggaggtttttttctattaaaagtaaaaaaaaaaaaaaaaaaaaggggaaaaaaaaaaaaaaatagttt

SEQ ID NO: 124935 - DNA, 1915 bp, Cannabis sativa
ttttaattaattttattttctacttaacacaataattgtagctaaaaaagtacaaaacattcaagttatttaatcctacaataatcaatacaaccaatattgtaaatgtttggtccaacgctgcatatcttccagcgttttgaggttttgtctacagtgtacggtaaacacggcatatcttttttttttttttaattaatatttatatatttatattattgtatttataaaattaagaattatttcttgaaaaattttacaattcacatttttaaaagcgatgtacgaatttacttttatttatttcggcacccgacaaactttttttaatttattttttttatgtagtcatgtatattatagttaatataatatagcaattatttaaattattagtaaaatataacaattgttgtaatttttattaattaatattatattaaatttatattttattcaataattaatataataatggaaaatatttttttagtgtaatttttagtgttgtcgttggagtgaaaatattttttgacgttaaattttgtgtatccttagagatgcttcactaataaacaaataaaaataaatgcattaaactgatatataaaacaaaaatattttatacattttctctttctttaaattgaaatttataactacattttttcaaaattatttttttttaaaaaaaaatataaataaaaattacaaaaattaaagtacagtatatttataattagttattttactgtgaaaaaaaatgaaatataattttgttaaaaaaaaaaattctcaaaaaaattaaaacaatgggacaaaaaagactaagagcctgtttggctgtgttttcagttttcagttttttaaaattgtgttttttaaagtaagaatagaaaatagcttttcgtcattttaaaaatttaataatatttgacataaattttttaaaattatttttggattttttcttacaaaaaattaatattttaacaccatattatgacatgaatccatctgagttcgaattcaagtatgattccgagtttagaatccgagtatgcaagcaaaaatataaaataaatataatatgttagataaaaaaaattattttttaaaattaaaaacaacattttgagttttataaactgttttaaaaaaattttgctaatcgatccttataaatttttaaaaaccgtttttaactttttaaaactgaaaacagtttttaaattatgaagtcaaacaacctttaatctcgcctaattctagttctatattatattatattacttcgtctatatcaagtttggtatatagctttgacaatttcttttagattccgagagcttgacgatcgttaaatgtgtagtaaacaacaataggattattttgatgctccctaactctaaaataacctcatgagccttttaggaaaatgaaagaaaaaataacataatcgaaaatgaaaaaaaaaataaaaaattaataactgcacgctggtttatgaccatattctttagtatctttatctttgccagctaaagtggtccacgtgatgggtcccactctatatcaatatatgaacttccccaatatatagaatgactgtccatcattattattacattgatatatatatatatagacagtcattcgtaactactaatagaattagaatttcattctgtttgctttgctctacatgggttcgttcccacgaaactactaccttttcagtaattattatattatagcataacttattatcaataggaaaatttgattttatatgcttaaaaaattaaaaaaatttattattaaatcgaaaatctaaactttaaaaaaactatactttttttttcaaaactccaaaaataccccctcacaattcacccattctctctctgcatca

SEQ ID NO: 124936 - DNA, 1058 bp, Cannabis sativa
  modified_base (27)..(27): a, c, t, g, unknown or other
  modified_base (840)..(845): a, c, t, g, unknown or other
  modified_base (902)..(908): a, c, t, g, unknown or other
atacttgtaagtagatctaagatcctngtaaaataatttccaacaacaccacacccatacacactcacactgtaccagtcggaccacccgcggcggagctattgtgatgacctatgcgacatctagtgacattttgcgatccatataatgacatactgcgatgacctatgctctttaattacatattgcgatgaggttaccgacattatgctttttgtcgacatattgcaacactattggcgacatttgttgataactactcgagaacgtgcaagggatctattaagatagccttgccgacttagatcgacttatgtagcgacatgtagcgacacaacacataatttcatttaatacaaaattttatcgacattataagacgtgttggcgacaataaacttccattattcatttttaagtcggtgcaatcaatgtggaatgacataatagtgacattgaacgacatagtagcgatatatatagatatgaggacgtgaatactagcgacataatatcaataaaatatgattacttgttctagctgacataatattaaaatgtctgacatttcatgacaatcgtaacgagttgcacggatgatgtttgcgatataaagcgatacttgtagcgatgttcattacaaaaaaaaaaaattacaaaaaaaaaccatatcaacaactatgactaccaaatcaagttctggtagaagaggtccaaacctcaccgttctctgaatatcatcatgttatcatcattaattttttccaatgatcggttcatcatgaggagtttgatgtgttgggaatattttaccggtatctagatttactaacaagtatnnnnnnttaacatcctaaatatgaatatatctaaaacaagaaaattaaacacataagagtttnnnnnnncttacattgattgcagcgaaataatatgactcctcccgcacagatctctaacccttgttcctttctgtcgcagagtattatcaagatctaagcttggatctctttctctccttcgggttggttaccactgtcttactcactatgattgag

SEQ ID NO: 124937 - DNA, 1000 bp, Cannabis sativa
ttttttgtttttaatgtgtttgtgattaatttatgatttagtagtttttttgctttaatttttgttggcatattatttagtttctgttgatgttctttttcattaagtatatttttaataggtacgtgcttgatctatgtagtactgttgtattactttttatttttaaattaattttttctgcataaagtttactggttggttgctttttaatgatgttatggtgaatatttgctagtggatttatctatgattaggtgtttttgatttgattaaggacatatttctcagtagaaagtttagtcaattaaactagtctacctttgtctatatttttattgttttgtttatctttcttgagaaagtgattttgttctactgagtttaatgcatgaagaaatgaaagaaaaatataaactagagttcaatactataattactgttggcatcttattatatggttatgtgtatgtatgtgtttacatgcttttagaattaaaatttaagagaaaatgaagagaatagattaatgtctgagtcaactcggtcgacaaaacatatataacatgaaaatttactaatttatgaaattgacttaatattttgactaaataaactattaacaaaacaaacatcaacatcatgcttaagtaactctcatttattgttatgttgtagatatagcatttgtgagtgtaaaaatgatgataacaagaatttgatgtgatctaagctcatgagaatgttggttggaagtatggtctataaaggcagtagaattccccatcctctgattattaggatcccataaggctgttttttatatttttagatgtgtataaggttaagaattctctcgaactaacatagtaattttggtttacttgttagtttcattttaaatgttttatgtttgtttctaaattttcttacaggtttgggatttttacttgaaaccagaggatagattttgtggaaaaatcatatactggtttgatgt

SEQ ID NO: 124938 - DNA, 960 bp, Cannabis sativa
aaaaaagtgttaccaaacgccacctaaattagccaaaaaaaaaatcatatacatgactgactaccacaaatggaggcccaatttaaattttgtcatttatttaaattaactcttgattaaaaataaatttatctttttttaagttatttattaattcaatttaaaactattaaaacatattactttcaattttaataaccataaataattatcaaataaaatatagttataatatatttattaatctaacccataaagtgtcataaatattaacaaataaaatatattctctctttaatttattctcaatttaacttagaattagtgaaaattctcaatcttaacatagttagtttttgaattttaattgattaaataaataattaattaagtcatcaagatgatattatctcaaccactatagggactatgggcctacgaaattaagctttcaatatgttgatttaaaatttaccacgtaaattcttaaattattaatttctcatgactccactatagactcgaaattacactcttgatcgcatagaatgctctatatatctaatatacgttatgaattatctattgtttgattataagaatcaaagatcttctatgaatagtctacatcgagtggaacaagattaatattttaccccttaatatatttagcctttaaacacttacctctagggctgaacatattaaccaggtttgacccgaactcggccaactcgcccggacctgacccagtcaacccgaaaaattaaaaaaatttattttgttcgggcgggtcgggttcaacgcgatatactttcgcgcgagtttgctggttggttttttatggttaccgggttttaggttgaacctgaatccgtccgcaaacccagtcactttttttttttatttttttatttttattacatatataaatatattaaaaattttaaaaaaaaaaaa

SEQ ID NO: 124939 - DNA, 1421 bp, Cannabis sativa
  modified_base (103)..(104): a, c, t, g, unknown or other
  modified_base (1382)..(1383): a, c, t, g, unknown or other
gtatattttaaggggcaaaatcaggtagtgccgaaagttcagggggcaaaaatattaattattcaaataaataatatatcatataattaaaatatataaaaannataattaaatatatgtagcatgccaataaaattatatatacattaaaatatttgtattatgctaacaaaattatataccactatttttttgaaataattatataccaccattgtacatagcaaaataaaaaataaatatcatcaaagaataataatatatcatccaataaaatagaaatatattgtacaacaaaatttatataccaacaaatgacaacaataaaaaattaaaaaaaatcgacataactttcaaataaaaaagattttaacaaaactaataaaaatatactataatctttaagtaatttgattctaattctaaaaaaaaaatatatgaaaaaaaattattaattttttatacggcaaaagacaatataaataataaatagtctaaaatgatcatttctctacaagttttgaaataaaaatatttactaacatagtcttatgatttggaattatttaatataatttctttagaaaatgaataaaattaaatctaccatatttaaataaaaaaacttttaaaattcatgtaaattgtacaatcttatttctaaaataataattttcccatatttaaaaatagaaaaacttcaaaccaaacatgataatataaaaaagagatattaggatttttgcccctcgaattttcacatgtatcaaatcatgtcctctaaacttttaaggtcattaaaaatgccactaaactattgagattgttggatttaaggacttttgtccaattttagtaaaaaaaaaaggtctaacatggataaaaattcagggggcatgatttagtacatatcaaagttcgaggggcatgatttggtagatatcaaagtctggagaacatggtttagtacataaacaatcattaaaatagtaaaatttaataaaattagacaaaagtccttaaatctaaaaatctcaatagttcatggggaatttttaatgaccagaaaagttcaagtaacatgatttggtacatgttaaaattcagggagtaaaaatcttaatgtataaaaaattacaattgttataaaaaagattatgtcataccaaacaaccattaaaacggagaaaaatggacctaattccgaatccaatacatcatgagaaatttttaacaaacacaagagtttaggaagcatatttgagaatggtaatacttcggataaaaacctatttattcatataatgaaattatatgcgtaaatattattttggactttgtattttgcaaaagttaccaattggactttctattttgttaanngacaaaatgaaccctgtattttcttaaatgatacaaat

SEQ ID NO: 124940 - DNA, 561 bp, Cannabis sativa
catttctgattggaaagaatctcgcaaatctcatcaaccttattgagcgcaagagttagttgggtagtattctattgatgggattcaaaacccataagctccttgcttcttgatagaaggtcggagagattaccattctttatcaagttccagtcattggactggaaactcctaaaatggtgacaggctgaggttatgtgttgggagaaagctttagatcctgagatgctagcctcccaaggaaaagggaaaatgggatccattagaattacttcagggttctcctcagagaacgcaacttggtgaatcacgccaatcacctattttcccttacttttgacctcaaaagtgggaggaacacttgaagaggctataggaactgtattggtgtcgttgtcaggttctagttgtttttagtataaaatgcttaataattaatatttttgttttaaactttgaccatatcatattatgccaatttttttattatctttttttaaaataattttgtattaattcttgtggtgaatcctcaccctcaaaacaagttgttatagcagt

SEQ ID NO: 124941 - DNA, 1087 bp, Cannabis sativa
  modified_base (27)..(32): a, c, t, g, unknown or other
ccaagaatttcagttatataggcacannnnnnatagaatagatatatattttttttttaattttattttatttaagacattaatagcagcagaccctatttttcaccgctaataatgccttattagccgtaaaatttctccgccgctaataccataattactatagtttgttagtattttctattttaatatgagtataaaataatatatttatttttgattaacatagttattttttattgtaactttttaacaaaatatcttgggtgtaaaatatattaatttaaatataattcacttgaagatattttttaacacgaacagacgtagaacacgtaaccagttttatcataacaaatttacatcagattattattcagttttattttacaacaaaattagtccatgatcttatttgtagtatttaaaaaaatacatgatatattttatcatttaacttaacaaaatagagaatctatttattagtaacgtaacttttattttataaaatacagagtctaaaatgatattaacccttaaaaaacatttgatcattttatttaatattggaaaaacttgagcccaatctgtatagtggaatttggaagcaagagagtttttcccatttaatttatttttgttaattaataattgaaataaaataataatcgattaactaaaggaaattttttcatatactatttttttgacttttttttttaaaaaattatggtttgagttgctccgatagtttctatgtaggttgctataaatattttgattgcaatttaggttacatcggtagtttctatgtgggttgctataaatattttgattgcaatttaagttgttccgttagttgcgataagaattccgtaaaaatatataaaaaaaattattttgaaatataaaaataaaaaaaccacttaactaaaatcctatatgtagagaggtaaccttaagattgcattcagggtcgactctaggtataggtgggctaggcccgcgcctagaacctactcattttaggagcctaaataaaaaatactttttaaaaatatacatatatttttaataatttttaaaa

SEQ ID NO: 124942 - DNA, 1499 bp, Cannabis sativa
accaagtttttacgcggttttgcagttaactctgcatagtccacgagttaatcttattcagatttttctaatacaaactagggttcttttctccctaggatttttcgtcccttttttgtacattctgcccctatttataatgacatggggtggcagttaattacattcagatacgaatctcacaataatatttccctaaaattatgggccttcattacgctccacgtaaataaatgcagttattatttgaatatcttacagctgtgatttaaactgcttttaatgagtcaacgctgacgtggattaatacatgctacaaaatgtatctcgctggggcgcctcgctaggtgcttgaacactcaatagcaacaataaccctggcagcgagctggagcttttcccatatctttccgagattaataatgtaaatcctgtcgtttctgcatgtgaagacataacactccatctgacaatcgcagttcttggtgacaaggtgaacttcagtagtcaacatcatttgaatgtcagcttccttatgagagagctgatgtgacggagtagtggagcccattgaaagatgtctggagctgattagtgaaggtactaggagtatgccttcccatggcaagatggatgtctcgctattcgttatccatgtcctttaagctgtaacacttagttagtataatgtatattatacgctaagtgttctaacagcctactcgtcttgtcaacacctttttacacatagcgagattgatgccttgctatgtattatcgatgccatccttacaattatgttctctaacgcgaaatagtttcttgtcaatacgtgaatcaatagtttgtacatatttatctcgcttaagactataaagtcagcgagttatagatatgctctattaactccgcatttaatgagttattccatttaatattctttaatataattgtcattatatttgttgtttcgtattcttcaaggttgacatgtgtcatcttctcaagtaccagctaaattttgggtataacaataattataataaactatagattataacattatcattattataatagtatcttaacaactcacgggattttaaaatttataatttaccaaacactcagctgaattttttttcacaagtctgctacaattattttttctcacagcacaattacagttgcttttcattacagtaaaattgttccaaattgtccctcattagccaaaaatgtgctcgattgcataaaattcacttttttttttttttgtttctttaaagctcatcaacacaatctcgtcaccagatcagctttagtatcgttatcgtaatagtattagtagttataatatgttataaagcaatattctagatgcaacttagtcttaattaattaaactgtgtctatatattttataaggattatttcacaaaaacataaaaacaacaaaaaaaaaattagaaaaatacggtttcacgaaattttaaata

SEQ ID NO: 124943 - DNA, 833 bp, Cannabis sativa
ttgtttgcctgcaggcgcgtttaggctgacttgctagctcggtgtgccagcaagtgccgcacgttccacctacttgggggtgtccaaataggcggcccgtgacaccgcgcactagcagctccccgcgcctatggccccctgctccgcgcgtgcccaacctatcctcattttccctctctttcttgcacgcacaaggggagctcccgctccctcacactcccctctcaatatctccctctctcttcatccctcatttttacctccatctctccttttaccattattccctcactcaaacactctccccgatcactacctcatgctcctcatctaaacaagggagcacatagacccaacacttagttaaatttttaagtgttatactcgtatcatgagtgtaagctataaagaaagggaagtcaagggaatgtacaacaaaggataaagtcattaaagcatgcacgcctttgaggaagaagtggttctatgacaagtataagtagtggagacactatttgtctctctcggagtactaactgagacccgaccaccacctctccactacccatctggcacgctactcttcatggtacaaaaggaattttgtcctctaacttttgagatcacttgtattttggagtcattagagctccatataaataccattctcttccattgaagaaagggttggaaaatcattacttgtaagagaggtctaatattcaatacaatagttgtaaagtctttttttggcaagttagttgacaaaatattttttccatttatggtaagattgctatgcattcattttcgcaatcttacctcttttattc

SEQ ID NO: 124944 - DNA, 683 bp, Cannabis sativa
ggggggggggggggagaaattcccaagaatatttactttttagagaagcttgttttattagagaggacaaataacaatagttttcctagtaaagtgttgcacaagctaagtccatacacaatgggggtatctgggaggtcatgatcctttctggagatttaagcatttctaatttacatctcagtgtcttataaaattatgatgaccttccgggagtccattcttctctcggaactacgcatccttgagctcaaggacattattctctaagcctcattgaactgggctctaggtcagaaagctatactaaaagaaaatggaaataacataaataattaagattttttcaaaaatttacctatatttaatggctaaaacatatacattcttaaattactattcttttacaagatatatatatacatcaatttctttaattaaaattatttcataggaggatcttttttgctagcctcacataattgtataatcttttttctcaaaaattttggagaggatccttttatttgcatcccatttacgagacaagtttcatattttgatttatttatttgttttttgtttttattttttttttcacaaagtgatttattatttgagtatagtttaaacttttaaataatctaattcagtgatctgctaacaaggccgcccactatttg

SEQ ID NO: 124945 - DNA, 3384 bp, Cannabis sativa
  modified_base (187)..(193): a, c, t, g, unknown or other
tttcatgttacttttatatagtttgttgttggaggaatttagacaacaccaaataaaataatatgatttaaatatgaataagattatgcaattactctatctagaatggcgagtattcaaactatgaacacacagacgtactggaaatataaataacacaaagagaatatagtggttcagtcagatnnnnnnntgcttagtccactgttgcaagggttttttgtattgttcattttatgttggatcactcctttatatacaaagcaagtgtcctttgattacacggagattgatttaattctcaatccgtttgtacattgaatataaacatttaaatcaattaaaacgtaaatacaataaatgaagaacagtttcgacccaattcattaactacaacaacgtatgcgaccttcatggtacgagttgtttgttcatattctcgcataagttcgcaggcttaagatgcgtacaagactaatcgagtctaggatgtctgcgtcctgttcgagttgcatatacagacatcttgtaacaggtcgataacttaggacatgcgagtccttatcgggttatcgaggacgttggatcatctggaccaactcgctgagtagagaatcgatctgtactactttggaggaagacctttatagtccttgcatatatctctgtatgtgcgagtcttaaacccgatcttcgatcctactttgtgcgagctataagaatgtgactagactcgtcaaggtcacatcatcccgctgagtctggttcaggcgaggtttacactcaagaggtctccttctgacatctcagccctcctcgaggagagtgagtccacgtgtcatttttataggagcttggtctcgagtttctaggtggaaaattctcactataacacatgcccctagttttgcgattgacagctatgtcacgactcacgagggaaactataagcgagaggcaggcgaaaggttgtcacgagatggtgactattggttgtctaattgagggtttcgaaaagacggttgtaatcattattcttaatccacttggggtgccacgtcatcgaaactcttcggagtctgtgcaagcatggttatagataaccgttggattgtgagaccttaggcattcccttgccacgtgtctccatcccaataaatgagggatactattatttaaactccctgatacgaattgatcatttattcatttgcctctcattttcatttttctcctcttcttcctttgaatttcaaattctcaaaaaatttattttgcattttttctaacctttctttgtcacaagaaaagttggaagtccttgatatctacagaattgttcaaagaagatctgcattttcaaggttagtgaaaaaaaatttgcaactactcccttttcttttgagagttaatatgtgcttttagaggtagaaaatgcatgagatgataggatatatgtatggaaatttatttgccctttgagaaaatatgcgttattctggaaaatatatacctaaaactggaataatcacaggtttcaggaagaacaccttgagtgttctcatatttctcgttgagtattttgaatactcgcgagtttcttgatgaacatctcgaatactcgcgtgcatttctgactatccagaaatgacttaattgatttgttccctagttattttaaccctgttagaatttagggtttattttctagccttcaggttatatgtgcttttgttatgaaaactatctgagtcttttaaatggtgggtgtgtcacagtaacttaatgttcatgcaaaccttcgcatgttccttgggtcactgtgaaacgcccagccatttgagacatgcagtcagctttcatttttcttgctttgtagtggcatgttaggactaaccaggttcttcaaaatggtgagggtttcccattaactcaatgttcatgtgaggaatgcatgccccttaggatactgggatactcccaaccatttcttgaggtacacagttagttgtatatgtgcaacttatcttttgcggggattgaccgaatttttgaaatggtgggtgtgtctcattaccttaattctcatgtagcaacatggtcattatgttattgagatacacccaaccatttctggagatgtccgactagtcctttatattttctgaattttatgcgggtgagggcattttattattctcgcactttcaccacattgaaatgatcttctatcttttagatgagcgacttgtcggatagctagatgctcgactctacaggtgcggcttttgttgacgagttggagaggagcgacagcttcatacccacctcgatatctgaggaagagaccactgctaccagggctcgtcaaggttcgctatctaccaacaagatagataggatggttcaagaactcgctgaactagcaatggttaaaattcgcgatagagaatcaacggtgtctggccaagattatctcgttcattcgaggcatgcccctgacattgaggttgaaaaaatgggggaagacttcgaggtacgtacctgatccgattctaaggaaggggagatgctgatggaagtgaggcagattcaattgacaacactcaactgaataaacctttttcatgcgaggatctagtctcgcgagtcataaaatcagacttgcatacgtttgcatggctaaatttggttcgtatagggactttacgtccttcagcatctcagcggcctcaccttccatttactaaccctgtgatcatccctacgcaagacgtggtggtctcgattcccattttgcgatgcggggtaacactgccttttcatccgtttgtaaaagctatcctcagacattacgatgtctccccattccaactaactccaaacaattatcgcataatcctggggtttcatgcgatgtagatggaatatgtccaaggggagccaacaatggaggtctttagctatttctaccatataaagagtgttggccatgacaacggcttttattgttttagcaaatgggccaactttgagattaatggggtagaaggtataatttctaatatgggagattagaaatcaaaattattctacgcgtttaaagtaccaggagttagaactagggctgttcatataaaccggaaaaccgcggtttaaattcggaccacgacaatccgaaccactgtaaaccgtaatcggggaaaccgtttttggtggcttggtcaatccggaccgtttacgacgtaatggtttggttgcggttcgaaataaatagctaacggttaacccggaccggaccgtttataataaataattaatttatatatattttatatatgactatatgtatgattttgaaattttttgtgtgtcaagtttttt

SEQ ID NO: 124946 - DNA, 2157 bp, Cannabis sativa
  modified_base (499)..(501): a, c, t, g, unknown or other
ctgtaacttttgcaaaacacagggtccaaaatagtatttactcattgtaaaataataaaaatatataatattttaataatatattttaaagaatagtacagcaaaattattgtgtattctaagttactaactcttttttgctttcaacttaagcttcaccaaccctaaaccctaaatcacaatctaaggtgtaggttgaactttatatatatgttattaatattataggtataaatttatacccatatgtatagccgacctattatggaaaggagtgactccagtaggttacttcttcttgatggtccataaaattttcaactacatgagttttttaaactttcagcaaaagtttttagataatttcataaagatctcgtttggaacgccgtattagatcgcattatattgtattatattgaattgtattttatataatatttttatgtaaaactatatgtggtatagttttaaataaaaatatgatatataatctaannnaatataatacaatacaatacgacttaatacgacgttccaaacgagctcaaaaagtagaaaacaatacataaaaaattccatatcttagactgttattttttttgttgggatttcaaaaaacatggcttttatattaatagtttataaaaatatttgagtttaacttttcttttttctatagcttttttttatatataatttaatttttttatggattttttttatttttttagaaattaatgttctttatattatttttaccttttttttttctatctactttttatttctcttattattttaattttgtttctttcttttttattgttttctttggtttatttattttctttttctatttgtgtagctattattaatattatcattttttttttatatatatatgcatatatatatatatatattttctcttttgctttatttattttcttttgtctccattttcatttatttttcttttcttttttcttacaacatttattctttccattttggttttctcggattttttttaatcttttatcctctctagcttttttttatttatttttcgtttattttttttttcacatatttaacattacatagttatattaaaatttatttttattattgtattttttttttacaattgctaaattataattaggggtgtatttgtagctattctcattcactcatcataagagcttcatcctccaaacataataactggttacccaaaatataaataatcgattaattaagatagtatagttaccaaagatataaatatcttattatccgaagtataagttcatagttacctaaaattttaagtatctggttactcgaaatataagtacctataattattcaaagtataagtacttgattactcaaaatataagtaaatggttatccaagatagtacttattacaaaaaatataagtacatggttaatataagtacctagttacccaaaatataaatacttagttaccgaaaacataagtgattgattacccatataagtatctggtttcccgaaatataagtagatggttacctaagattatatctaattactcaaaatataagtagattgttgtccaagagagtaccaagttaccctaaatactaggagatggttacccaagttaatatgtggttacccaaagcgttaccaaacttagttaccaaaactataagtgattggttacccacaatataagtagatggttaccccagttaatatctggctactcaaaatataaatagattattataaccaagagtacttagttacccaaaatataagttgatagttacctaaaatataagtacctagttactcaaaatataattacctggttacctaaaatatatataattggttacctaaaatagtacctacctggttacccaaaatataagtacttgaatatctaaagtataagtaattaattatttaaaatataagtatctagtttcccgagataacaatttgttacaaaaatataaagcactattcataatcgtaatttgttacagacgataatatattatttgggatatgattttgtcatgttattgtactttcacagattgtaatccgtgatgtacggtagccgtcagatgagggagttatttga

SEQ ID NO: 124947 - DNA, 983 bp, Cannabis sativa
tgtaatttttggtgttgtggttggagtgaagatagtttttaacattaaatttgatgatagtgtgacaccaaatttaatgagctccttggagatgctctcggacatgaatttgaagacaaaatttttttaattatttttttgaaataatcagagtatacaaaagttgtgaaaaactaaaaagcaaacataaagcaagaaataaaaaacgcaaaatgtttagagaaagcataactcagtccaaataaataaaaatagagtcctcactcctcataatgtaaatataaaccagacaaaaaattaccacactacaaaataacacattaataatataaaaaaaattaaaagcaactacaaaatgtcgatccactaactcaaaaatatgtatccattcaaaataaatatatactcatttttctacttgtttaaacaacttaatagcaactaaaaatgacaacactacataaatgtacaaattaattggacatcaataaattatgtaaataacatgaaagaaacataaaaataccacataaacaatcttaataaaacacaagtaagtacaaacaatagacaatcgatgttttcatgttatttttgtgtggtatttttttttttattttttttattgttttgataatattttcctattactttcatatagttttcttgttgtttttataaaacacctaaaatttttaattaaaaaataaaaacaaaaatgtaaaagtgaaatatttaacagtaaaaatgttaaaatatttgcaaaaataataccttgtgtaaattttctaaaagaagaatactagacaacaatgttactttatatgcaaatcatttaggcattaatttttgtgtcaacaaccttaaatatacacttataaaaaaaagaaatttttacatgaaaaatcacttttgcacaatttattaccaaaatactcctacacgcctatatcaacttttttacttacaatgttggttttatt

SEQ ID NO: 124948 - DNA, 1005 bp, Cannabis sativa
accactaataatcggaggaacatgacaacacaaaaaccattacacgccgtcgttttcaccctctctctccaagggcacgtgatcccatccatacacctggcaatcaagctagcatcaaagggttcaccatcaccttcgtcaacaccgaagtgaaccaccgtgacatcacaaaatcgctctgccgcaaaacctctcaaaacgacgtcgtagacatcttcgccgctgctcgcgaggccggcctcgacattcggtacagaacagtcagtgatggttttccaatatctttcgatagaaagttgaacaatgaacagtacttagagggtcacgtacatgtttttccggctcacgtagatgaactcgtccgagatttagtcgactcggctgaccctccacttacttgcttggtcgccgattctttcttcggatggcaatctgctattgccaaaaaatataaccttgtttatgtgtcgttttggactgaaccagctttggttttctctctcttctaccacttggaccttcttcaaattaatggccactatgcatctcatggtaagtataaattatataattttaaaacgttgttttttattttatttattttctcttcgatcttctcaaaataaaataaaatgaaaaacaccgtattaatttgttcatccgtatccactatttaaaaataaaaaataaaaaatttacatatataatgtttttgtgagtttattttgaggccacataaggtagtaggttactattaaaaatgttgtatattacattgaaaataataaaatgaaatgttatctaaaattaaatgataaaatgataatggatgcgtactcatttgaaattctgaatttaatcaaatataaatttggttctatgtgttttgtttacacagtaatgcttgtgtatataattggataaatcttatatttggtgtcattttactaaaataataataataataaaaaacatgtagtgtttttgtcctacattactcatatg

SEQ ID NO: 124949 - DNA, 541 bp, Cannabis sativa
attaatggtgtttgttgtagtgaatattagataaatccaaactaaaccaatagatataaataaaatacatacaatggaataaaacttatccaatccaatatccataagatgttggatcgattggatgactgaaattaattggatcagatggtaaaatatatcattcaatatataattagatcggatctagataaaaacactaaatatagtccaataaacattcctatacgaaatggcacaaagttaaatataattcagtacaaccattttaattagtgtaacttttatctaagtggaaatattatctctaggtgtgtgagacgtgcatactctcaatatctctagtatgtaggtttgcctatgatcataagtaaagaattatttttaacggccatttaggctaattagtaatttttctccctgaactttttttgccatcccccgaattattaagattgttaaatttaaagacttttgtctaattttaataaaagaattctaacatggatgaatgttcaaatttagtacatatcaaagtttg

SEQ ID NO: 124950 - DNA, 902 bp, Cannabis sativa
aaataatttgtgcttatgggctgggttaggcttactttaaaaatatgggtcaggcccagcccagcccgtttataaaatgggaggccggactcatataaaaaaagtgggcttttataaaaacaggctgggtcgcccgaatgtacagctttagcctctttataatagagattctttaaattttttagctaaatgtcataaaaaatgcctccatcaactcctttatatcatagttgtgtaatagagatacactcaaaccaatgtaatttgttcaatatgtagagaatgaataatgcatgctctaaacttattttaataatatatgaataatattttatttatgtatgctgtatatatgttcaaaaattattattttaataatgtaaaaataaatataaaattaatttaataatgtatatatgttcaaaagttattattttaataatgtaaaaataaaaataatatttaatttattgatgtagagaaaaatatatagttaatgtatgatataatgtaaaagtgtgttgtaaaataaaaaaaagttgaattttgatgatgtattttaaagaataaagtcgagaaacggtagggactgttgaggaattatggggttctatctctaattttgaaccgtgttagagtggacatgttgagaatcatagggttccatctcaaaaccaattggtgataagtgaagcaactcatgttcttatatatggctcaatactctatcatttatttcatgtgggctaatgtccataggaagtatagttagatagtaattgcccaatagcaatataacaagggccaagatgcaaaatggccctaaatctaacaattaagttaataaatgtcatttttttaaaaaaattaacaaaatgtccttttagttgaaaatttgatga

SEQ ID NO: 124951 - DNA, 1670 bp, Cannabis sativa
aaaatattttgtcaactaacttgccaaaaaaggactttacagtaagcaagccatcacgttaggatccataccaggtgggaaagtcgacgacacaagcaaagcgaagccacagcacaaccccttcccaaaggaataattgttgagaaagcccaagaagagggatatgatgtgaccaaacttcacaagactccacaacaaaataataaagttaaaaaattataaaatcgtgtcaacacttatgtaaattgaatgttgatcaacatgtaaaagtaatcaatccaatccagttacacatatttatatatatatatgaaaaataattatatttataattaatattttaaagtaaaaaataataatttaaaaaaagagattttttttttatttttacgcttcaaaacagtatttttttttttttacattttttatggaattctacatagaaatcttattgcaactagtgctacaacctaaatcgcaacaaaaaatcgtatagcaacccacatagaaaccaccgaagaaaccattagaaactcaaactgtaaatttaaaaaaaaaaataaaaaaacagtaaacagtatatgaagtaatttcccttaaaaatataatacaatgatacaaatatttatacaacaaaattaaatatttcttttacatacaatttttttcttttttttgaatttattatttattattttaatttatcttccgagacaaaataataataatttattttattttgttgttaattttgtaaaaaaatgtatattaaatattaaataatttaatattaaaaaataattaatccaatacaaattatgaaatccacattagtacaaatcaaatgtattataaacaaaatagtatcaattgaatggatgaaattctaaaatatatatctatatattaaatatttatgcttttttttttaataatttattaaatatttatgctacaaatactaatataaaattttaaactccatcaaaaatagtagagcgcgctgtgcccgtgttgtttgagtttggtggattttataatcatacagttgttgcaataaatataagacaatagtacaaaatgcaattgagacaattgtatataaatggggacgatgtagaaaacagaggggaacaaaaatatgcatcttgaaagttcacatgatttacagatgtcatttttatttttagtattttcattataataaaattaaaattaatgtacctcgtgaaaaacactaattagtaattactttagaaaatatgagattcatacgtgttctgcttcatctatggcatttattttcccaagtcattttctttctcctttttcctttctataacaggcccttcaaaataaaaaagtcccaatttcaatttaagactttaatcataataaacttaattaagtaacttataataatactcttaattaaggaacttattcatacacagatttcattcctctcttccccaaacaattccattcaacacacaattattaataagtattactattacacctgggcaagggtataataggtaatccagtctaataataccaaaaggaaaagggaagttttatttacaccccaaaaatttttaagtgcaccccattttaatagtttttattttatataaaatttatatctttaattgttttattttttt

SEQ ID NO: 124952 - DNA, 538 bp, Cannabis sativa
ataattaatgaatcaatgttctcacgtgggtggcttaattaagatattttggccaatatttgctgcataaattaatactcaagtactataatatagactttgtttattttatttttgccagcttatatatattgagttgatcatatatacatgatatatctatacgtgtagctgtttgactaacaagtaatcgaaagtactaattcctaggtctatacattagactatatgtaaaaattataaaagtcaccatttctaccaaatattttattattattattttttcaaatgagactgtgcaataaattggttatacttatattaaagaaaagtgcttaattatttctatatcttataaaaaactgagtttttgcaaatgtcaacaatacatatgaaaatataaaattgtataagtctgcagaagcagaatgtaattctgttgctacagagaccagtttttcagtaacaaaacagaacagacagaatgtaaaaataattgcaaaaaattaaatcacttgacacaagagatttgtacgtg

SEQ ID NO: 124953 - DNA, 779 bp, Cannabis sativa
atagcattttaattaaatatattattaggttttcatcttttttataaaatctataaaaagatacgagacaatcatatgatactctaaggatttgttctcttattttttttttactttttattaattttataataataattctaaaatctatatttaaaaatgagtatttaattaacattattgagtatttaattttttattagtattatttaagatcacgtttttaatttttgactttttttaaaaaaagatctcatacatttttggctattttattttaaaattaaaatatttatgtaataactaatctataaatatatacataaacatcactttaatttcatagcttaattttttttttcagtcttatgtcataccatatcaatcaacatctctaggtaaaaattttattaatttttttctttattctttctttctttgttttcttgcctacacattattaaaccatctctaatgggagatgtaaaaattgtattatatttagcacagaaagtaattttgtagtaaatttacactaaattttagctttgtactccaatgcacaattgtaaaatgttgatgtaaatttaatatttaattaatattttattaaaaaaaatctcataactttataatcaattttattattattaatatgtaagataataaaacaataatataaaaatattctataatttaatatgatagttaaatatactaataaaataagggaaatttcattatttgccctaaataatacaacccatatcaaaatttat

SEQ ID NO: 124954 - DNA, 1500 bp, Cannabis sativa
  modified_base (303)..(307): a, c, t, g, unknown or other
  modified_base (824)..(828): a, c, t, g, unknown or other
tagatgagctaactactctatttatgtaatgttatctttgactctcgcctaccgggacactgtatttcattttggtggaaaccttagaaaataattaaatatattttattcttggaatttttgcaaacatgtttctatacttgttattttctaaatttgtgtatgagtttatttgaaccaagtaatttatttgtgtttattgatatttttagtgtcaaataacaaccctcaccccaatcctcatctattatatgcctttgcaaatgaactccaaagtatgaagatgactcctggtcagagtannnnncacacttgctcatgatgaacttaaaattctagaaagtaaatgttgggaattgtcttatcaagagagcaaagaattcaatttgttctcaacagcttatcacctgagtttaaccaatttgttgtatcttttatgattaacaattggaactcgtttgacataaacaagctggacgataaattgcgtgcttataaaaggacattgtcacttgcaaggaggtccctctccaatactgcagacaaaggcaaaaagaaagctaaagatattgaggatgattcctccaacagtcctactacttcaggcacatttgtgaaaaatagataaagtaatttcacttcctcaaattatctttcacaacagattgaaccagcaatgagaacaattacgcagacatattattcaatgttctcattatgaatagaagggacattttaaatcaaagtgtcccaaacttctcaacactaagaaaaatggtagtgctttagtttttgaattatgtattttagagaatgacaaatcnnnnntggattgttgattctaaatctactaactatgtctgttgttcactgtagctgcttgaaaattggaattcttaaaaatctgaagatttgaaacttaaagttggtaatggtgaaatggtatcgactagagctagaggaaaagaaaaaaatcaagtttcagaatagaactttgaatttagaaagtgttttgtttattgtaaattttagaggaagcttgatttctgtttcatgtttacagttgcaacaatataaattgaattttttgagttttaattctattatctctcgtaatgatattcaaatttgtgttgcatctatggagcaagggctttatgttcttagaccagatgaaccatttgcgcttaataatgaactgtttaagatagctaaacctagaaaccacaaaaagcaaaacatcgataatgaagatgatgacatttacttcttggtcatataggctatgatagacttcccaggttaacgaaaggtggtccattgaaaaatgtcaccttaggtgaattaccagtttgcaaatcttgtttagaaggaaaaatgacaaaatcataatgacaaaatgttctttctctgcaaagggagagcgtgccaaaggaccattaggaacagtacattcagatctttgtggaccattgaatgtcaaagctagaggtggttatg

SEQ ID NO: 124955 - DNA, 1373 bp, Cannabis sativa
agcttggaaatgatagtcctaccaccaaacatgaaaaagagagcagggagacctaggagaagaagaataaattcaaaaggagagccaaaggtacaactaatgtgtggacattgcaaaaagacggggcacaacaaaaagacatgcactaatccagttctaccaccaaagcaacaagaaccaaaacagccaaggcgcaagaaagcaaagacacaacaaaaataagagcaatattgaatacaaagatacatttacaatcaaaaaattactatattagattttgtatgttccaaaaatcatttcaatatttgtttaacatgaactatatcttcaaacagaattggttatgaataaaaatgaaaattttcataacatagaattgccttataaaaaaaaattaaaccaaaaaagaaaccggttatattcaacatgcaccaaaaccaaagtaatcaaagaaaatgaaaccggttatatttaaacatataccaacatacatgttctataaaaaaagttctgtataatagatacaacacaaacaacttaataaacaaaaaaatataaggaccatatttactgaaaaaaaaaatcggttaattatacaaagaacatttggcaatctataaggaaacacgaaaaaaccggttaaaattaaagaaaaaactatacaaaaaaaaaacacaatgtaagaacaacacttcacaaggaaaatgtaaaaaccataaaaatatgtattacaaaaagaaaaaactgaaaaaactgaaagtatatataaacatataaaaactagttccatatattgttatataaacataaaattaaaatataaacataacataatgtattgttccaaaaaataaaaaaaaaactaaacaaaactacaaacaccgtatccgtccaaaaaacaatacaaatatttaacaagaatctaacttcttcttcttggacttctttcccttcggcctatcttcagtcgaatatccttcattaatctttttttgggcatagttatacaatgacacagcgaggtcatccctataggtcgtaatcatgtcatccatattaggaggaatctcattaatcttgccctgcatgaatagattagcatacttaatcacaaatacaccgcagtcactgaaaacaaaacaaaaacaaataaaaatacagaacccgttatttaagcaaaaataaacaaataaaaaatcacggaagtcataggataaaaaataaccagttatttacctttttctttgagtgggaagcttgtccacaaactcctctgcaatgggggtatccttcggaacagcataaaggcctaactccaaactaatgtcgttcctaactgttggaaattattttaccaggagatcggaagagcg

SEQ ID NO: 124956 - DNA, 2293 bp, Cannabis sativa
  modified_base (38)..(39): a, c, t, g, unknown or other
  modified_base (1842)..(1843): a, c, t, g, unknown or other
ccactgtaaggtttctaaaactttatatgtgtttattnncattgttttagagattcatatttaagatgttaaataacacatgtagtaaatctagatcctggtaaaacatattccaacaaaacattggtcagcttgttactgttgtagctgaatgggaaaagggaaaaattcccattcaacccattcccaatctaaagagtcaatacgaggtaactacatctaaacctattgaagaagttaactcaatttctattcttaggtctggaaaaattattaaaatacccaattacgtacctctacctgatactgaaatgaataaagactcacttaaagaaaatgaaaagagtcggcctaaaagttcacattccaaagattcaattgaagaatcgagtcaaaatttgtcgttcattccaaatgctccattcccacaaagattgatcctgatcaaaagaggtagtcaatatggtgacatcttataggcattcaagcaagtttgtataaatatccctttcttagatgccattaagcaaatacctggcaactctgaattcttaagagatttgtgtaccgcaaaaagaaatgccaatgttccgaaaaagcatttttaccggaacaagttagctcgttaattcaatataaaagtcttgttaaaaacaaagttctgaggtgtccaacaattcatgtattattggtgatcatgtgatcaacaaagctttactttatttaggagctagtgtgaatttgttaccacattctgtttataagcaacttggtctaggggaactaaaaccaacatctatgacattttagttagctgattggtctgtgaaaattcctagaggtatcatagaagatgttttgataaaggttgataaattttattttcctattgattttattattcttgatactcattttgttgaagacataaatgctcaaattcctatcatttttggtcgattatttttagccacatttaatgcaatcattaactgtcgtaatggtgttcttaaactattatttggaaatatgactgttgagttgaatgtttttaatgttgctaataaatcttttgaatgtgatgatgtgtatgagatcaaatttgttgattatgttacgcaagatttcttgctgaataaagataaaccttttgaaaattatgtaaatgattttggttaaaatttaaagttcttttgatagtgtaaattttttgttagagtctacaccattaataaacacacaagaatggaaaatcaaagttgaatcaattgaacatcttctccaataaaaatcacaatcactccctgaaccacaaaagttagttcgacctcctgattagaacattcctttttattatagtaagttacgttcaaaatggactggttcatttactgttcgtattatttttcctcacgtggctgctaaaattaaaaattataatgctagtaatgtattcaaagtcaatggacagtgattgaagccatttttagaatcaacaccacctgtagtggaggaaacattccttcacgacccaattaccaaggttagtgaattctttcactacttgtcgtatctttaatagctttctttatttttagtattttagtttattttctgtcattttttaagaaaatcaacatctatgactgtgtatatactctattttttaagttttcatctcatgtccttatcatatgcatatttagacattgaggataatgtctcattttagttggaggtactaagtatattaatgctttaaattcgataatttttttacctttctaaaaattttaagtcaaattctacagctaattatgtgaataaataaatattgtgttnnactaatttatactatatttagttactgttgacctcgcttttagccaacgacagtgggtctaattttgtaagcgacaagtagtttaatacgattgaaatatagtaaatcaaataaagacacaagaattttatagaggttcagcaccgagcagttcggtaatggcctaatccttgttatttgtattgacttaagaacaaggagaatggttccttttcttatagctcttacaactgtatctctaaatatgaattcttagacaaaatctttagaccctttgcccagtgactatgaatcactatttatagggctataagcttggagaggaagtatatcccttctcgttgcaatcgctataaggagaaatattccatagtaaatacagaatacactaatcgttggatttggacagcttaccatatcactgctcggtttagaggacttcgtccgagc

SEQ ID NO: 124957 - DNA, 1297 bp, Cannabis sativa
tttcataattcatcattaggtcgttatttatgtatttattttttgtctaaattctttttttttttgaaccgaagaaaaatttattgaaaggcaaaaagccaaaataaatgacaatacacaatagtcaaggattagaggcaaagcgctaaaccaggccaccaaacccgagaagagtcaagggataaagccaagcgtgcaagagaatgagctataacattttgagcccttttacaatgagtaagagaaataaaagagaaagaagaccaaacatgtaaaatatcatgaacaataatactaaactcaatctgatatttatccttgttattaatagcttggacaagacaaagacagtctgagaaaacaataatggagttgtaccctaaacgacaacacaacaacagcccacttaagagagttgctgcctccgccacatgagtgtgaaaggaggctaccactggatcacttgaagaacacaaaaccaccctgtcacagtctatcatcactgccccgagacccatacaactattgtcctcattgatacccgcatccacaaatagattaaaattacctaacttaaaagtcttagacgagccactagagagcccaaccacagtctctgtcggcttcacatgagcattcagatccaaattagatttagcatcttgataacgccaaagaaaactcaaagcccattaactaaccaactcatcagataacatcttcttgtcatgaacaaaagtattgcgacgataccaaattctccaacataacacaagaaattattccatatcctgctttgaaaggacatcaacacaacccacaagaagctttttttaaagtgtccaaccctttaacaacccaatctttttgaatatttttaagtgaagaacaaaatcaaagagcatggatcttgctttcattatttttgaaacataaagggcacatatcgaaagtcttcatactatgccttgcgagattaacataagaaggctcattgagattatattgacgtcacattagtgctacgtcaataaattatttaaaaaaaaatgatcaaaatatagttagagaggaatatttgtaatgatttttacagtacaaaattgaggagccaaaaccctaaagagtcatgattagcaggacaaatcctacttattctaaaataaaattaaattagatagattattattattatttttaaaaataaattggacaaattattttgtttgcccatttatattgaggttgatcaaaattcaaaactcaaaagtttggcttgggcccaaattccaacagt

SEQ ID NO: 124958 - DNA, 2644 bp, Cannabis sativa
ggcataaaacccaacagttggttgtgtcagacccgaggggatggaatcgtcgacagtcaatgggggaagatcttcgatcgctggggaggccatgaatgtaggcgttgacccactgccgaatcatggtaatggtggaggtgtggttatggctccttccttttctcatggtccacgtgtcaatcaaggaggagtccctaaaaatagggggaaggatattgtaaatatttcagataatagcctagttgttattgataacaaaaaaaaaaggaaagtaagtgagggcagtaacgacaatgctgaggttgtacagcatgttaccgatatttcaaaaaactcatctttggcgggccttggcaatggggctcaccaatcatcatgaaaatactgtcttggaactgtcgtgggctggggccgccacggaatgttcagttcctaaaagaacttgtggttcaaaaaaggcctagtgttgtttttttgtgtgagacattaagtaaccaattgaagatggatcagatttgtatgagtttgggctttgaggggtgttttgttgttgcggcccaaggaaggagtgggggtttagcattgctatggaagaatcaagaggaggtcaaggtggagtcgttttccacaaaccatatagatagtcttataacgcttgatgggtagagggaatttcggttcaccggaatctatgaggaacctaatagaagtttaaggaagaacacctgggatctattacggactttacatgggcgttctactccttggtgtttaatgggggattttaacaatgtgcttggtcagggtgagaagctcggtgggttgcattacccatcgtggcttattgacggctttcaggaggtggttcagcaatgtgggttgattgatttggatctgtgtggccatccttttacgtgggagaagagttgagacactgctcattagatagaagcccggttggacagagctatggtgagtaattcttagttaaataatttctcttcctctaaattattcaatcttgagatttctccgtcggatcatagtccccttctactggatgttctctttcacgagactattgctcaagcgaggtctttcaagtttgaaaatttctgaactagtcatcaagattgtgaagatgtggttagacgtaattggtcttcgatagcggggcaaaatattgttcgaaaaatataggaatgtggtactgctcttcagcattggggaaaggatgtgtttggcaacttctcttctcgcattaaacaatgcaatcggttgttaaagcaatataagaagcgacgagatgaggacggtaagagattattttatgaggctaaaaaggagctcttttctgttcttaatcaaagggagggtttttggagacaaagatttaaacagttatggattcaagtgggagatcaaaacagtaagttctttcactctaaaggttctgcgagaaaatgaaataatcacattactagtttgaaagactcggagggtaatttgagacaatgggatagtggactggagaatgtcatggttgagtactacaaggaactctttactgccgaaccttctagttgggatgaggtgttggactgtgttgtgcctgctgtctgagatgagcataatgtggctttactacggcctatattagatcaagaagttaaagatgcagtctttcaaatgaatccggataaatcaccagggcctgacggggtgaatccaatttttttttcagaaatattggtccatggttggcagtgatgtgttaaacatttctttgcaaccgagcaaatgccggtagggatgaataataagaatattgtgctaattccaaaaaagaagaaccgtgatcaaatgagtgagttgcaccccatttctctttgcaatgtcattgccaaagttattactaaggtccttgctaacaaaatgaaaggattgttgtctgaggttatctccaaacatcaaagagcttttatccttggaagattaattacagataatattattgtaacactctaaatacttaggcacgctaccaagatacttacgaaaccctaatcccctaaacgggattactaattaaaaatgcgcagaattgaaacttttttattaaacggaatggaaataaaacttgtaataatttaaactttacaacaggtgggatcccaaaactatttacaaactttattacaagtctttttctttcagccggcctaagtggcaaaatagagtttcaaaaatataacactagtagacccttaacccgcttggtctgatgtggctcggacatgtacattcttcacccagctcctgaactcatggctgatcagctaaagccttaccctttcctgcatagtagagcacccgtgagccaagcccatcaagacagtataaacaataacaataataagcttatcatgctatctaaatagtatgtcattcacatatgtctgtgtgacacagacctgcatattgcattaacatgcctatttatgtctacgtggcgcagacatatgtgttgtgctcacacatctatttatatctatgtggcgtaggcctacgttttgctcacacacgtctaaatacattaaggccttagaatggttcatctcggttatggttactgagtccaacc

SEQ ID NO: 124959 - DNA, 1180 bp, Cannabis sativa
tttttttcttatttaaatttaatttaaaagtataaaaaaaattaaataattatttgtttatataaattttattttaaatttaaattaagtattgttaattcaattagttaatcatgttttataaaaaaaatattagttatattatttaaaatatttaaaggtatttataattatttaataaaattagtttattaataaatttaaaattagattaaattttatatattaaaaaaaaattataattgaattgtgttagatttaatttattatatcatgatgacctaataaaataggtaacttgctataataagtttctaataactttgaaaagtcaacttgttgaggtgacataatggaagatttcattttatattgcatttaattcaagatttttttttggccataaggaatggtgattccacccaattaaaataaactctctttttcatatttccaatgtaaagtttaaaaatattgtaattcatatttaattggttctaataatttttttaattgtttttaaaataaaaatttgttttatttaatactctataataacccaaattattattttaaatattacatgtaattatgtctacttacatagatgaataaaaaaaatatcataccaccaccattgttgaaacacaaaacccaaggttaaaattttgaagaaaaaaaaattgaccaacaaagataagatttgaggactcgaatggggaagaaaatcgcactcggcatataagaatgtgaaaaagacgattcgaagtagagaatgagagatgggtgttgtggggagaagaaaataaaaggaatacaaaatagagaacatccattcttaatatatcattatatatgtataaatgcataattacccatcatagtatttaatttatgtaattatagagatggctctgttacgaaaactatgaacactacgcaagtatacgaagtcaagtagtaagctcacgcaagtgaggtcgaaccacaaggaattggattaattactactaaattatacttatgattctatctggctaatcaatattttttatgacttcagtaaaataattcggaaacgtaaaataaccagagaatattaatcaagatgagaaaatagggagaagaatcatgttgtcagtttactaatgttaatgcctaattgctatctttttcttga

SEQ ID NO: 124960 - DNA, 617 bp, Cannabis sativa
  modified_base (500)..(501): a, c, t, g, unknown or other
gtatttcgatccttattcatagtgtatatatgtttgacttaattccgcattttatacttaatcatatatgtttcagtttatacatataaatgtctaacaaaaataagataggagatttctcctaaccaaataatgtctagatccgtactctaaagcatgtttagtcaaaccgtgtgcagcaccgcggttagcatctctcttatgagaaacaataatttcagagaaaaagaataaaagacaacgaacatacaaaattgaatccaaaaaatagaataaatccttaaatgtagtattcaaggcattaacaacttgacgcgcatctgtttcaatattagtaatgtgtaattgttccaaaagtgcctaattcgaactcatcggatctaaagggaccttattcttgattaatgaagatttttcctccataaaaaaaaattataatataacaatgcaacaacaaccataggtagatcactagtccatatttatatatatatatatanntatttatatatatatatggaggagatttcaatggttatacatttattgtaactatcatggttccatttttttaagtcattggattactattaaatagttgtgattaatttagaaat

SEQ ID NO: 124961 - DNA, 1062 bp, Cannabis sativa
  modified_base (240)..(252): a, c, t, g, unknown or other
  modified_base (1010)..(1023): a, c, t, g, unknown or other
ggcataaaacccaacaccaataaactagattatttatttagtctcatcaaccaaataatccttatttattaattccatgattactccactaaaatataggattgactcttagtaattatagaattatatttactgaattttactgtaatgtccattgatataatcaattctagtgattagccctccatatattggtttttaattagttttgatcaaattactgttttacccttctaattnnnnnnnnnnnnnttagtaccattaattcactagtagtagtgatccgtgcattatgggtttccccttgaattcttgttcccacgtggccagttggctggcaaggaatctctccaaccaactttgaatgacccctacgtggggtagtcatgcaattggagcaattatcttctctaatttgttgagacatgttagcccttcactgttattgctcctctcatcggttcacaatattctgccagttctccatgaaatagctttgaaactattcgtgttttttgtcaagagagccttgtaattgctgttataggtcagccactgtttggctaagctattcaactcaaggatcgaccttctctgggtcttcttgttccacacgtggtttcctaagtggaacttgttcgctggtttcagtaccggtagtagttggtggccttgggggactagttgtgaagctggttttaagatttccacctagcatatgtgatgtaggtgtagtccaatcaccagtttcagtgactggcgtgcccccagtttgctggccagtttttttggttattctttcaacatgtgaggatcgtgttgcaactatcttgtaagtgtttccttgaattgcaactcttaatgaatataataaaatgttgacgcaaaattctagacacagatctttaggccacacccgctctctagattgtcaataatgaattgtaagttaagtatatatattagagacacacagatttatagtagttcatgttggaaattattttacnnnnnnnnnnnnnnactaacaagtatgttggattaacaccctaatatgaattc

SEQ ID NO: 124962 - DNA, 1143 bp, Cannabis sativa
tttttttttttttgattttgggtatttattttcaaatgctatatatgtccaactacccaccattcccatgataaccactattctcttctatctccattttctttccaaaagtctaatctttttcaagtttgagagattatttttctagtgttccaagaaaaatttccaagagaaaaaaggctcaaccttccaagacgcctgctcgaggttctgcctttgcttctccaccctcgccacctgtgccaactgttccagtgaccggagctccagggtcattgtcagctccgacaaaaaatttcaggaagtcaaaatctcaagcttaaaaattgacctacaatcttagctctcttccaatcactgcttcttcgattacaaccacaaatcttgggcttagtaatcatgaagaatcccattcatctgatcactcattgtcgaagtcttcttcttcgaatggtgctcaaatttttaagaaaggtattgtgcccttgcctaccgtaagctctcggacccggtccacgatgtccataggaaagaaacccgaagtgatcagcccaaaagagctctcaaaggaaagaaagtggtgacttcatcgtcaaagggaaaaaacctcaaaagagacttcttgcgtttcatcatcaaattttatagcaaaagaaaagactgaggatgttgatcaagaatcaaagggtgtgtctaattctagtgaagaatttttccccaaagaacattcacctggtgatgattctgggtctgaaagtgaactgcctgaagatgatcccgtcagtgcagaaccagctgttgtccctgctacagttccatagaaggacaaaggaaaaagacccattgttactcaaagccctattctgtctcagaaaaggaagaggtaatcttgtattactcttgaaaacttcaagccccattctcattattttttttacaatgataaggctagagatatgaaatattataagaatatgaattttactgttgacaaaaatttcaatgtcattggtcataagctatttggggtatataatatattgaatgaaagacaatgggttgatactttaatcagttttgatggctatgtggatcaaaatatcaaggagtcttatgctaatatcactgatgagtgcctcgatg

SEQ ID NO: 124963 - DNA, 1318 bp, Cannabis sativa
aaaaatacacaatattttttaaaaaaattctaccctacagtaaaaataaaaaaaaattaaaaactttaatatatggtgtaaaaactcctttaaaaaataaattttacacaatattaaagttgaatttgtttttttataaaaatacactatttttataaagataatgtcacgagtgtttttatcttttatattgtttctgaataatatacataaatttaaggacttgtttgataagccgtataagaatcatattatattaattataagaattcatagtaaatgacatcaaatcataacactatgtaagtaaatagtaacatttcaaacttgtagaaaaatgactattttacactatttattatttattattatttaccaaaattttcgaaaattgattaataagagcttaagaaaatgcaaagtgttaaatgatagacaaataaattttttacttggttcaggcattaatgagccttagtccacgagtcagttgtattagccttttttggcaagtatgtgagtattacaagtgtttacaatggtaatctctgtattccttttgttttttctcaaaagaaagctctctaagaattttaatagaggttttgtaagtaaaaattgttcgctctctgtacataaaaaatagagatatttataggcacacaagtgggtaagggcataccctttaccccactaggatttcttactcagcacacaagaaaggctgaaaacaccacaagaccatctgaccgctggtttggtaggtagtttttccatcttgcggtgtttaatcactacaggatgtcacgtaaagatctggacatgtgtcgctcaaaggtttcacctttaaaagtaattgcccatacaagtcgttggacaataagcattacagaggcacgtacacgcacaaccacggtctaacgtaggggacagaatcggactcgatgtcaaacgagttgtaactgtcaggtgtagttccagattaggccttaaggagcttcacggaagttcattcaagggcttcatggaacagtcaattcccctattattcaggagtgcatgcgcctcctatttgcctacaaatagcggaagcatcagatgagaacctcaagaaccaatttgtcgtttgcaagggaagtagctttccggatatcacagtatcttttgtgatcctaccttaaaaaagagtttgggatatcagtgtataatctgacgtggcacccttctgtagccttcatgtagaacacatccgggaatagggataacaattatttacttaaaaactgtaatatctcaaaaaatatactaatattttaat

SEQ ID NO: 124964 - DNA, 2868 bp, Cannabis sativa
  modified_base (81)..(85): a, c, t, g, unknown or other
tactctgcgacagaaaggaacaatggttagagatatgagcagaaggagtcatattattccgctgcaactaatgtaaggttnnnnnaactcttatgtgtttaatttaatcgtattagagatattcaaattttggatattaattcaaaatacatgatagtaaatctaggtcctggtaaaatattctcaacacgcccgtgcagcccattcctccgcccccacgtaggtatttttctaaaaaaagtttgttagttaatttttaattttcttttgttgtggttaatttagaataatttgtcaatgtctatgttgaatggtggttatgttatttctgattcgatggtgttggttgagaaaattgtaaaaggatgtatgttctcgattatttattgacgaattctcaataagtcatcgacaagttttggtgaggatcattaagtttaaatattattgatgggttattggcttgttcttgatagttgaaacattgaaaaaaaaattatagttttgttttttttattgattcttgtttgaatatcgattgattatcgacaggttgtcgataggttattgataaggctgggtgacgggtggcgattggagtgatgagagaaggctgggaaaatgtctttcacagcagttggtcgagtatcccaaaggtggtaggcgacggtttagacggatgtagggtttttttctttttgtaaagtggttctaggttgatggagttagagagagagagattggattacttttaagctttttaagttttgaaaaacaattaaatggtaagggtatcttgagtaaaataatgaattattaagaaagtattataaaaaaaaaattaataatgtattttttgtaatagagatttttattaaatatataaggaataaaatttccctattattattaaaggttatttttatattgtttttataaaatttagtaaaaatataataaagaaaactataacaaaatccatggggcctaatatcgtaccttatatcgggcccatattaagtcataacaaaaaataaaaactcaacattaccatcgggtttactattggtccctataccaggcctatcagatcctcatataaaaaataacgaaagagaacatcaatcgggccaaccatcgtaccgtatatcggacccatcacgccaactcaaaattttggaaaaaatgggtagacaatcgggccgaccatcgggccctatatcagatctttgtcttcaaccccagatccatctttgcatcaggatgcattgggtctgcattggtcctacctaaacatgcttttccttgcccaagaatcacaaatacaaaatctaaccctaaatttaatccaaatctcacaaatcaaaccttaaatctatcaataaataatattttaaccctaaatcaataagaaaaacattcaaaaataccacaggaaagaaatcttacctttgccaacattgcgtggtggtgggttgagttttgtggtcgtctttgtggtctaagagcgagggagacgggggtggtgggttgagtgggtcttcatgctcagatggtgggttcagtcgagcggtgcttagatggtgggttcggtcgacatttgcgtggtggtggtggggtcgataaagttcgagagaaagagagaggggaggaagagagagagcaaattttttaaatgagacaggtaaaatgggatttaataaaaatttagaggaaattacattgtatacccactttactttacttgttttaatttttactcctatttttatattatttaagatatactcacttttatagatgatttccccattagatcctttaggttaatgtaaattatatgctagatttaaaattagtgaggatatattgggcaactaactaaaaaactgggtatattttaataaaatataatatgagggtatttttgattaatagatataaaaaagtggtatttttcaacttatccaaaaaatttacctattttacaaatattgaatagtttaagtttaagggactaattttgccccattaaatcaatagatatggaaatttacatggtatactgatttttgctatttttataaaattactgcaacacggcaagatttacttttttactgtgtatttttataagttttatactgcagtatactgtatttattttttgttttttttatttgttttagtgttgttttacggttgttttccataatttatttttttaaggtgtgtggttctttatgtttttctaagtgagaacataatatatatatctgcttatctgtttttctaagtgattatatctgtttattgttttatatttatttttgtattgttttagtagtttttttgttgtgattttttaagattgagcttgcaaatataactgctattggattgggtattagaactgtgcaaaacattttatacttttttttaatcatgttttcctttcttttatttgatttattttagtgttgttttacaattgttttgccatgattatttatttgatgtcgatatcattatttttttctcaatctcaccagaattaatggttgttttcgattattttggtgttcctgtagtggttctgtccgtgagtgtggaagatggaggtcttatttttttttttggtatttacaatataaaagaaaaaaaatttggctaagataataaaaaagaaatttctaacgtgtaagagtatttttataaagattgagaaaaaaatcaatatttttgtaatttcgtatagatattcaaatttcccttgtaattctaatatatctattctatataaagtgtgcctatataactaaaattcttggtttatgagaaatttatgggtgactttttatttttatt

SEQ ID NO: 124965 - DNA, 1541 bp, Cannabis sativa
agattttcatgctatttaaacaaatcacaaccattattatgttaacatacttaaaatataaaaaaaaaattatttatattaatgctagcacccaagatctaatgatcaataatctcattgattatccatatagacaaaaatttctaacacacaaaaaaagaaagaaaaacaaccaaaagatcgatctaacctcctcctgggctgtattctgtatcatatttaatcacaagttcatacattattcatgaagtacatgtgaataatgtacttcatgaataatattgttccaacaacacaaataaaaaattaaataaacattcaacaatactttgattgtataatttcatatataaataaacaatcaatatgagacaaataaattaaataagtttatataactaatcacacattttgaatagaaaatataaatacacgtgctgatattaatactaatgagacttacggagacccgataaggcataaaccaatatttcggtactccatctggggttgtttcacgttctttcagtgtcagtaagtgtgcatagcaactaataacctgcacaaatcaacatgccactaagcataatctgttggtagtatttttttttcttctaataatgcttaaaacagataaatactaatgaaaacatttactgaatcatttatttccatgccaggctttaagcaaagtagttggtgccaaaaaagttcaagtttttgaaatttcacaaatgggttcctgccaatgagacaatatatggtaatactaatacacagtcttactcaaccaccaatctactaatttcagactaacccttaatcaaaatttttaccgaaaacgaacattgccagcttaaatttaatctcgattgttggctccttcaactggaaagtgtcaacatacatttctttgctagagtggaatcgttttgggtcttttgatacgcgttagaagcaaggagaactttgatggccgaggtgcattgatcttcatgaccaatgtcttctaccattgtctagttcacagggtcaacctcatattgattgttggtaggcgagttgtcaaactccgaatttcccgtgttctcacttccaaatagatcgtcatttgaagtgctcatcgagtcagtgtctttgtcggcctcctcatcatatctctcctcgtccttatcaataacttccatcagttcttttagtagagattgcctcaactccattaacacggagtgcctcaactctttcatcactgtttgatgcaactcgactgtcacagatattctcacttcagctaatatagatccacaaaactctgaaataaaagattccttaacctcgtcaatgatagattgcttcatagtgatgaagccctttccgatgtccttagagatgtcgactttgatagagtcaaatactcttagtagttcttgacatgtagtatcaaattttttatccctctctttcatttcatctcttaagatgcagttgcagcatctagaggctgaggttcctccctggttggatgatggaatggaagtgtc

SEQ ID NO: 124966 - DNA, 1515 bp, Cannabis sativa
  modified_base (1452)..(1456): a, c, t, g, unknown or other
tatataaaatattttatgcatattttatgagtaataaagaaaataagagctttaacatctaaggataagctaatggctgagtttggaatgattttaactgacattttctctatatgtaattttgtttaggtaattgattttaatcattgtaatcgtattgacaataccatagctcatcatcttgctaaaattactttaaccttagatcatactatggtttggtagccgagacttccaaatttttgtgagtcttggactcatttttagattatttgccctttaatgggaaaaatcattccttttacaaagttttagactcacaatgctttgtaaataaattattgaatggatatacattgagcataaaagactataataaaatttttaatctagtacaatgtcctttataagttatttccgagaaccttcctacatccaaattggataatggagttatcaaaattctatccttctatatatataataacaacaataatatataattatttatatatatggactataaattaattacatatggatggattggacatgaaatttcgaccaaaagggccatggttggtaactagtacataacataagtcggcactataaattttagttgtcaaaataaaaaatttaggactcgtttggtacgtcgtgttgtattatattgtgttagattgtattgtattgtattgtattatattagtattatttaatgtaatattatatttgatattgacttgtggtgagggagggataggaaaaaaggtgaggtcatgggttcgaacttaggaccttgaagctattaagctattaactgattgtaaaataccattacgctacactcaaaaaaaaaaaagacttgtattaatagattgtgtaaagtattaatatattttcaatacactcgaccttaataccatctacggatctgggtctgggtctgagactgggtacgagtccggggtctaatctagggtccgagtccctggtccgggtctcgggtccggtctgggtctaggtccaagtcccgggtcagggtccaagtaccaggtacaggaccgggttctgattcgagtccgagaccgggtccgggtccgggttcgagtcccaagtccgagtcctgggttcgtgtcccgggtcccaggtctgggtccaggtctaggtgctgggtccgggttcaggtttgggtcccaggtctgggttcgggtccgagtctgagtttgggtcccgggtccaggtccaagtccgggtctgagtttgggtcccgggtccaggtccaagtccgggtctggattcgagtctaggtcttgagtttgggtcggatattggtgttgaccccgaattctttgtaaataatacaaaattaatacataccatttgttatgtattaaataatacaacatgggctcttttagtacgctgtataagggtcgtattgtattnnnnnataaataacactatgtttggataaagtaatgtattgtattaattattacgatcaaaatt

SEQ ID NO: 124967 - DNA, 1573 bp, Cannabis sativa
  modified_base (530)..(555): a, c, t, g, unknown or other
attatttaaattatttttgaataattattatgttgtgaaccaataaatttttaacatgtggaaattttaagaaagacaaacaaagctgttaaattagatacctacggactaacgagaatgtcgagcttaggaaatataagcataattttttgaaattaggacttatctgcatcaaactaagctttttgggaattaatttgcatgaaaataattttttttgggacttataccatacattaatatcaacacgtaacattttagggaggaattaatggatctgttataaagaagaccaacagacctataagaacatcaaatttgaggactattgtcattattttttgagattgaaaacttatcttcatcatacaattttcccatctctaaatttaagtatactatattattaaccatattttcaaaattttaatttctacttttggtactaattaaaaataatttgatcaaaaactttaatttgttgtttggaaacttgtgttaaaataaataatcataataataataataannnnnnnnnnnnnnnnnnnnnnnnnnataataataataataaaagagtaatttgcggtataaacacataagcttaactcccaattacaaataaatacttaagtttaatttttggcggtaataatacttaagttatagttttggaactctgtaggtacttcaccgttaaatattaagtcattatccacgtaacattttcttattggtacatttaaattattttttttaaaaaaaataaaactttcatgacttggaccaattagaatttgccacgttgcaatttatttaacacataacagcaggtgtttacaaaagtttcagaatttaaacttaggtattattaccgccaaaaattatataaacttaagtatttatatgcaactgagaattaaacttagttatttataccgtaaattactcttaataaaatagctttataatatgcaacttcccgagtaagagaatacacaaacttgatttgaaagaaaagtcttaagtgaagagttaatccgaactgaaaatttagcatagaaaaacaaagaacaaatcaactttcatacatcacccttaccttttcttttagagcatactatttttttcccattataaagactccaaataaaatcaaagacacgctattattttttctgttccttgtgagtggagcaaccagatttctttgggaaaatgataaaagtgtacttttctatagtataaataaataatactattggattatagattttgttttttttttttaatttttttacattgatataagattttttatgctatatttttgtaaaactaaagataaaaatttcatatttgtaaaataataatatgttttgccagaaaagtcatcggcgtcagaaaagtcggtatcgaaaaattgctgaaaaaattagtgacgccaaaaaagtcaccgttactggaaaagtcactatcgccgaaaaaagtcactggaaaaatcactaaaaataaatgtctcagatataaacaaaaatagaaccgattttactacataatgaataaaaataaataa

SEQ ID NO: 124968 - DNA, 958 bp, Cannabis sativa
tttagtaacactttttttttaacttaataaaattaaaaagtaaaacatttacaagtgttgcctcctagagtgttgccaaaaatttaggtataaaacaacacttttataagtgttaccatatgttataaacttaagacacatattacaacactagtaataaaaacgttgtcatatcctttttcttattttaataattataaaaaatgaaaattaaaatgttagcaaattttttcaaaaataaatattttgctaaattttatagaattttatactccattaaaattcaatattttgtaagaaaatgagaaaagactaaaaattaaaaattgtattatattgaatttctgaatgtaattaattacaatttatttttatacaatcaatcacatataatgtactgataataagaaaatctaattaataagaaagtggaaaaattttaataatgaagtacaacaaaaatatctatttcacttttgacttaatttagttctttcggaaagctagatataatccatataatttgttcatatgctccgaagattgattagctgcttcatcaatggatatcctataaagaaaacacaaaaataaattattagtatgaaataatatatactttatatataatacccaaactgaacaattagaaaataaatttaaaaattggcttggaactttatatatattatatatgattatggttagtttatttctctacgaataattaatctcctcgtaaaaaataattacaatataaaaaaaattacatacgcaacaagcataaaaacagaacacaataaaaaagaatcaaatcagatatgaactaattaagtaataaaaatatataaactaccttaaattgagctcacacttatagttctcttatatatgaatttgatgaagagatagattcatctagctttaaaagtggaagtcaaaatgtccaaataaatta

SEQ ID NO: 124969 - DNA, 1255 bp, Cannabis sativa
  modified_base (89)..(104): a, c, t, g, unknown or other
atgtaaccattgaaacctcttcctctttaattgtactaagtttttttttttttaaaaaaaaattccaatttatattcttaaaaaatatnnnnnnnnnnnnnnnntaaattatattttaaatattatatgaaaatttcttaaaaaaaaaatacataaatgatttagaaaaaaatatgaaaataaaagtaaaataagtattaaaattaacataaaataatatgaggaaaaaatttaaaaaaatattcaaagtaattttaaaaattattaagtttattttttttaataatgaggtgtacttataattttatgaagtataaataaaactcccgtaagaataaataaaatagagttaattatttagaaccgtgtgaacaagtaccacttatgctttttattcatcactcagtattttattttatttatttactacaagaaaatgaacctattttgccacaaaatcattatcatcatagtagaactattttttgtttttttttttgcaacgattgtaataaatcttttttttttttaaaatctccaagtagtaatagaatattttcttttcatttttaagagataatattgtttttttttttttgaaagagattagtaacccagaagaaagagacaatgagcactggttacaaatcaatgagagagagaacaaatattgttccgcagaaactcttcatcagttcctaaagcatctctggctagattgtgtgcaaggatgttgttggctcttggatgatacataaccaagatcttcgggaaggaagataaagagttgatgatcttccaaatgagacttgagagggctgagagatccctttgtttccttataattttaagaaccaggtcttgacagtcgatttccacaatttcaatggggaagtggactgcttgacaccactgcaaggctctgaaaagtgctttagcctctgcaaaaataggtggtaagcctaacgtggctgaagaagaaaagcaagctataacctggctgttagagtcttgaatcactgtaccatagccatgtttgttttcctggtatttcgttgttgcatcaatgcttaacttataccttcctatggacggagtcagctgtgaaaaaccgtgtttttgtaaatgtcaattatatttaagaaaatataaacctgtatgcgcctgcagaagcaaaaagtatttctgctacaggcagaatataaaatatttgcagaaaaataaataacttgacacaagagatttatacgtggta

SEQ ID NO: 124970 - DNA, 1002 bp, Cannabis sativa
tttagatcagttattttttttaatattaaaaaatatttaatatttcattaaaaatttaaatgcaaaaaaaaaaaaaaaaactacacacaatagttttttttcttctccaacaacacattacactcccataaaataaatcataacattaataaaaaaagtttcatattctaaactttaataatcatttcacttgattatatatttagaatttcttttttataaaagatctgatcattaagtttagaattataaacttgttttttttttaaatattacagtaatattatattatatattattaactagaaattattataatattataaatattataatttttttaaaaaatatataattaagtgcggattggattggattggttactttttgaggtcaaacaagatccaatccgcacaagtgcggatttaaaatttttcaattcaatccaatctacacaagtgcggatattcgtattttgcggattggattggattggatcgtactttatgaacaaccctagtctatatcacttttgagggtcaaagttgcatgtaccatattaattttttctttcaataataataaaaaaaaatgctgacaccaaaattaaataaattaatctgaagtatagcaactaaaattaactttatattttgaaaaaaaaactctaattgtcatcatcatcttcatcgaacataacatccaaatccaaaaaaaaaaaaaaaaaccagttcactaaatttgaaagtgtttgaatgacttgtttgcactatacttgaaatttgaaagtgtccaaatgttcttccttcttactcttctcaaatcccactccatcgctggagaatcccaacaatggcggtgccctgttgtgatattttgcacacgcaagtgtacgtatcaataacaactagtaaactcaccaagagtgaggtctatcccacgagaattgtagttaaggacgataaaattaaacttttccttctatttagttgaataaaaatt

SEQ ID NO: 124971 - DNA, 706 bp, Cannabis sativa
  modified_base (655)..(665): a, c, t, g, unknown or other
ctcgcacgtacattcacttagtatatttttaaaaatataaacattatcaatttttaaacttttaattaatttatactaaataatatctattttaactttactttttttttcttctaccccatattaataactagtaaatgtaatcgctctttgcgcggttatgtaaaagagtaaatattaattttaattctatattttaaaatttaaaaaacaaatcgagtttcgagtgcggttatattttgtttagtaatactttttgtagtaataattttaatattttctatatgttaattttaataatattaattagtaacaaaattgctaaatttgtgttatttatttcactacaaaaaatcttactatagatcatagagttttattttttctaaatattttacatttaataaataataatttttaaagaattaagttattgtagatatatattattatactgttagtttttaaatggtatattattatgaattcaaaatatatataattattgacaaatttattgaaaattcatcatatgattttaaaaatattatcattaccgtatctcacttgtaattgattttccgttcaaaatcgttgtcaacacattcaaattatgtgttttaaatattttcaaactgttatagtgagatttctnnnnnnnnnnnactcgagaccagactcctatttaaaggacacgtgtattcag

SEQ ID NO: 124972 - DNA, 548 bp, Cannabis sativa
aaaaaaaaaaaaaaaaaacgtgtaaactggtatagtaaagaagaaaaaaacatagtattattactatttttataaattattttaaaaatgtattaaaatttctctataacataagcttaaaaagaatacaaaattttttaaatatgaaataagaaaatattttttaggtacacataaagtttagctggtatactaagttttgtttgaattttaaagtttgaatatttgttagttaattaaatagaaaagaaattaaaaaaaaaattatttgctttttattgtttcctttggtaatggtaaaaaaaaatatgttttgtatatattaaaattatcattttgaatagtaggtcacacaataatataattttaagctcaaataattaatgtatagctgatttttttttaaaaaaaaaaaaattataaaaatgagatagatagatatacataaaaaataatggttagtaaaataaaggaataattacataagacacaattttttgtaaaatatttacatttttacgtttaaagaatatttttttttacatttt

SEQ ID NO: 124973 - DNA, 2180 bp, Cannabis sativa
  modified_base (1612)..(1613): a, c, t, g, unknown or other
  modified_base (1732)..(1737): a, c, t, g, unknown or other
attattaagagtacgtgaccagtgatctatcctatctggaagtgcaagtgtagtagtcgtgggaccaaagtcacgtatcaagacacccacttccacttccttactttattgccttgtcttgccaccactctcatccctctcaatccctactactccctcctccttttccacctttgttttttcattcatgtacttgtacatttggctttattatttttactcttttcattataataagggtgccaaaacaagtttcgatgccgtacacaaacataaatacgatataaaatttatgggttagagttagaaaaattgaacgtggattgaaaaataggtcaatacgaaataaaatcggatcaaacacaatacaatctgcttaatatgaatttaacacgtttgatacgatttttttttaaataaaattgtttgatatagtttttctaaataaaataaaataaaaaattattattaataatataattatgtaaaaatatatatttagtgatttaattttaagttaaaaagaaaattttaatttaatttttgttttaaaaagatattgaaaatatttttaatttttattacatatatagaaaaactaatagaatttaaatttattattttctctacaactccaactataataatcataaaacgagtcaaagtgaatgaacacgaatacgacatgatttttacgagtcgggttagatcagttgagaaaattaaacacgaataaaaaataggtcgacacacctgacacgaaatataaaagctagtcacacaaaatatgacatgttgtgccacctctaattataacccacccaattaatatatatttatcataattatgataaatataggtcccatatcttatgttaattgaccaaatatttgttattaattatgaatgtaattatttatttaatgttttttctttttgtaaggatttatttataaaatctaagtgactttgttaacgtttttttttttcagtttacgccagcataattcaaatataacactaatttattttttaaagttaaatttggtctaatttttcaatctatgtgaaaaggatcttttatattttattgtataaaatatttttttatagttctcgttagacatggaagtatggatgaaaaagtgggtaatatacatggagtgctccctctccttctccatccttttctctatcgaggcggggcaggctcggactgctcggtaaggagtctccattgggacaaataatccttatggtaatttacttatttaaaaataataaaattataaataaaaataatgtaatatataaaaataataataaaagaacacaatatactatattcataatttaatttttaatgtacaaaaaaattactaatatgctttaagactcataaagaaactatataataattaaaaatataaataaatattttaaaaaaaaaagtgtactaatgaaaaggcataatttttaaggacaaaaataaaaagaatgtgtaatttttgtgggaaaaaagtcgagatttgcggaataaaataaaaaaaatatatgaatatattgaaaaaaaaaaaaaacttagggattacttcacaaatacacaaaaannacaaaaaaaattacaaaaatacgatttcacgaaattttaaaatttcttttgattttatttatagaaaatacaatctttttatgttgtactcttattgattttttgttatctgtatgttnnnnnntgttgttgttttgatgttatttaaatgttattttcatattacttttatgtaattttcttgttgtttttataaaaaatcgtaacaatataaaaaaaaaaaatctttaaaaatttaattttttacaaaatactgtacctcacaagctgccgtggcttggagtgagtaaattaggcccatcatatttcttttaaatattaacagtacttggacattgttgaactaaggaaaagcccttcccaaccttaggcatgggtccatctaaactaagcccatcttatgcatgtacttttatctgttgggttgggtcttccaatgggagtaataaataaatttgtattagggaaatgtacaaaaatattgtttttttaccaaatgttttcaaaaatactgggacacggcaaactttatatttttactgctcaagcccatttttatttctttta

SEQ ID NO: 124974 - DNA, 636 bp, Cannabis sativa
cttgcaaatagatctaagatcctggataaatataataccaacaaaagcaaccatcagagtaggatccatccacgaccactaagttctttgacaaaatcttgagagattcgacaggcaccggggaggtattggaactttgaactgtctttagaatagccgtaataagctcttaaaaacgattagtaatagccctccttgcctgatcgatgctccagacagcctccccatggtgtacaatcctgtttctaatattccaaatggtctcgaaaatgatggcatagcaacccagcatttggccccttaattcggcattaactccttcacacggcttgcagaacaactccggtatacttccagctgagactaagttcaacctcacaggaaaagggctactgaaccaaaatgctaaagcaaagggacatttaacaaataaatgaaatggattctcagggccagagtcacaaaataagcacttacatgttgcagagttaaataagtttgttgtgggaagaacatttgcacagactctccaaagcatcatgcttaggcgaggatgaatactggacttccaaatccaaccccacaacctgttagtgtcattgaatcggccaacttgagcagcccaatacgctccct

SEQ ID NO: 124975 - DNA, 537 bp, Cannabis sativa
aacacagtatacagcagtatgaaacttataaaaaaacacagtaaaaaagtaataaataccgcctggcagtatttttgtaaaaaaatggcaaaagttagtataccatgtaaatttcccatcctttttgctgccatagatgcagttcggcctgtttggctatggtctttcaatgaagttctcgaggttattaaaaaaaaaggttagaaatatgtataaaaaataaagaagagaagttgcatgccgtttgcaattatttattttgaaaagggaatgaattacaatcttttagcgatagataataaacaaattgtcctctgtgacaaaattcaatagtttctgtttgggaaatttgaatttttatgcattttataaggaataatttgttaggagaaccaataattacggtaattttaaaaataggatacttttacaaaaacccctaaaataccctcataatttctaactctttctctctccttctcatacaaactctctctacccacttcgcctgaaccgaaccgcgcgacccccacctcc

SEQ ID NO: 124976 - DNA, 1188 bp, Cannabis sativa
  modified_base (57)..(66): a, c, t, g, unknown or other
gtaatccaatgacttaaaaaaaatgtaaccatgatggttataataaaaatgtaaccnnnnnnnnnncttccatatatatatatatattgagtaatccttttgttctgattatttacttctatatttggtttgtttattttgagtttggttggcttgtttgtgccatatttttagctagtttgtgccattttattttggctattttgtactacattatttggttagtttgcggtagattgttggctcaatggtttgttgatacaaattttaaaagtactattacaaattttcacaataaattttaattttgttttttaattttatttaaataaatttagagatatgatatttatattattttatgtcattatttttttatcttttacttgtaagctaatttagttttgttacctttttgacaaaatacttaattttagttagtatttgatgatttattaaatttgattaatttctcaaattttatatatggtgcaggttatattgattagtatatttttgcctttaagacttagctctaatagttgatcataacaaattagtttcgatacaacagtgacaatcttaatcaaaaaaagccttcaaatataagttttcttgttaaaataaaaattgtgttttatcttaatttaaaaattcaatacattatcgttgtatagtgtgctaatttaattttctctatttatttgttttgtatgtagttttggtcaaattggttatttagatcaaatgtctcttgaaggtggtctcaagttattttgtctaaatttttgagataatttgatcttatataaatcgctttgtttgtagtaattcaaattctgactttgtatatctttagctagacaattagcttgtgtgccggaaattccattctaatcactctcaaaaaaaaagtatgacatatttaaaggagtaatttgcggcaaaaccccttatgttttaatttttatacacttaacccccttatctttatttttggtggcaaaatccccttatattttaatttttatatacttaacccccttatcttttttttggtagcaaaacccccttatattttaatttttatacacttaacacattatcttttttttggtggcaaacgcccttatgtttatttttctttgcaaatttgacacaccagttaaatattaccgttaaatatca

SEQ ID NO: 124977 - DNA, 1086 bp, Cannabis sativa
ttgaagctacaatagtgcctaaccttctttgcaagcttcataaagctctgtatgggctcaagcaagctctcgggcctagtttgaaaggctgaactcttactttgcaagtttggttttgtctcatcaaagtcagatcactccctattcattcaacactcacctaaggctacaacattggtcttagtttatgttggtgacattatcatcacaggcagcaacatttcagttttgtctcaatttgtctctaatttgaactctgaattttctctcaaggatcttggtgaactgaactacttcttggggattgaagttcagcacacttcagatggtttgcatctttctcaagggaaatacattagagatctgttggtgaaaactcaaatccaaggagccaagtctgcatctgctcctatgaccaatggcctcaagctttctgcttatgggagtggtcctgtagaagatgttcaaccctataagtctactgttggagctctccaatatctcattacaccagacctgagatctcctatagtgtaagtaaagtttttcagctcatgcaacatcctctgcaagttcactgggttgctgtcaagaggattctaagatatctcagtggcacaatgagctatggtcttcatctaaagaaacctccacatactgaaattgctgctttctgtgatgctgactgggttgcagacattgatgtcaggaggtcaacttcaggctacgctatctactttggctcaaatcttgttgcctggtccttcaagaaacaacatactgtttccaggtgaagtactgaggcagatttcatgtatcttgctcatgttgttgatgagataacatggctccattctcttctctctgagctccatgttcctcttctcagaactccattagtgtggtgtgacaatctaagtactgtgatactcactacaaatccagttctacatgccaggactaaacacatagaacttgatttatatttcgtttgagagaagattctgcaacatgttgttgacatcagacatgtcccaacaatcgatcaaattgttgatggtcttaccaagtccatttccaacaata

SEQ ID NO: 124978 - DNA, 1567 bp, Cannabis sativa
  modified_base (1540)..(1541): a, c, t, g, unknown or other
ttatttattggactcacaaagctttattatttctttttcttttttgttaggtattggtccatttatgtatgtggccgaaggtgaatcttatattcaatggtatatatataaatataaataaaatattaagtagaagtttaggtggtggaagaaattttgggcgctgaatatcccatcaaaagtcaaaaattttctttagagagccattcatgactgcttgcctgtggctgatattttacatataagacacattgcggattcccctatctattctttgtgccaccgtgataaagaaacgattccacacgctctatttttttgtatccatcccaaacgtctttggaaagactctgattttgatctcagtaatcacataacttggcatatgactcttaacaaacagctacaacatgtctctgcatcatggactctcctttaccttgagcaatttgcaacaatactatggagtatttggagtgagaggaataaagaaaaacataacaaaaaccaaggccgcatgatgttcttctctacttcgcttttgcatatcttgaagagttccaatcagccaggcaatccatgaaactgaacacagctggttcctcttcctcaatacatgttgtcaacaaagattcaccttggataaatccaccatcaggtaggctgaaattgaacattgatgatgcggttaacagcatgaataactcctctggttttggtgcagttcttcgtaacagcagtggcaatattgttgctgctatgtcgatgcctttcccaggtacctttaaactggaagttatggaagcaatggctctaatgtatggcttgcaatggcttaaagatcttcatttaccaactcactttattgagaccaactctcttttggtggttaaaggattacaatcctctcacgcttccaactctgaatttcattatttgttagctaatatttctctcttagtgtccaatttttctggagtgcagatttctcatgtatatagatatgctaatactgctactcacttatagcaaagtatgctctcttggtggactctatttgtacttggctggaggttctaccgccacctctaaatgcttgttgtattataaattcttgattcaacataatatgcattttatctcaaaaaaaaaaaagtttatgtggtattggtaataacttttattttttaaaatattttaattacaaaaataaaaataaaatttttgtttttaaaattttattttttaaaaacaaaaatgtgttctataaccacttttgaattttatatttttgacatttttattacaaagaagctttatatatcccaaccatgtgctaatcattatgaatattgaacaaataaaatcaaatccctttgattatttaggataaaatacaataaacaacttccacattgaattggaccttgcttattttattgttatgttagaaagggttgctatgtctcattgaacttcacttattttgttgttggccatttaatttctgaatgtttgttctgttgggttttatgccctnnataaaactctttacaatctgattagt

SEQ ID NO: 124979 - DNA, 819 bp, Cannabis sativa
tttctttggattttcggaagcccagaccccccagggatttggggaggcagagtttgtcccaggcttttaggtgaattcctctgttacccttctcggaaccccaccagaagtcacgcaccattccatcaatcttcctggcaagtctattagaaagtttggtagtttgcatagcatacaaaggaagagctaagccgacagacttgataagagttgcacgccccgctttagatagagttttagctttccaaccatgcaatttagtcgtcaggttatccagaataaagtaaaaatctgcatccttttgtttcgatctgaatagaagaagctccaaataattaacattaccctctggccaacctaaacccaacatctcccttatacgaattaaaagtttattgtttctccaaatttatatgtttgaaagttaaaggattgttttgttttaatttgtaaaatctttacatgctctaaagagaatgatcaacaaagaaatgtatttatttatttttatttttatttattatttctttttaaaatgtattttagcttttaactaaaacttatcattcaaattaagtatagttaggatagtacttatttattatatgtcacagtaagggtgttaatagattggtttgatttaaatttttatttttgtttcaacaagtaatacttatttttttaaaatttaaaactaaacagactaattaaatgctcaaactaaactaaattaattcacttaaaaatatattgatttggtttgaaatcataattcgtaaatattctattttttgtttactgttataaatattaataatt

SEQ ID NO: 124980 - DNA, 831 bp, Cannabis sativa
  modified_base (804)..(805): a, c, t, g, unknown or other
aagatctcagcccgattctccttcagttgattggattcttcacagtcttacacactatgattgagtgccaacttgttatgtgtcggcatgtactcattcactataaaggacgaaatattgaagagaaagagagagagaaggatttgatttttagagatagaaagagaatgctcaaatttcgactgaaggctagtgaaaggttaggcttcatcatctattatcatccttcaatttaagtctatcactatctatttataggaatccttctaggtttaggtttgaattatttggcattaaaaattgataaataaatggtaaaatcaagaataagtgaccggccataggatctgggcccattgagctgagaaaaccattgataaaagagagcttttggttgctagaagtataaggaaatctaaagaaaaacaattttatttatcccttatttctgcagagaaagtaaattatcacaagattgtgtggcacaagttaaaagttccaaaataccattttattttgtggtaggcggtcaatgagcatcttctaactcgaaatcttcttgctagattcttgaccgtggaatcgccttaatttatgcatggtatgtggtttatttcctgaatctcacattcacctcttctttacttgctttttttttttttttctagatttactccaaaaaatagctacatttagtaataactatttagtcacaacataaattttttgggactaaatccgactttgatcacaacaaaaagttacttgtgactaaaacctaatatttagatacaagttgtcacnnatttagttttagtcacaacaaattgt

SEQ ID NO: 124981 - DNA, 3025 bp, Cannabis sativa
  modified_base (525)..(526): a, c, t, g, unknown or other
aaagaaaaaggaaaaaaaaaattattttaaatagttattttttttattttttaatttttaatatttaaattattaatattatgtggaccaatgaaattttaccacgtgtatgcttgtgtatatcgtgacagttaactttgacactttaaggactaaaatggacaaaagatgtaaatcgggaaattcaaccctaattatttcaatttagtgattgatcgtgccaaactttaaagttaaggaagtttgagctcaaattactcttcattcttctattagagcttatttgtgcaatgtttgttgttatgataaatacgattgatatttgatggaagtatattttcctctccgctagagacagttatgtaatttgcaatttttttctaaagagaaaataaaagagataaatacatataaataaaaagctaattagaattttcgttccgtaaactttgatatgtaccaaattatgtctcctgaacttttctagtcgttaaatttttttttcataaactattgagattgttnnatttaaggatttttgtcaattttctttcaattttactaatccagtgattgtccatgtactaaatcatgttcctcagattttgatagctatcaaatcatgcccattgaacttaaacatatactaaatcatgcctcttgagctttcattcatattatactttccttactaaaattagacataagtttttaaatctaacaatcttaatagttcatgaaaaaattttaacaaccttaaaaattccgagatatgatttaatacacgtcaaagttcgaaaaaaaaaatatactctaattagcgtaaataaaatttattttatgaaaataaaaattacataaatttttttcgaaaattattaatattaaattagaaaatattagttaagtacaaaaaatatattatatatatttttgacaaaattaaagactaatttgccaaaataaagggaaatttacaagatatactaacttttgtcattttttttataaaaatattgtcaagcggtattttttacttttttactgttttttttataagtttcatactgcaatatactgtgttaagtttttactggtgttctattagtgtattttagttgttctactattgttttgaattgttctaatttgtttttagtggtgtgttacaaaaatacagtatttttgaatatatttccgtatgagggtatttttgtaaaagttaaacaaaattatagtatttttgtaagtttccaaaataaataaataaataaacaaataaggaaaaaaaaaggtttggtagcaacctcaaaaacctctctcttctctcccgtcccgctctcttgtgcccaggccggtgcaacagcctccgccgccggtagtcgaaatggaccctatcaaggtccccggccctcaaaacccataacactttctctcttctctctcccgagccccctttctctggtttccctctcagctgcgtggcgccgctactccgcccatccgggccagctccggccctcccctcccggtccgattgaacagcaccacgggatttctcagtctcaaaatactcttctcttctcttctttctttgctagttcaatcgctacaccacatcttatcaggttctctctgttcatttgcaaatgtaaatgctagtttcttgcgtgggacttgtataagtttgcagattacttttgtttgatttggattaccatgattgtgtgatgggaaatatgatgtaaacgttgaattcgttttagtagagtggatattagtttgaattgtttaatgtttaattgaatgctgcttaattatttgaacttgttccggtttgcttgtttggtttggggactccaaagatttggaatgatctgtttaagttataaaacttggccaactgcaaaagattttatacaagtggaaattgtggttgaaaaaaactcacagaagatcatcctcattagaaaggtaattcttgattgtagaaagttgtgacatttttcaacatgagtttcttgtattctgcatgattaataaacagagtaaggtttgaggacttaaaatatttttgtcatgtaaagcttcagttataatcaacgtttgaaatgtttcagagaaattttactttcattttcaagagcaacaaaatgatgaatgaagttcatgtttgttttttggtttttgtatttgagagatgatgttttagtttgatgcaactatcatgggagtacaaaactgttcttttatgctaaactggtttatcttatggttatgattaaatacaaattttcacaaccatatatggctactatagtgtcatgtgataattttttttggtcttaaatcactatataggatggtaaggcgttacaaatattagcaacagctgtgcggcttgacatggagaatttcttacagaagaaagtttatcttaaggtaccactttgtccatgttacataagcctttataagattttactcggagatatcacttatatatgccatcaaaatgattttgattaaacaggttgaagttaaagtgaaagaaaattggaggcaagatgaagggctattgaagtactatgactatggagggcaaattaaaccattatgatgatgagaagagttgatcaacagagacgacaacaacaacaaaagctacctcatcctttttgagattgtaatttgtaagttaaattggtattattattattattatgagaagagttgatgtcttgtaatactatactagctagctttagatttttttatttgttcattttcattgttggagagtttcgaagaattttgtagttttcacttctttcacatcccatttttgctaaaaccgaaacggttcttgtagttagtagagtcttgagttcctttctttcttaaactctaaggcccatcagaactctaaggctatgttggtaggaaggagggagagtaggagagatggagaggatagttgttatcttttgtgttgtttggtattaggagtaaaagtggatggatg

SEQ ID NO: 124982 - DNA, 1603 bp, Cannabis sativa
ggctcaggagcgcttaagttcatgccgatattgcattgtatatatacaatttatgcatgtcttactgagtctgtcgactcattagttttctaccttatgtagataagggtaaatccaagctataagagtagtgagttgaggtccggcaaggattgtacatatcgcggcagtgcaacttggagggtttcgttcgtaccgcattttgagttgtcttctgtagctgacttgtggcttgtaaaataattattatgaaatatatatttatggtatgtgtatttcaatagtggtttttgactcgggatcccaacctatgaaattttataaatataattaaatatgtttaaatttcaaatttgttaatttttaagtacgggcgttacaattttagtatcagagctaccaggttgttcactgaatacgatcaagatatgtacaatcaaggccaatgtcgagctcaactcacaagtctgtaagttcttaccttttagtaaactgtttaagttatattgtaattatgtgtgacacatagtttaagccctaaatgcggtcttggaaatatattgaccactgtttaacctacatgccttgtgggttcgcaggctaagtcttagaatatggacgaccagtgaaatgtaagaggacaacacatgatggttgagacttgaggtggtcggggtgataggaactcccaaaacccctgtagatgcggcagaggacacaattgtgctaaaaaaggtggccaagagaattcaccccaggctccttttgactagaagtagaggtttgcagagatgcaagcccgaatcactcagcaagaggaggatattcggaggcctagatagcgggatgctcctattgagcctccttcgcaaccaccttctgttgtggttcatgcagtgccagcagaacaacctgtagctggcagccgtatggagcctttgtacgagcggttcgagaagcaagcatcttccatatttttgggaggttctgatgttttgaaagcagagcagtggttgacagtgattgggagaatactgaatattatgggagtaaccgaaaacgatagggtggcgtgtgccatgtttcaattccaataagacgcccttgtgtggtgggagatggggtccctcactcgggacgtcagcagattgacttaggaagaatttcgggtttgtttaatgccaagtattacaatgaggcaatttgcagtgcaaagcggaaagagtttgttgagttttttgcagggtgagaaaatgttagtgactgaatatacgaccaagtgtgatcgcttggccaagctggtttccgggatagtgcctacgaatttcagcaaaaaggaaaagtatttggtaggattgaacgctaagatcaggcatgatctagttatctccaacaacgatgctacaacttacgttgagatggttgataaggctctttgagtagaaggagtagtgaaatttctgcaggagacccgagaggtccctagtgttggtgggactactactctccctatctttggtcttggcaaggagagtgcactactacaatattagcctttagaggcagttttttcaaccccatttataaaaagggaagctaaagg

SEQ ID NO: 124983 - DNA, 1747 bp, Cannabis sativa
tgccaatggagcctccgaagtttcctgacttcaatctctacttcgtgaacttggcttccctcttgcagtcccgcctacactgcactgcgataacatcagtacattacatctcgcctccaatcctgttctacatgctcgtaccaagcacattgaaattgactatcactttgttcgtgaacgagccaagaacggtcttctacaacttcgcttcactccctccgaagatcaagttgctgattatctcacaaaactcctcactggctctcgttttcaagacctctgcaccaaactcacggtgcttcccaaccccgtgagtttgaggggaatgttaaaccatcaaaaatatctctctctatttccttgtattattttcttgcttttattgtatggtgacatgtgtccctcaatgagtctcctctttattataaatatggttgtactgcgtactcctttctttgaggaatagtaatacatttttcattccttctgacagcatcatgccttttattagcatttctcttttattttagttatcattaaagtcaatattatgtactcaaaattaagaagtactccataatatatggggaagatcataatttgtctagaattaatcatagatatgtacgtacaatagttattaattgccatgagagagagtgttacataatcttctacaaaactactacaacatacagcctttgttctgcattaatttgttacaaaagaagcctaattaaatcagcctattatgttaattggaaaaccgatgtatatatattctttggatgcaaaactaggaagtgtttgagtctgttgagaaccaatagataatttcacctgttctcatttgcatcggttgaattgtgtttggggtagtcaacattataatcttctagttttttaattgatgactatatgacacggatgaagttatgcatgcgtgactggtcctgtattttttttatatatatatcacgatgtaccagttcgtaagtactctagctatatattcttttccctatattcaagtaataagggtggccgtccaatagaacttggatatgatctttcctttctatccttatcattccacgaaaggattgattctttacctcataaaaaaaattatgcattagaacattataaaaaaaataataactttttcttggtaggaatattgtagaaaaggatccatgtatacaaatgttcttcttttaagtaaagtcagaaaggaataaaaaccttcctttattaattccaaaataaagcaaatccaacttcaatattccttttgcattccaaattcattattattactattattattattaaacgtgaataggagcacggtgtgtatataagagaggcaagagagcctcatcagatataacaaatcctgaaaagtcctttctaaagaagagaaaagattaaaaaaaaaaaaaaaacaaaacaaaaagagagaagaataattttttattaattatttggattagtagagaggcaacttagaaatattatacttttggtgtcttcaatttattgctattttctgaaatgagtactacaaaagctcaccacgatgcagacaccactgcaatagaaggggatagacccgatacaaacgtaagctttaaatggctatagactatagttagacttagatgtagttctgttttatatttttatttttttttttatttttctttttatttttttctctaaaacaaatatgtaatgagtgtta

SEQ ID NO: 124984 - DNA, 809 bp, Cannabis sativa
attccacgtccagtttaactgtcacgagtcatattatggtatagctgagcaatacggtactatggaagatagggcaggtcatatagatgcgagctgggatttagaactaatcgaaccttttgatatattcaagattacaggctgtagggattttagtggatactatggtccctctaccccttcgtctagtgataactcgccccctagtgactttggtaaatcccttaggtgaaaaattgcactcttaccccttttttgtctgcctttttaataattgttttattttgttttgtagacattggcagttttgaagatattatggatcgaagagggaagaagaggggatccaaccccagggtcccctcaattggcgaggtggttcctcccaaaaagcacaagaaaaccactgcccatagcaagaagttcttgtctgaacctattgatctctaggtttctaatgacgagacccaagaacaagtccctcctccggttgctcctaacaccaatgctcctcctccggagatgacacatgcctctacttcctcgagccgggtcatcgagaccttatcaaccgccgcagaggaggatggatctaaatttgcccaggcgttcggggttacttcctggcgtaaacttcaggctctcctttctcctgactaggatttactcaagctcgggagtccagaagtaatgctctcacaaagcttggactacaaccttatggtaagttggccttattattacgatttattttttttccctcttctcttattcatatgcttataatttctccaggcttcttttgtctc

SEQ ID NO: 124985 - DNA, 1946 bp, Cannabis sativa
ttttagaatttatattaggatgttaatgaaacatacaaggtagtaaatctagatcctggtaaaatatatccaacacttacgacacgcatcaagttgaaaaactgagtttttgcaaatgccaatgattattacagaataatagtaaaaaatacaactatcacagtctgcagcagcagaatgtaattctatcactgcagaacacagtttagcataaacaaatcagaatcagaaatataaattcagcaaaaaataaaatcacttcacaagtttagactccctctaaaactttgccgcaatcctttgtaattcacttcacgaatctgatttttgaactaccatcaaacaacgaactccattcgtctttgatgtgtgagtacttgcttcctctcgaagtaaggcttgtacaagtcttctcccgaagacctttctcttgttcaatcaagttgttcaaagcgaccctaagactagtataagaacaaatacataagcactaaaacctagctgaaccactaggttctcacaaatagaactctctcatcaagaaagaaagatatgcaaaaaatgaaagcttgaagagttaaactaattggttgctctctaggttctatttatagaacatagcaaccctatagacagctacaaaatcgattttacagctgtataaactttcctaaaaaaaatcctaatttgtagcataagaatcgggtttctgtaacaacaaattataccagaatggaaacttgacaaataggtgcctgatcatgaacatggacttcatacctgtcaaaaatagtgtgctttatctaatcttatcaagacacaatcaaaaataataaagagaaagaggaaggttaaagtttccaaataaaacaaacttaagagatttctttttcttacaagaaatttccaaaacaagaaaattaatagctaaaaaagaattctttcatttgaaagaaaagagcaataaagacacaaaatcaaagtgaacaaatcagtttaattgcacaaggaaaacacataataaataaaaaatattttgacacctaaattgtcagaaaatggctttacaaaagtcattctaaaataacaaaaattcaattaaaaacataaaagataaagatagatgagaaagaatattgtttggattcctccaatgttgtcttctgctcctagccttcctcttatgttcaaaattggtgtccaagtacgaatgattaaggaaacctagctccaactcattttatagacaaaatttgagaagtttcccgttttttttttttttgcaagagccgcgacattggatagagagtcgctgctctctcatttttttgatttcttgctacgataactgatagtattttggccataactctctcgagataactcagaattggacgattcaagatgttttagaaagctgaaagagatctcgaatttttactcaaagattttttcctagaagtgaataaatcatagtaaaaaatttgcttgaagttttaaactttattttcgatcacaaacggagtgtgttgaacatccaaaacttagaattttttaccattgtatcttaaaactttaaaattcatgctaaatctataaaattcatgttgaatctataaaattcatattatttagcatattttatctcaatttaatctacatgatatatttgaccattaaaacctgaaacaaaacgaaaacaaacgtaaacttgaataaaaagaaataaaaactactaaaataaactctaaaaatgcctaaaaacaaacctaacaaattctcccaaacttaacctttacttgccctcgagtaacgacgaagttaatgttgggattttatgccctaaataaaacccatttcaatgtaatctgatttgttatcaatagaagattagaaatcatttatgtttacatgtagtttttatgtttatggtttattgtgtacaa

SEQ ID NO: 124986 - DNA, 1580 bp, Cannabis sativa
gaaatccaaggaaagggttggaaccctcttcaacaggtcgcaggtagtaaaaaaccagtagtcttggaatcatgcatatagttcataatactggttgggcaaactagcgccctgtatcttttctcaagttgttagaagtcgactttgctcttgttctttcgcatgggatttgcttttacttgataaaagtaaaggatttcctcaagggatggaacctccaccttcttagcacgataaagcacgaactgtcctgataataacttgtagacatgagggatgaaccagaacggaccaatgcctacttccacgcagaagcgtgcaatatagctcctaagtggaaggtgtgctcccatctcaatatgggcctagctctaaacactaaaactatccacacacttgcatgggggttcccctaaaatagagagcttgttccaaaatacctggaatactcttgaggtcgcgatcctcttcatatgcacgaagggcctcgtaattttctaaacttgtttgtgtactagtccatctctcaaggagacatggagctgctacttcctcttgctccaaaacttcaatttcatcaactagaacaacttctaccatggtggaaagtgggaaagaacaaaaagccaagcagttatatatccacactaaaaaagatagaaatggtatgaagagtcctcccctaacactgcttggagaggtcccctccggactctacatccagaagcgaaattcttaaagaaagttatcccaggacgatcaaattgggaacacaaagaagaaataaaaagctcaagatgtgtcatctagaaccataagggctctagagagaggaattaattttagatgtgtttgttgctaaatttaagctatttctgcaagaaattcactgataaagacaagagattgcaaaacctaaaaattattataagcaatatgtgcgagatacatccctatttcagcaaaatgttcaaaattttaccaaacgtctaaattctattcatctatctcctaaagcaagtatgcaatcatcaagaaagaaaaataagacttctatactacatagaattttaaaaaaaaaaataccaaaattacttacttgatgttggatttggagagggaatttgaacgtcatccatcggtcctaaagaaatccctatcaaagaagtcgtcaaggcacacaagcttggtttgaagggagaaatctttcttgatgagcgcttcgatctctgcctgaagatccaatggttcttgtggtgtagaagaatcaatagttaacactgacgatagtatccttttttgtgaaacgaatattcagtcgtgcatgttgggaatattttaccagaatctagatttattatcaagtatgttgattcacatcctaaatatgaatatctctaaaacaatgaaattaaacatataagagttaagaaaacattacattggttgcagcggaatataatgattccttccgctcaaatctctaactcttgttcctttttgtcatacagtattatcaagatttgagcctagatctctttctctccttctggtttgtaaccaccgtcttactcactatg

SEQ ID NO: 124987 - DNA, 826 bp, Cannabis sativa
gtggcataattaaattagttaatgtaaacaattatttaaatttataatattatgattaagagaaattttattaataccccataaaataataagtacaccttaatattttaaaaaaaaaattaagctaaaaatagttttaaaaatcattctccatattttttgatttttttctcatattattttgtgaaaattcattttcataatttttttaaattatgcataatttttttcctaataacatcttacataattttttattttcatttgtttgttataacattaaaatataatttatttttatttgataaatatatttttttaagagtatgaaacagaatattttttttaaaaaaattaatataattaaaaatatatattttatgtaaagtaaaaattattaaaataaagtgtatttataaaattttgggtgtaaatattgtgaaaaattagtatacaattattaatatgttaaatttattgtattatgattaaaaggaatatttgaagctaagaagaattaaagattaccctttcatagactaaaataataattaagaaatttaaatttgattaattaagatttttgttatttgaattttaatatacacatatagagtcatacttttaattttttcaggttgttaatatcttttattgtgaattattaaaatttttgaatttaaagatttatgctgtctcatttttgagcgagttaaagtgcactcatcttattcattaaaattatttaattttattaacgtgacaattatccatatattaaattctttaatatctattttatataaaatgtgcctatataacagaa

SEQ ID NO: 124988 - DNA, 1497 bp, Cannabis sativa
ttcttgggatcaaaatctatagagatagaaagcggaaaatattagcactttctcaagcatcttatatcgataaggtgctagaaagattctcaatggagaattccaagaaaggacaattaccatcaagacatggaattactctatgtaaggaataatgtccaaagactcctcaagaggaggaggacatgtgaaagtacccttatgcatcagtatttgggagcttgatgtatgcaatgctgtgtacaaggactgacatatgctacattatagggattgttagtcgttatcaatctaatccatgtgtttggaacactggatagttgtaaagcacattctcaagtatctatggagaacgagagatctcatgcttatataatttagtggagaattaaatactaatggatatactaattttgattttcaatcaaacaaagatagttgaaagtcgacatctagatcagtatttactcttggtggaggggatgtagtcctgagaagcattaagcaaactagtattgtaaattcaaccatggaagccgaatatagagtagcttgtgaaacagctaaggaatcggtttggttgaaaaaaattctatattgctttggaagtagttctaaaagtagaaaaactactggtgctctattgtgacaacagtggagcggtggataactccaaagaaccaaggagccacaagagaggcaagcatattgagatgaaataccatttactaagagttatagtagagagagatgatttgacgatcttagagatcgcatggcagatcctttcacaaagacgttactagaaaaatcttttatgggtcacaactaagggagatgcccaattttcttttagggcaagtgggagattgttggagttttttatccctattttttctcacttgacgtggcatgtctacgtggccaacattggtgccacgttgtagtacaactcaccaagaagaaggccaagccatctactttataccaaaataaccctagctgcctccaacccctttgtcgcaaagaaaacaatataatcaaattactatttactacaaagtcaaaattgaaaaaatagaaaaagcaaaggaagatcaaatctcaaccttcttcccaaaaactgtaacaacatgaacttattgtccaccataattgacgtcctcaaccgcaacccaagctaaagtctcgtcctcgacctgaaccttcgagccttttttgtaaactcatcgcaggttcctgtaaaaaaatattaacgaaatcgaaaccctagataatagaaatggaatcaaagaacagagaatgcaaacccctagtgagagagaggagttacgagcatgagagtgattcgaaacaaaacgagtcgagacgagtcaaggtgaaaaccctttcccattttcaaaatctcattacaaaataaacggtccaaatctcactataatagttagatcccaacgaaaaaaaaatcaaaaaattaaaggagagagagagagagag

SEQ ID NO: 124989 - DNA, 958 bp, Cannabis sativa
  modified_base (42)..(64): a, c, t, g, unknown or other
  modified_base (561)..(561): a, c, t, g, unknown or other
  modified_base (782)..(784): a, c, t, g, unknown or other
atgtgaaccattcaacataaaatgatttctgatctttattannnnnnnnnnnnnnnnnnnnnnnaatgagttttatttatggcataaaacccaacagcccgtagacctggtgccaccatatcataggaggatgacctattaccaaaaagtaagcaacaccttattggcaaaatcccttgacaaaatagaagaaatgagagactaagccaacctaaagctataggcctaccaacaaaaggttgcaagatacttcaacaaacatgttaagaaaaggagattcttcctaggagacttagtgctctaaagagctctgttgaacaccaaagatcgcgcagcaggagtgttcacacctagcttggaaggcccttaccaagttacaaatataataagtataggcacctacaagcttggcaggtacaatgagaacatagagttagttctcctataaagatatttggaatggagagcacctttgacagaactaccagtgacaagcttgtatgaacactatgttggaatatattttaccaggatctatatttactaccatgtatgttattnaacatcctaaatatgaatatctaaaacaatgtaaataaacacaaataaatttaaggaaaccttacattgggtgcagcagaatattaatggctccgtccgctcagatctctaacacttgtatcctgtctgtagcagagtatcaccaagatctgaggttgaatgtccttctcttaattctggactcttcacagccttaaacactatgattgagataccacttnnngtgtgtgggaactcactctatcactcaaggtatgaaaatatgaagagaagaagaaggtggctggttcataaatagaaggaagaatagatggctcaatttttcgtgaaggcaagaaattgcatcatcttttagtgtgagccatcactatctatttataggcaaccaccaaggttt

SEQ ID NO: 124990 - DNA, 1493 bp, Cannabis sativa
ctcacaacacaaatacactacttaactcatagaaggcacatgctatgcgagaagaaactagcaaaaattccaatggaccctcgtatcaagctagatgaccaacaaggcgctcctcttgaagagccttcctcatatcgtcaactcataggacgattactgtatctcaccctatcaagactagacatcacctatgttttcaacactcttagccagtttttggacaccacatatgcaagcactacatcacctacttcattatttgaaaggcaatctaggagagggactcctctactcaacaaaattatccttgcatggcatattcatggcttctcaggttcagattgggcctcctgccctgtcactaggccttcgaccataggctcttgcatatttgtaggtgactatatcatctcctaaaacagcaagaaacaacctaccatctccaaaagctccactgaagcagagtaccatgtctaggctgcaactagtagggagatcacagacacctcatcattcatctactatgacaatctctctgacattcacattgccaacaaccccaccttccatgaacgcaccaaacacattgaactagactttcacttcatctgagacaaaagtaaaaaatccaccatacgcctcattctggtagctagttctctctagattgttgatgctttcaccaaacctttgccttcctccactctttcatcccatactaccatgatgtctgtatatgatatatagtccaccttgaggggagagggggtaacaaaattataatagaattttgtatcttgtattcatggttgttatatttgttaagtgacagctagttagatagttaggataggtaggttagttggttctttatttccctttcttacccttagtttgttagccttttctcttctccccttctgtataaattagtgctttgtacactacttgtattcattgagtaattttcaattctatatttttttatattttctctcaaagttttattttccgcaatatttgtattaccttaagaatgtaaaatgtgggcattagaacacatgaacccgcaatctcacttaaagattagtaaccatttctaaggtttataaataggaataagaaagaaggggtatcaagttcactgcttgtactaaatttttgccaaaattgtatgaagaattttcataaataatattgatttgtgaactagataaattcaattattgaactacgtaaattgtattgtttatttgtatgtaattttcaaagacaatattccatcgaatatatatacatatgtgtgtacactaatggaagaaagaaaaagcaaagacttgaacaagtctcaaaatattttgtctaaaaactttatttcctttctctcaaaagtatatgtgtgcgctaatggaaaaaagaaagagcaaagggaaaaaaacagaaatattctaaaaagggaaaaatattacaacaatactgtgggccggcccaat

SEQ ID NO: 124991 - DNA, 729 bp, Cannabis sativa
agagaacataatttagtatatattaaaatttaagtaaaaaaattactaattagccaattctaaatatataaaaaataaaaatattcctacaataattaataacaagagtgaaaatctcattgttattattattataataagatggtattatattttatttttaataaaaaaaagtccaacttattaacacgtggaagttggatgtatagagcattttgtgtaatggtggattattcgtcgtttaattgttggtgttaagtaaactattggttattgttgctccaaggatgaatcatggtgaggattggattgttaggttacagattttaataaagattatcccccatgggccccatcccatctacttttaccatcatggacggttgtgattttatttcatttaatttgattccattaccaagaaaagaaaggaaaaaaataaagcatacttttatacaagtagtaattatatgtatacacaaaatattggggaagttttatttacaattaaaacttaataaatgaatcttattttaaaaatttatattttatataggaatatatttaatcacacaattgtaattattttttactgtattgacatcacaataaataaaaatatcaatgtaataaggattttgacaaatttataaatcaaataaatgataatgaaataaacatatgaaccaaataacacatcaaataagtaatgaaataaatttatttctt

SEQ ID NO: 124992 - DNA, 1859 bp, Cannabis sativa
  modified_base (1804)..(1805): a, c, t, g, unknown or other
ttcttctctagttttcttataatcttaatgtaatacttttatttgtattttgagtattttgattgtaatcctcctattccctctgtaatgagaactttttcaacacttccatgcccgaaaacacattctaacatatttttttaatggcggtgttcgttatatatttacaacatcatccacgtaaattttcaaataatttacagtgccgaaatatacgtttgaagtttttaatcgcgcgtgttaaactgaaatatcaagaactctattttcgacattgtaaactattcagaattttttcaaaagtttacagaaataatactgtaactataatgaataccgctataaaaaaattgaaaaaaaaatttgatcgacatgtaatttcaggcatggagattgattaaaaaattgtaataagaagttgtaattaacactcatttacaaatttaaagaaataagatggacaaatatatagcatccataaaacaatgtatctccaaaaaaaaaaaaaaatcttgctttcctttttttattaatttttttatacaataattttagtggtttttttaatcatcttatttttattcttttaatttattttttttttcttataaatgaatttttttataataacttttgtggtttttttgagatcttattatatatatatatataaatataattttgtgtacaatatttttttttcctggtcattattttttattataattaataaattataagtaaatattattttagatcttatatattacaaaaattataaattagattttctgttttgttaaatgataaaataaaacctatatttttaaaactagtacaaaaaagatcttaaattcaattttttatatctttttttaataaaactaacttgaagataatttctaacacgaacagatgcaggaaattttaaccagttttgtcataacacctctaaatcagattattattaagttttgttttaacaaaaaaaaatcagtccagggtcctatttgtaccattttagaaaatacagagtctattttatcatttaataaaacagacggtctaatctataacttttacaaaatacagggtctaaaatggtatttacccataaattattacttggcaccttaagatgaccaacagtactatacatatataacactcaataattggttagcggtttctcatattattcactaaattaaaatttatgaaattggatatcaaaatgcaccactaacaatatgccaatatttataatgtttagcacattctttatattttccttatcatctccatggatgttgtaaaataatttgagctaaaagtcaatattatatttggcaaaattttataggaaaaattacataaatttttattcttagtaattgttttacacattttgaatatttttttttttatttttacggtgtttttaaaaataacaaaaaattacaggaaaataacatcaaaaaataataaaaaataataaaaaatcaacatcaaaataataagtgtacaacataaatataaatcaaaagaccgtattatatgtaaataaaatttgaaaaactgtaaaaaggtttgaaatttgaaaaactgtaaaatttgaaattttgtacagctatattttggtaatttttttgttgtttttatttatattttttttttaaataatcccaattttataatagatttacaatgcatttgtagtaaaattaatcattttttgatagtaaggtgtaaaaaatcaacacactactacaatgttagcctttagaggcagtttttcaacccnntttataataagggaagctaaagggtgtgaaaatacccgctatgttcgaaattga

SEQ ID NO: 124993 - DNA, 808 bp, Cannabis sativa
acatagaagctagacagagcagttcttcttgaaaaaaaaattcaaaaaaaatatatatattttcattagttacgatatatttttgtaataaaagataatatttatagacataatattaattttgatataataattaaattagaatattgcacataggataaaggtcctagttcaaattccaccaagagatttttttttaaagtttatttctgttccgtgctttaaaaagatattacgccccacttactttaaatcctgaatctgtcactatatttaagaatagattttaccaataataccaatttgtttgttttttcttttaattgtagttaatttctacacgttttataactatggtttagatgtattagggcattgcaagaaagtcaagtttgagagatttggttttatatatatagctagggttctgtggtgatgttaaagcagccgaccaaggttacttgtacaagtagttttagaatctttttctttgctaaatttatgatgatgagagaatataaatgaggttgtgaatttatgagtagtaaacttatgcacgacaatcacactaagtaggtataactagttagatagaattaattacttgtagtaaattaatgtagacaaaaataattaaatacataaataaataattggaaccaagatatatatattaatataggtagtgtagattgttgactttttcttatatttgttgtgtacctacttggctaaggctttactgtgtaagtctgtaagaccattatcccttttcccattcgatctcacaatatttattttgtaaaat

SEQ ID NO: 124994 - DNA, 943 bp, Cannabis sativa
aatcatattaaacactccagccgaaatacacattaaataataaaatatttttatcaattaaatatgccaaaaatggaattaacaaatgttatacttttatacccaatttattttagcgattagtactcaattaaattatcatatattcctaatttgtaatccatattcaatttatatgtattacatgttttttagtttgtacagaaaaaaaatgtattaaagttaatattgttctctatttatattattatttttaaattttatggaagattatacatcatacaaataataaaattcaaacccactattatacgaataattaatttatatatataaagtataattgattttttctattttttataactaaatttttactataccaacacctaattttgtgtaaagtttaattaaattatagaaaactaaatacgtgtatataaagatgtgaggaagtagacagttatttcctatatatttttaaaataaataaagaaaatgtcaaatgtaaaattacagtaataagtttcatcactttctggccacactttctaaaatttaagcggtaaaatatttccctaatatatagcgggaataatattttgagacaaattctaaaaaattacacaattcatttttcaaatttatatatatctctctcatctcatttgaaaaagattaatatctcctctcttttgaaaaattaagcacaaaaacagatctttctctatgttagtttatccttttattaatctcaccaatttttacatttgtatttgtctcatacacatcccgattaattgatggtattatatagaactatattgtgtaaaatttatatctatatttttctggtttgatattgaaaaaccgtgtttttgcaaatgtcagttgtatataagaaaatataaaaactgtaagcgtttgcagcagcagaaagtaa

SEQ ID NO: 124995 - DNA, 636 bp, Cannabis sativa
aattccgggtccgtagatacaactatattttgccccactatattagtccgaaacaacaacccatatctgcatataaatataatatatacgtatgaccatatatgtacagataacgaagtacagtattatatatatttgaacaaattaagattgcacgtaccttgttatttgtattatatgggccagtatgtatatttgtatttgtatgtatgtacgtaccttgttattctctttttgatgaaaggagatacatcatacaaagaatgtggagtgaaatactggagggtctcaccaataagagggaaacccatggaaccaggtggcaacttcccatttccattgcacttagggttctgccatctataaacccaatgacttatcaaaacaataataaaacctataagaaacatcaaaagcacccacattttttcgcacttcgaaaatatattgctaataattagcgacagtatactattgaatatataaatatatatatatttatatatatcaatgtttatatacaaattgaatgctttattatattatatggtttagcaaatattgccatggtacttctatatatatagatgtatttttaatgggcctgtattattcatgaatgagtaatattagaaa

SEQ ID NO: 124996 - DNA, 890 bp, Cannabis sativa
tgtgtgactacaacaaggaagatgagaagaaaagtctttgaacaaaattggttcttcatccttttttcacagttccttttcctctctttctttcttttgggttggattggtgaaagtataattacttgttggctctatttatagaaaactaaggaacagttaaaagaagttattctccttcttgtttgtatagctcaaaatatgacatttttacagtctttccttcaaaaagtaaaagtacgttattctctagataagatgttgctgataaaatgaggtgtccaactaactatggatacaaacaggaacctataaggtaaaaatttaataataataaaaaaagagaattaaattattgttggattatatcaccaagtttgagcctacttttgtatgttagtgatgatttcccttttgagttgctattggataacttagcttttttttttctgaatcaaaagataacttagctttaagtttgatcaaaatgataaataatgttcaattaaaagtctatacagcactaggagagatgataaagatttattcatagagtgctctgtctctttttaataaattgaacaaagacaaagaacacatcatacttttttttgttcttttaaagaagcaaagaaatctaatagaacttatcttaggttaacgggaaatgttgaataggaaatatttcactatccttgtttttaaaaaaaatagtaatttgtgatataaatatttaaatttaatttttgattacaaataaatacttaaatttaatttttggcagtaataatacttaagttatatttttgcaattctatgtacctaaccttaaatgttaagtcattattcacgtgtcattttcttattgatatatttaattaatttttttt

SEQ ID NO: 124997 - DNA, 783 bp, Cannabis sativa
gctcctatctgagatcttaaaggttgattctaggagttccaggcatttatcaaaatctccatttcatgcttgttaatgtaagaaacttttaaagagcagtaaacatcttcaattctccccgcagcaccttttgataagaaaaaatgaaatgaatagaccaagaaaaacaagcacatgaaacaaataagctgttcgatttaaaaggctatataataacagaaaagtaccttttatatctctttttagagccacatgggcaaagcgcattcctacttatttgaccattcttggccaaattagacttggcaatatctaatggtgtagatcccatcagtttttgcacctgaaatcaatagaatacaaaataataaatagttgagataatgagaagaagttcggttcacttcatttccaaataagtattaagaaactaaaaaacgtaatgatttcaccataaattcccaacgttcatatcttctataatatgagatatagcacaacacaaccacaatgcacatatatatgaacaagtgcaaaacataaaaaatgtgataaataaaactaaagagtagcagaatttcataggtcaagataagtgatacctcagcaagactctttggcattggtttcccttctttttgtaagctttctatcttcctttgtgcttctttagcccatgtaaactttgccagagcattctcaacatctgtaattgtgcaattacaaagttttgctgcctctttcttatgactgagttggagattctacaaaacataaggtcta

SEQ ID NO: 124998 - DNA, 911 bp, Cannabis sativa
gtggcatgtgtgaggggagaccagaagtctacccgtcactgttacaacatggccttatcgaaggctaaaaaagagaagatgcttgccaaaagtctaaacaaaaagccctgtaaggggcaatgaggtctagcccaaggtagggacacagacatagatccttgctttggggatcctgtaggaagcttcagacctatagaagagttggaagaagtggaagtcgatcccactcatccaacaagaagactgaagatcggtacaagtgtacaagtgtgtacacatgggccactaaaaatttgcaacgtgtaccagtgtgtacacatgggtcagtccattgtgacacttaactgagatttttcgagggaagtgtaatgagaaaaatgaaacttgggttcagtaggttttatcatcaaaattttaatttttgtggttaagtgttgaaagatgtaaagttcaggtagttttaccgctaatatccccccataaaatacggggggaaaggatattaaacaaaaaaacacccccattctgagaaattctatgttggaacttgttttactaggatctggatttactaacatgtatgtttgattatattctataatctaacatcctaaacatgaatttcctaaaataatgaaataaacacatataatattctagaaaaccttacattggtggcaacataatatatatatatatatatattaataattatatatcacatttcgttcttcatgcctggtaatattggacatcataaaatatattttatgcccgattttgatggtcataaaaaattctcacaaatcctttcaagacctatactaattatgtaggacatgaaagaagtaaattgtagtagtgaaagagagattgaaaaatcgtgtttttgcaaatgtcagttgtatata

SEQ ID NO: 124999 - DNA, 1526 bp, Cannabis sativa
  modified_base (252)..(265): a, c, t, g, unknown or other
aataatcttatgagatatattatcaccaaaataattgtagatgatatgtacatgagggggggacatattcatgttgcactctttttcccttagtttagattttatcccactgagttttcctggcaagattttaacgtggcaacttgcaaatagttatgaatatgaaatatatattgcatttttttttctttagctctggttttgtcacactagattttcctgacaagatttttaacgaggcaactttaaatnnnnnnnnnnnnnntgcattttatgaagcaagtagagtgtgtgggagtgagattattgacataaaatatttgggaaacataaagattacactcaataaagaaatatcaacacaaccagttctctatgaagataatactgattgcatcgctaaactaaaaggatggtacattgaaagagatagaattaaaacacgtttcaccaaatttttccttatacattttaagaaaatacacattggtgttcaataaattcaatcaagtatcaatcttgcagacttattcacaaagtcattaccaacatcaacatttgagaagatagctcaagattagcattcatcgatttaaagatctccacgaatgcctaaatgaaagggagttagtttacattgcacttcttttcttttgaccaagtttttcagcgagatttttagtgagacagtttttatggacatcaaggggggtgttatgaaatattatttatggatgtctaaattaccaaattaattatcattattaatgcttggttgtatttttctttattaaattgatttagtttcctattcttttagtcacatttttgtataaatagggattcaccccattgaaataacttcttttctttttattgttattctacattattttataacaattacaactccattatatttttaagaataattctataaggctagaaaactttctcttgtacaagttttagtttaacttttaaacaactacgtgccatatactttttccaaaaaatacacaaattttgtctatgttcgttcgcatgtttggtttgttgtaatgagaattgtaatggaatcaaattatccattacaatgtttgctttgttttaaaaaatgatgtaataggattacattgtaatcataattgcatcatacaagagaatctccattacattataaaagctacgtaatgagaattacattacaaaagattaaataaaataaaactaaaataattctaataccattttttataaaaatataaaaattaaagtaagggtaattttgtcaatttatcatttattccaatattcattctaataataaaccaaacatcttaatcaatttccattactattcttattccatcaattactattacagttacattccacaaaccaaacctattactattatagttcttacccataatttaagggaaatttacaaaaatactggaattttggttaacttttacaaaaatactgtcacacggaaatattttcaaaaatactgtgttttt

SEQ ID NO: 125000 - DNA, 1310 bp, Cannabis sativa
aaaaaattaaaaaattaataagtagtttctttataatttataaaattttaaaatacacataataaaaataaaaaaaataattaaatatacctggaatgtgtaatgcatgtaacaataacttaatatatatatatattaaccaaaggagaactgaaccgagaaaaaacactattagaaataattggaataaaatatttatatatatatcaatagaagacctataatgaaagcttaaaagcaaaatgtgtgtatttatgaattcaaccaacatctatatggtgtgtaaacagtagaattctttttataccataattccatatttcttactcgttgtcaatgtcatcgtaaatgctattagtagcattggtttgttagttttattgttttattatttaaggaagaagcattcttagactataaaagtgaatttgctttttgttctttttctttttctttttccattaaactatatgattctcttgttgtacttttactaccctttgagtgatcacatatttacttagtattagctcaagtgagtttgaaatagagtaataaagaaagtgagaattgaatcaacacaatttttattcatcaaaactaaaatgatacaaagtgttcaacagcttatataccagctgaggttacaagagaaacaaacaaactaactaactaaccgacaaccaacaacttagctaacaaatcaattcactaatcaagtttaatactccccctcaagatggagatagactgtaaatgtctttttatcacatctttctttgaaaatgttgaattgattaggaaagagaggtttaattaggatattagcaatttggtcttttgagaaaatatgaactgtcttaatgatgccttgttgaacctttttcttgaccaaatgacagtcaatttctatgtgttttgttctctcgtggaacactggattggctgctatatgctgggcaaatttgttatcacagtacactagagtaggccctacatgttcaaccttcaattctttcaaaacagagagaagccaaaccactttacaagtggtattagccattgctctatattttacttctgcagaagaccttaaaatcgtgtgttgcttcttacttttccaagagatgatagatgatccaacaaagatacagaaaccagtagttgatctccttgtatttggggatactacccaatttgagtcagtataggcgtgtaatttaacttctgtgtttgcagcaaagaagattccttgtccagggaagcttttaacatgttgtagaaccctttgagttgcatgcatatgtgtg

SEQ ID NO: 125001 - DNA, 1815 bp, Cannabis sativa
tgcattttaaaattattttttttatatatgaatactaaaaatatttaaaagatgaagtattttcttattttttttatatattttattttgtaaaacatattatcaatttgtatataaatttactctttataattatttattattgttaattttttttataaaattaaaaataaataaaaattattttgaacactcggaaacaaaaaagaattattagtattttataaaagaaataattattattgtaaaaaagttgtcacattccattccaatgtcaaccaaacacggtaatgttgtttttttaggtttatcattcccttcattactctaataaacctattctcaatgaaacatgcataccaaacggccaggtgaggatttactcaataatagcatcagttaccaacaaatttgagtacaatattgggatttctggagaaaaactacaactgctatctttgaaaatagacactgagggaccatgacctccaattattattattatttttatattacatgcaaaaataattaaaattaaaaataaataattttttaatttttctttatatatatgtacgttataaatttttgggttacgtacatccaatcacgtaactaagtcaataaagaattcataatagataaagtatgataggttagaatatttgtaaatataagttgcgaagttcgactagttaaggtggctagtgttttttattaaacgccaattcagttaattacttttgcttataagttacatattgaaatcaggaggtcctacaaaacctttgttttcctagggagacaagaacctagctagctatcatttcattatatatacactgcatataaaaccttgttttatatttatttttaatttaatttttaaaactaagggtctaaatcagtgtacacgtaaaagcctctgattctacgcacctgctgattttctaacttagtcgaatcggaccatattatgtatgggacaccacataatatcatcgaatattaaccgtaccccactttattttatgcatatatatatatgctagtacaattaattaaacttctaataatacaatttcattccttttgatgtatatatagttggccccttgttatatcatgggtgatctatttatatatttgttttgtaataaactatgctagcctaactctccataatagtaataaaaaaactataatagcatataactcatgattgggtcaataaatgcataaagctatgtataatatatattttttaaaaaataattttgaatcattagtaggagaataaaaggaaaatatctaaatataagactatatttaataagagatgtaagtataatatgagttatattttgaaaaagaaaaaataactttgtcataaatttctatcaatttttattattgtactcttatataaaattataaaacttgatgtttgatgtaaaatttaatgtttaactaattttattaaaaaaataaaaaaaaatatttttatcattaatgtttttttttttatttttttttacaaaacaattaatgttgtttggtaattcatagaacaaacaaatacgaatttaacaactttcattaattatttgtcaggttagtcaaatactatagtattagttcatgatgtttgttaaaatgttgtagcattctatttagtttattataagtgcaccccgtagttagtttgaatctttcattacctatttaaaggctttagacattcttgtaatgtgagtaacaattcatattgaattgagagagagtgagatcgagtgggagagtgtaacaccctaa

SEQ ID NO: 125002 - DNA, 880 bp, Cannabis sativa
aagcatagttttgaattaaataactacatatttgactaaaacttttattaatttatttttttttaagaaaaaagggaattgaaaaggaaaaactgaatggtatcttgttttgtagttcatatagttacaaagcttagaaagtagcgaggtcctcgttttcaaattagccccacttattaaatggagtgaatgagaagtataatattcttctttatttccacatttaatatctcaacttccaacttcactctcgtttataattgaatgaaggctaaaaacttgaaagaaggaaagtaatctaaaaaaaagcttagaaaagtgctttcttgtaccatctcatttcaattaaagcattaaatgtcacgtaaaaattaagtcaaaagagaaaataaaggtcttaattaattcttctttttccgacatcaaagataatatatattagagatgagaaaccgatttaagaaagtctttaatttgtatcaacatatagagaccaaggaaaagtactatatataacctacgaaataataatactactttatttctctatttcaattttgtattatatatagtcgactaaccctagaatccaataataactatgtacaatttttttaagcatgggttctgtgacaattacttataataatgaataattaattatggatatactatatatttagtgcctttacaaataaacttttggcatgtgcgttgttataaactcagttgtgattatataaatagtcccctaaaaaaatggtgataacaataagataaatatatatggtgaacaaatataattaacatattacatatatattcattatttaattttcaaagttcaaaaatactgcaatgacaattagtgattgtcttt

SEQ ID NO: 125003 - DNA, 986 bp, Cannabis sativa
tgaaatttcatccatgttataatttttttactgaaattagacaaaagtccttaaatttaacaatctcaatagtttaggaggaatttttaacgaccttaaaggtttaggaggcataatttaatacatgtcaaagttcgggggaagaaattcctaattagcctttattgtatctaaatatacttagtaagaaaatttttgtgacgttacttatgtaagtataactatagaaggttatgtgaaactaaaagcgaagtgatgatgaaatattcatctttagggacaatagtgaaacaaatacaattaaggatattcaagttatgattaaagactagttattttttgaatttaaaaaaaatgcttatacagtatcatcacctggatgacatttggtcttagttctatttgaataaattaagtcattattattcatttagaatttcaaaatatataatcttttctaatattccaatattgtttctattagtttcttatttataaatttattgaaatttttgtcacatgaggaaaccttattaattttttgtacggtacaaaataaaaaataaattatgagaattctatcatactttgatgtaaatgttaagatcatatctcccaaaagagaatgcaatgaattatttttgatagaattcttgacctttgatttaataaattttagattttacaaaggagtaacaaacaaatataaataaataaggtgattaaagagaatttcattgtcttagaatttatgtataatatattttagtggatcttctcctatagtttcatggaatgatcaacatgattttattgtattcaaagatgactaatgaaacacatattttattcataagggtatcaatctttagacattgtttctgttaaatttttaaaacaacagttgccaaattaactaggcaaaaaaattaaattcgtctaaactaactatggtggttaatgttaaaaatattttaccaggatct

SEQ ID NO: 125004 - DNA, 756 bp, Cannabis sativa
ttgccaacataataaatcaaatcactaataaatcagataactaatcaaaatgttgatacacaattaaaaatatatcgacacatactatcgatatacagttaaaaattgaaaaaactagcaagttaaaacaataaactaccattcctatttatggtcgatatcctattgatattctatcgatatcgtatcaatatcatatcaacaacaatgtaaaaaataccatttaaaccgtttacataaacaatgagaaacatatcaatatcatatcgatatttcatcgataaaccatcgataaccctgtacatatataatttcaacagaaacaagccacataatatacatgaacaatgataaatcataagtaatcaagtaatccacaaaaatctagcaaaattaaacaatttaaaatcaattgttttttttttaaaaaaaaatggtacctctttttactcggtttggtggtggtttgactgagaacgtcggcggaggtgggtgtcgactgcggaggcctgggtttcgtggtggttgtttcgagtggattcagacgaacttcggtgggttcaccgtggtgggtttctcggaggttgattgtggcgagagaacgcgagggaatggtggttgacttcaggaatgtctgggtttatggaggttgagttcgggaagacgaagtggaaagagagaggttgaacgtcgatggggtttctcggaggtaggtggggggttggggaagacgaagtggagagagagagagagaga

SEQ ID NO: 125005 - DNA, 972 bp, Cannabis sativa
aaaattagactaaaaaacttttttggataccgaaacaagtagagggtgcatcaatatccattttaagggggtgcattatagaatcaccctatatatacggtttttttttcctaattttgtttgcttattgactttttgtttctcattttattaaactttatatattttttttaaaaaaaataaaataaaaagtgagttgtactgtacgtatggttttcatttataaaaaaacaaataagttaataaacaattaataaataaataaacaaatacaagtaataaatttttttgaaaataaaaagtgagttgtattgtactatatacggtcttcttttactctgtcaaagcgaatgtggtcttttattacttattaattttattttttaatgtattacaactattttttattatttttttttaaaaaatagataattatgcatgtcattaaaaatcactaaaaatagtgacacgcagtgtgagtcagaacacatttatccaatcatgtttgacacatcactgtaagccatcattttcaaattaataaaaattagaaaattatgaattttactctttagtaacccttcaacacacattataagagactaatgttgaatgtttagagtataattatccatgtcactaaaaatcactcttaactccttagagcaatatctccaatgataaaattttagaagatgtttggtgaggtggacatattatgttgcaaaacattgagatgttatatcattgacgagaaaataatgtcattctaaaaatttacatggatgctatgttgtagcattgatgctattcattattttttaataaaaaaataagctaaaaagttattatagctaaaaattataagatatatattaaattgttataaaataatataacataatatagaatagatgagaagaaaggaagaagaagatgaagagagaaagacactactacaaaaacaccctt

SEQ ID NO: 125006 - DNA, 973 bp, Cannabis sativa
gtcatctgtgtttttgccagtttttgaaggaaatacctttccagatggatcgtgggttatattaattttgtgaaaaacgacaaaaataacactctaaaacataaattaatttgtttgctttctggaaatagggagtataattagtcaagagataaatattaattacatggataatatataacatgagaagaagaacaagaagagaataaaaagaacacttcttctgatcatcactactcatgaacaaataatacacaggttcgcaagctaataaaaaaaaaagatttttaaatatgaaagatgataccgaaaaaaaaaagtaaaaaattaaaaattaaacattaatcaacctctcattatcatacacacaaccaaacaaaataaattatgaatttaataattaattttctagttggtagcgtttctttccgatcccaaagctttaatggcaattgccctcagtatgtactggtggtacgccgcggcggccaaagctccgataagtggtccgacccagaaaatccactgctcaaaacaaaacaagaacccatgtatcaaaacactgaaaatattataacatatcagatctttaaaatacaaatattggtagctaaataataacctggagaagattactgttgagattgagacatagcttctaaaaccaggcagcagtgagatttttgatagcttgattgggaatagtgattgagaaccaaatcataggcatagtgaatacggtgattgaaataaaatcgttcttctaaaatctattagtgagattttgaatgactcaattgggaatggagactcgtggacataacttctaaaatcaggcattttgaaatttcgaatgcccttaattatcgaacttgagttagttattttaaatttttatatgattaaaatataaaagtaatattaatttatttaaaaaaagtaactcatgaatttctcataaactattttattt

SEQ ID NO: 125007 - DNA, 716 bp, Cannabis sativa
ccaaaccgttggtcggtttacatatatattttttttaaattgggcgggtcgcacttaaattttagcaacccgaactttagattggaattatattttttatacttttactaaaaatattaaattttgcatgaacttttataattatgcattggagcacaatgctaaaaattgatgtaaatatatcacaaagtgttcttttgtgccaaatattgcctaagttttgcatctcatattggagatggtataaggataccttgccaaatcaattgatatttaatagattaatgtgatctttggtaatttttgttttctgtttttttttttaattttttaatcacaaacatgaaagtgaatttttttaaaaaaattttgttttggaaaaataaaaatgtattttgtaacaacttttattattcaattttaaaaataaaaagtaaaagtgtattcagttaattttatttttcatttttcatttttctttttattcaagttgggtatagttcggggtacagagtctaggtttgaggtttgggattcagggtacgggtccaaggccgaagtcagagtccagatctaggtcttggtttggtcaaggttctggggccagggtcgagtcaagggtgggggtcggggtccaaaatattaataaaataaaatacaaatatattattattattattaaaaaataaaaaaaataatagaaacctctttaaaac

SEQ ID NO: 125008 - DNA, 1274 bp, Cannabis sativa
aatagatggtccaattagtaacttttacaaaacacaaagtccaaaatagtatattatatttccttcaaaaaaaatagtatattatatttatatttataattattaaaagttattatatgcctatatatttttggagttctttaatttatacttttataattgactttttatttatttataaaaatagaaacaacataacctcgaaataaaacagtataacctcaaaatgaaaataacttttataaaatgtaaacaatataatctcaaaatagaaacagcataatctcaaaattcaaacagttgctataaaaattaaaataaagtctaaaaaaaaatataaaaaaaaatatagtatacatgacaatttttctaaattttttttataagaaaccacatagatgctcaatttacactacatatattttaaattatgtagtattaactatatatatatgttttatgtgtttatcatcaataattttgttttttttttatgtatataataagaggatgtatatatatcgggaacatggtcatatgtttgctagtgagacctaaaatttttaccttttagaacttatttattattaaaaaaattatttgtacttacattataattaattttactggggacttttttactattttagtttataattatcaaattaaataatttacatttaattttttaaaagataatatttttgttagtggggactataatattagtgggtccatctctagccatgaatgtagctttgcccctgaactgatcagtattgtctagccaaagggtgtatccatgagccacaaagggcatgtagattatattgtctagtaaaaaagcatgcttagccaaaaggcatgctaagctcatatttttcatggcattttattaaataatagcatgaaatccaattggactttattggagacactattaagattagaattagaaaaatgaaccaaataattagtcgcctaattcccagatcattttacaaaaaaaataaaatagatgaaaaagattctaacatcacaattaactttaagaacacctatattatattttatttcctattcagaagacacaatagtataaattattacaacaaattagtttgagcactagaaggatacgctgtacttttctcaaaaagtgggaaaaaaaatagatattagggtaaataccattttgaaccctgtgttttgcaaaagttacagatttgaccctgtattttgttaaatgacaaaatagaccctgagtttaattt

SEQ ID NO: 125009 - DNA, 1423 bp, Cannabis sativa
  modified_base (1389)..(1391): a, c, t, g, unknown or other
ttgttattttttttatttaaaaatttcacccaataatttatcataaaccaagaattctgttatatagcgacattttatatagaatagatataaccaatctatctatactagtcaattgaatgagtaatgaggccattgtttttcgtttaaacatggaatctatatcacaaaactatacaatcaaaaaccactgaattggatgtaattacaaacaaaattatttatttattttgaaaaatgaacaaatttattggtgagcaacaaatataggtaggtgaattatttaccaatctgatgattttattgccaccggttttcatttttcttttaataaatgctaataataatgttgatagcataattctgatgaaagactagtactatatactacgcctatatagcctaaagattcttaaattgtagaacatatacaattgttttcttacatatttattcattattttacttttatttctaaaaaagagtaacaatgatgttaatgtgttcatatatttttaattagtagttagtggtgatattatatacaatgcatgatgaaatcaatacacaaaacgacacttttgaaaaagacacataataatgcataattagtggttattgttaatatttggacctagttttgatattttaaatatatccataaaattacgtacttaagtttagtacgtatccatcacgtggagctgtcttatgaatcatattcaactgagtttatgtatattaatatatgagtttaattaaaaagcatatgcaatatttatatagcaaatattgttataagttaaaaaaggttaggccatctctatatatataggtttttaaagaaaattaatgaggatttttgtcttttatttttgtcatattttaaattatgcctttaaatttgtatgacgttattaaaaaaatttctcgaattattgagattgttagatttaagaatttatatctaattttattcaattttattaacgtgacgattgttcatgtattaaattgtacccctaaattttaatatttacttaattgtgtctctcaaattttgacatgtactaaattatacttttcgaattttgacatgtaccaaatcgtgctccctgaatttcatccatgttaggtttctattaataaaattagacaaattcttgaatctaacaatttcaattgttttgagaaaaaatttaacggcttgaaaaataagcgagtacgatactatacatgtcaaatttcaaaaggtaaaaaatctaaattagcttttaatgaattgttgttttgtaagcaaataataataatagatataaggtgaactgaatttaataatcttgttaagttttactaataaatttaggtagcatttggtaacactttttnnntcagttttctgtttttaaaagtagaaaagtga

SEQ ID NO: 125010 - DNA, 2090 bp, Cannabis sativa
aaaggttacttgcattaatgagctggaaagtttatatacagatcaaaatagaaataacagaaagtaatgagagagaaacagtactaacaaactctaaccaactataacaaaattaactgcctttacactctagaaatctcgaacatacaacccctcatctgagatttcttccttaatctttgattttctttcaatttctttagacatcaaggcattatgagcctcttccaatgttaattaaagagctcctaccatacatcataatgtctgtgaaatgttaatagctttctgtaggcaaagaattgaggaggattatcacttgatcttcatcgtctatctttacctcaatgtttttcaaatcaagaatgatcttgttgaagtcatcaagatgatcttcaatcgatttcttaggtgacaatatgaaggtatacatcttctacttcaagaaaaacctatttgctagagactttttcatgtaaagctgctcgagtttcttccataaacttgccacactcttctcttaggatacgtttcttaggaccttatccccaagacatagaatgatggcaatgtgagctttttctagcagttcggacgtctccttctctgcttttccctcgatcttgcctacattttctatggcgccttgaagtccattttgtacctaaagagctcacatctttaccatccacaaaccaaagtcattcttgctcgtgaaattcttcagatcaaacttagcattctccattattcgtaggattgattctcgagcagttgatgatcacaatcttcacctttggactcaaactctcccttaatttttcgataccaatttgttgagaatcactagagcttgatcaaagctcacaacacggattagagataaaacaatataaaataaagaaaaagaaaagtgttctttattgaatgtgtctaaatctgtacaaaagttagttccatgccttagttacaagaatgctacttattgctttaggctagagccgatacaacaatcttaacaaactaactaataatcgatactaacaactaggactactaacttctaactgctattaggactaggttcaataacagacataacagaaaagagagagaaaggattaagggtcactcctttttaacactctactttattgggcacctttagaaacccttaaaatgtagagatgcatgcccttatcatgttttccatgacaatctaacatttttttattggaacaaataatgatatatgtatatatatgtatattatagacatatatgcaattggaaactacaagatcagaagaggctcggagaaaaataagcatcatacaaccagaagtagattcttatctatcaaaccatggccttccaactgaaaaaaggaaactcattaatagatgcctaagtcgaacgattagagaaggcaaagattttgatgtcaaacatctattttttctagttgaagaacatgctaatcttgatcaccaacacaagggtcatgatgaggtttgtgaacaaattgtatcttacaaaaaatcttattttagtctcatttatttatttattttattgttcatttaattatttattttgatgtagacatttgctggctgggtaactaaattaatgaaagtggaaaagtctgaggggagtacaatggagcaaaaggtagagttgtggatatcaaaaaatggaatccctgatgatttagggtccaagattatgaattatgttcggtttagaatgcaagaagaaaaagatgtagatattgagtatcttctacgtattcttcctccaacacttggagtctccattaagaaacacatgtgtttctctatcttgaaaaaagtaagtaatttttatacattttcattgaaaaattattaggtaggagtatcactttcactccttctgtataagagcaattttgtttttaatttcaatgtatgatgttatacattatagttataaatgtgtatatatataagactttaaaaaatcttacttttagttacaacaaaacttgtgactaattataaatgattattcttatattgtgactaaaaaatctgtggttaaatcat

SEQ ID NO: 125011 - DNA, 1299 bp, Cannabis sativa
ttctctctctttctctttattcttctttaactcaacaagattgatcaccttaggcatgctttatgatctcaattcaaaatctaaaaagtgagttttgggaatgctaaaattagataaactaggttttgatgtgaaatgaaagtatttgcatagccttagtagtaactttaagattattgtttaatgttgattataatttaatttatttcggatgaataaataacaggtaatttaagacctaaaagatctgaaaagagttaggttaatttttataatctgtcattcactttaagaaagatgaataataattagcattaacaattgggtaattgaaacaacaagattcgtctttctaatttctcatctttgattgaacattttttattgcttaattttattttgatgtattccttattttgactgtcatcaaaattatttgtttactaaatagaaatataagtctaatttaatagtattcagttcaattctttgtgggatcgacctcacctgtgtgagtactacttgattacgtgtacttgtgtaagaagatttatacaagtcgcacatatgtcgaaatatatgtgatgattaaacagtcttctccaacgtctagtaaagatcacttttttacatagagattggtctgaatgacaaatcgtgttcgacaactcaacgaagacttgcatgtcccatgttgtcaacactcgagatgtccaccaatgtgattcaaggtaaacgtagacatccaagcgataggcctggccgtttagtgaatataaaacgcaccaaaaacccgcaagcttgtgcaagaatatgaataggcaacccgcgctcaatacgtcacatatgttgttgcacttaatacaagaacggattacactgctcttcatttatttttttttacgtttattcttatttaaagctaaacggttctaagaccaatcagtcaagtaaaactaaaagggcatttgctttttatataaaggagtaatctaaatcaaataaactaagtaaaaatcatttgcaacagtagactgagctagactgagatttggctgaatcactatatttctttgtgtccttattatttttaatttttcttttgtttttggtaactcaatgttgaatactcgctattttaagtgaatgtttgtactttttggttcaaattatttattacttatacgtattttggtattgtttaaatttttttgaatacattaaaataattttcactacaagaaatgtcacttttgtcagcacatttttgtgctcgcaaaagttggtattgcgctggta

SEQ ID NO: 125012 - DNA, 790 bp, Cannabis sativa
atataaatgtaattgaattgaattaatttttaattaaattttgagattgacatccaataatcgatcaaatctaattataatctaacttttagcatccaatctaattcaattgtaaataaaaatctaattttttgtaattagattagatcagatcagttcgatttaatttgaatgttgctcactcctattaagaagtgacatatcctgccaaacacctcatttgctctaaaaattgttagctagacaaattaaaactttttaaatatttttttatatgtaaaatcacatcaaacataacattatataattaccaaagttctatcatggggttaagggcttggtagctactaaaaccatcaacaatcataacttcattttgaagcaactttatctttatttttccatcatttttaccttaaaattactattccatctctaatcactactttaaattctacttcaaccaagaatataggagtatttatcaaactcctcacaccgcataaacttcccttatcacaccgcatcgcataaagtatgttgtttaaaattctttgtagtgcggctgtgatttacatttaccaaatcgtgctgtgcagtacggtttgtggttttaaatttaataattgcagttcaaaaagcattgtactatatattacaaagttactaattttttgaagggtagatagttgcataagtacccaaagttttaaatttgttagtggcataatcccaatgtttatttttagcggcataagtacctaatatttgtaaaactgtaaattttctc

SEQ ID NO: 125013 - DNA, 2664 bp, Cannabis sativa
  modified_base (2591)..(2597): a, c, t, g, unknown or other
gcataaaacccaacactttgttctcagctctcctctttttcatgatagcatgaaaatagcttgtgttttcatcaccaagctttaaccaacaagctttagagttttgatgcaaatagctaaagtactgtttttgggcatcttggtagttcgcacggctcattttttcagttaaaacagctgaatgacatttcaggttgatggccaaggcttcttgagcttcgataaatttgtctcgggcttcattgtactgacctgtgatatcctctttcttcttaacatagcaggttttcagtatgtgtttcaccctatacagttgctggtgtaacgaatgcagatctgtgaccatgtgcttctttcaagtagagacaacattatctctgaaatcctctttaaacacccaatgattgcaaaaccggaaaggtttggtcccacggttaccaaccttgacgtgtttgattaggcagtaactgtgatccaagagggccccccatctgaagttggcttctgtattcgggaaatgatctaaccaactttcattagtgaaaactctatccaactttgagtacactcgactgccctcctcgtggttattagaccaagtaaaaaaggagccagaagtcttcaactcttcaacctgacccctagcaagccaggtttgactatcctagatttcaaggcctctaattttcctacccccacttctatctttgtaggcctctaatttccctacccccacttctatctttgtatgcaaacatggcattgaagtctccaagtataatccaaggagcatttaggtgcccaatgctagtaagcttattccaaagatccttcctctcgtttaatgaattacttccatagaccgcaatgagaaaaaactcctccttgtaacccaccattttgagtttacaatggatgagttgcctatcttccatcaaaatatccactttaacaagcttgtcaatccaaatcaacaaaattctaaacgaaatctcttgactggaatggatcttccaattcggattattagacataagtttgctaactctatcatgatggatcttagtctcaaaaagagccccaaaacccaccttatttatcttacaatgttcaaacacctcacgctgcttctcagcattattcagccccctaacattccagcctaatagattgaaactatccattagaaaggtgtctaagatcagtagccaacataccctctgcatcctctaaagcctcatagtcattgcttgtgattgcttcttgttgcggcctaatgacagactttgcaccttttcttttaggagtcacccattgctcatttctggtttgtataacagtatttttcacggcccctgtaccctcagaaatgactccccgttccactttactatcaacagtaggtagagcaatattattgacaggtatagcagtgttttaaagttcagtatcacccttttcagattccttggcaccattcactttctctgttggaatccccttgcttctagcatcctgttcaacatcagttatcttattcccttgctgttttttcttccacacagtcggcttccctttgttacagttggaaattgagtgtccaagcatatcgcaagccgtacacttggtaggcagccactcatattcaacaggttgttccattagttgcttcttctcatttacataagcaatagttctcagaggttcttccttaatctcaacatccactaacacccgagcgtacttgatcatagaccgctcaagagtaaccttgtcagccataatcgactttcctatcgtgctaacaagtgcactcaagttcttcttcccccaatattggagtcccaagccatttaatctcacccacacaaggaccgatttgaccatccgggctgtctccatatcctcggaccaaggccttagaatcacaggtttcttatcgaattgaattactccggttttaagaataatgttcctagtaaccccatccttgaaactaacaagagtgaaccctgagtgcattctcactatcctttccactcccaaattcccccaaattctcttgataaatccttcaaacactctaaaaggaggatttgcccctaaaacgatgcatataatcgacgtctccagtatgatgcttctaattcagcttcatccaaatctaaatttgcaaccacctgatccccaattttagatggttcagtaaaagtaagttgggaagaaggggttttcacctgattcagattgaatttagtccaagtaaattgtgttgatgcctgaaagtccatcgcctccgcatcgtccgcccaagttttcgatttaggagtcgactttaccgcttctgcaactacttccttctccggttccagttcatcacacgggtctaggaaaacctctgtagcttcatcttggattgagggcagctcagggctcgctctcgcgacattgacgttggcagcacaaggcttcgatgtacctttcctcttcttcaccatgggaagaggagcagagcatcacacggctgctaattttttcttcttattattattatatatatgtaacgtatttgttaaatatttaattgtttnnnnnnnataagttagaaaaataatattttatatcattttacttatcaaatatttataaatagtattttaaata

SEQ ID NO: 125014 - DNA, 525 bp, Cannabis sativa
  modified_base (495)..(500): a, c, t, g, unknown or other
aagacattttcaccaaattcttctaaactcacgatcttaagaagaatgactatattggtatccaatatgtttaatcaagacttattcataaaatcagcaccaacatcaatatttgaaaagactacacatgtgattgaaattcgtcgattatgaaatttctacgaatacttaaatgagaggagttatttcacactgcaccctttttcccctaattgagtttttgtcctactagattttttagcaaaatttttaatgagccagttattatggacacccaaaagaatattataaaatattatttatatgaatgtccaaagcattgagaaattcttattgcgtttctctttccctcttcatcttcttctttttttattcttatttgttttatattattcataataatctatatatatatatatatatctatacaggagaagtatgaggtggtgacgtggcggtctaaaatctctctaaagctatttttcttttttctcnnnnnntctctcaattttttaatattttatt

SEQ ID NO: 125015 - DNA, 952 bp, Cannabis sativa
  modified_base (136)..(140): a, c, t, g, unknown or other
atactgtgttttttataaaacacttgttaaacacaaaaaagaacaactcaaaacaacagttgaacaactaaaaaataccattatgacaacagtgaaaacttaacacagtataatgcagtatgaaacttataaaaannnnnagtaaaaaagtaaaaaataccgcttgacaatatttttgtaaaaaaatagcaaaagttagtgtactatgtaaatttctcaaaaataatgttttatgtaattatctttttttaacaagattttttttttaataaaaatatatattatgagaaaaaattaaaaaataaaataaaattatgggaaaaaagttacgataaccagttgctctagggtaaccatttaccttatattattttttccatatttgttttgaaaaaaaaattcccataaaataagttcttaataatagaaaatttgtaaattggtactttaaaaactataaaaataaaaatttctcaagtaatattagtgaaaattaaagaatttatgagttttgatacaagcaaaataatttacaatttagtggtagaaaataaatggataattcatatatataatacacatcatctgttttgtatcaaataatagacccatcataaaagaatagtatagtgttatgctaaaaacaaaacaaacaaatcaatgtatgtacatacaccaaagacaatgaccaaataaagtttcaacaattgaggttgagcaataattctgtgtgctggattggctccccagatcgagattaacgatatgatttgaaaataataaaccatttgtcgttacgaaataaagacaataatactaataataagggtaattaataatttttttactcgaattatgacatgtattaaattatgttcctgaacttatttgactgttaaaaattttcctgaattattaagattgttacattaaggatttttgtctaatttta

SEQ ID NO: 125016 - DNA, 961 bp, Cannabis sativa
tctcatttgatttatatttttctttatatacagaaaaaaaaatgtttagtccatttaaaataatttattttgaaatttttttaagctaataacaactatagaatagtatatatgaaattatttcattataaattatgtattattatacattacatgaaaaaataaaaaacttataaaacaaataattattaaattatatataactatttttaaaatataaataatgaattgtatattaaatgaaaaataacaaacttaagagtaagatattaaaagtaaaaaataaataaaaagtaagaaattaattaaccacacccataaaaaaatactctttgataatttaaatatggcataataaaatttataatctatatgaataatacctacataatttataaataatgtttgacatttagtttttaatatatttgaagaataaattttatgcatagttttatttgtgtagttatttttcaaataacaaaattttaaaaatggaatgaaaaaagtttaatatggcacttagacttactgtgtgttttaatgagtatacataactatatatggatataaataggctcattataatgtttatggcaaatagagatataactacttaaaattttgaatttttaaggagtataaacttaatgtttattttttactgtataagtatatcttatatttgtaatactgtaatttttttctaattttttagtaatagttctcttttgaatttattaaaaaaatatttgaaaataactaatactacatgtttctatttagactcagtgatctagaatctaggtcttatatgtgtcgtgtttaagacactaatagagtgtgtatgtactgataaaattatagttttacaaatattaaatacttatgctgctaaaaataaacattaaataaattttgggctgaagggaggtgtgtcagagggggtcgatgtcgtttc

SEQ ID NO: 125017 - DNA, 560 bp, Cannabis sativa
  modified_base (192)..(194): a, c, t, g, unknown or other
  modified_base (509)..(513): a, c, t, g, unknown or other
ttcaagaaatttggacttaaaatgatacatgtgtgatttggatgtgattcatgttgatctatgtactttttgctgattgtttgatgtttgcaaattgtttacgaaaaataattagaattttttcctcaaattattttttgttggataatttggaaataattaagcaatttagttttttacagaactcaattnnnattttatttgaattagttatgatattttgaagtttgaaaaaatgataagggtggtgtcacccacgtccgcacgcggacatgggtgatcacccatgcacaagcattcagacaagcatcctctccgagatttctcggtcaggggacaagattttgtccaaataggggccatgtgcgcgcgcacaaggcttcacgtagcctccttggccgaggtttctcggccagcctctatgatttgcgcacgcgaatggtatgaagtgcataccatccgcatcgaatccattttttttattcatttttcttcattttttcatgctnnnnnatggaattaatttcgaattttttgtgtaattttgtatttagattttt

SEQ ID NO: 125018 - DNA, 1004 bp, Cannabis sativa
gttgttttcaaaaagtagtgcaataaaaaagcattctatgaacgagcagccttccttggatggccaggtcttaaacaagacatccttggccggccaggacttgtacggatccaaacatgtattatttcaagagctcaaacacgtttttcatgttcttcgtgactcaaagagccaataatcacaacgaaggtcagctttagatctttttcatctagaaatcacatattacatatcctaagactatcatgcggctcaaaataccaaaaggacaacaatctaatgtaggaatcaatggatgttcaaagcaaggaataatgttcatgcattcatggaaaaattaaccaaatcaagtgaaatagcgagaatagaaagcttatccactataagaaattgctgaggaagaatgtaggaagcttggatcgtcaaaacaacacaaaaatcctaaaggaatggcccttgatggattctgtcctctagagagaaggaagagcttctttaaatgacagtttctagtgagagaagtgaaatatgaaaagtgagaagtgaaaagggttttccccccaaaaagcacttatatagtacatgtgggaccttttcttcacttacttcaccaacacaataaaaagacaattaaagtagctagtttactacaacaaataagatcaaataaccaaggaaaagtatttcaaaaggctaaaattgcagcaacttctatccagcaaaggctacaacaattccaaccacaccaatctaattagtaagtccctatccgtacagacgtccgaacaagggacttgggggcaaatgttatcccagtttttgcccacttgacgtggcagtgcttacgtgtacaaaatcagtgctacgtggcaatacaactcaccaacaagaaggctaagtcagtaccttagcaaatggggaccccgacactcaaacggggcagtaaatgacaaaccagcttcctcacagaagttgcccggccacccctggctggctctatggtc

SEQ ID NO: 125019 - DNA, 790 bp, Cannabis sativa
agtaccagctgtacaacttgtacaaccattgtctatcttaatagtcgcacataacattatagcttatgtcttttattttaattcaatgggaaagtacacagaaattaatatttatctgaaaagtacttttaatcctgaaatctagaagattcaaatcagtaatctacttttgattgttcattggaataattaaatcaccttgattttgtttcttagttcaggagatcattagtttgtcatgttagaaaaagaaaactaataataataataaaacttacaagggactggcaggcttgttctgctcttgaatctaatccccatggtaaataatatgtcaaaaagaatagttcatgtggtatagttcttccgaatggaaaaggtcttcaaaatattattcttggtaatttattgactcgcggatgcaggtcatggaaggctttcttgttcttccaggaagggtcttcaagaaaactagtcctccttcagaaaagagttccggatggctagttgtttctcgtagtcccggataatagactccaactagttcttacatattcgggaaggtccctcagcggtgccttggaccgtaactccgggagccctcatactcactcccagatgcacacttccttaggctgaggtggagaccttgaaggagagttggttaagtctgttattgcctaactaacttaacaacttatcttcttgcagccaccaactttaggatcttgatcttaagcctatacatataattataattgaaatgaaagcagcttttgtttaaaatctt

SEQ ID NO: 125020 - DNA, 1071 bp, Cannabis sativa
ataagtattgaaattaatataaaataatgtgaggaaaaaattaaaaaaaaaataattagagtaatttttaaaaattatttaagtttatatttttcgaataataagtctatttattattttataaggtgcaaatagaacttcacaattgaaaattaaattcttactaataattaaattcttttatacttaaaattgtgttgaaaattttgtaattttctttttcattattttttagggatctgcggttttgaaaagctactatacacgtatattggtggattaagcatagaacaaacaaagggtggttgtgtttcttaattttataaattttattattagattttcatttcatagcttaagtattacatatcactcttcaattataattgattatatataaactaaatgtgcaacccctaatagtttttatttataaattacatgtgcaacacttatagtgattttaaaacaatgtgggactttgtttgttgttattctattttattttatttttttaaaagattattattttattaagtgataatatatataaaaaaaaatatataggatgaaacatcaccactcagcttagttttagatagaatttggttagatcatacgaatgaaggttgtacataaatttttataaaccgcttaactcgaataatccattcaaaattaaatcgagataacctgatgaaaaatataaactgaaaattcgataaaaatataatttatttaatctttatattaggcgagttgaaaataatatcaacctgtctaatcaacctaaactaactccatcaacttgattaagagagttttatatatatatttatatatattgtataatttatactatttaaaaaatataaatattaaattaatatgtttcttttatgcttgttgatttgagttttgaattcaatctatacatatatgtatcttattattacaattaattaaaggctaattaggattttttttcttctttgaattttgacttgtaccaaatcatgctccttgaacttttaaggtcgttaaaaatgccccctgaactattaagattgt

SEQ ID NO: 125021 - DNA, 778 bp, Cannabis sativa
  modified_base (33)..(39): a, c, t, g, unknown or other
agtaaaacaccagtgaaacttaacacagtatannnnnnnatgaaacttataaaaaaacacaataaaaaagtaaaaaataccacttgacagtatttttgtaaaagattgacaaaagttactataccatgtaaatttctctaataagaaagcaaggcccatgaaagcccattaatgaagtaatcaatctcgttgggccaagaactatgcatcaaactccacaaagaaaacttggttcaactaatgaacgttaaagaggcgaggaatactttttttttggggtatcaattaataaaaaatattcttatattatattttattaaaatatagtgagttacttaatatatttttaccctctacttaaatctagcatataatttatattagcaatatatataatagagacattatctatgaaaatgggtatatgtaattcagtcgtgactaaatttaggctcttttattattattattatttaattaattaattgaaaggaaaaaacttaagtttcctattctttactaaacctttagctataaatagagttacaagagagatttttttacattttgggctcatttggtatgccatataaagatcgtattgtattaaatagtaaattacactatatttggatagagcaatgtattgtattaattatttcgaccaaaatttttagtacaatgtatgttgtattatttaatacataacaaatggtccgtattagcttgtattataatatttacaaaggatttggggtaaacaccaatctacgactcg

SEQ ID NO: 125022 - DNA, 908 bp, Cannabis sativa
ttgtctccttgaacttctttcttcctgactttctcttttcctgtaataacgatttcttcgtaaaattgttactattatttggaggtagtagtactgatgagttgatattcagattttttgtactgacataatctttatggattgaagatgaggatgaggatgaagctgaggaggaggaagatgaagatggagaataatgatgataatcttcagtagtagtactaaaattattcatggcgactatagtactgtaatatattactttactatatttattttttcagatattattacagagaacagggaaaagattgagattggtggtctattaatatagaagaaaaataagctctaattattattatgattgttgctgttataatttgaccccacatgctactatcgctttttttggctcatatattatttaagataagaaacgtggaaaaattcaaatacatgtacttttaacgtggttcataaacgccgctttctgtttcatcacgtgtctctataaagactactattaatgaatgaaaacccacgtggcttcatagtttacatttttcttttagaaaattttaccattcatatttaaaaattgttaatgatgttttagtatgtgacattaaaatacataagaatttaatattataaaattaattaaattccaaaatactcttctcatacattttctctttctcttggccctctctctctctctctctctaactctcaccaaatccaatcaatacccacgactacaaaacaaccctcggcaaaacccactctgaagacaaaatataaaacaaaattgaagagaatatcgcgaaactacaaagagaaatcatgaaaaccaaagccctaaaaatctatgagttctcaactcgtttgtttactgcatcttt

SEQ ID NO: 125023 - DNA, 810 bp, Cannabis sativa
gagccgcgacggtcagattcggcgaactcgacgcggctctaattagccgtgccacgtcttcggtgctggaaggtttcaagaaagctaaaggctcgacggaataaatgccgccgaaatctttgctggctgaaacggcggcggcggcgtcgattgttgatttgagttcgagagcattggaaatggtggaaacgtcgtcgtcttggttcgattcggcgtcgttttcgtggacgaatcgctctagataagctatcatctttgattttgagccgaaaagaagaagaagataatttttaaatttttatttaaaaaaattgaaaaataaaataaaattaaaaaataaaatagtttttgtctttgagagtttctctctctaaaatatatgtattttttttttcggtttctctctctagattctgttgatttgttctcctcgtttatggtttggacagttttgggggtttaaataggtctttgattttttttttttttttttaatttgtattaaattaattgagtttaaaataattaaataaataaataggggagtgacgtcagcaagctaggttcgatatcctgtttgacgttttgaatcctatggacaacctctgtctgccacttctattttcaagtataattaattaattaattaattaattatttgttaatgcttaattaattcattgattatttctagggtgattaattcttaatttgaaaattttggaattttttttgggaaatttgattttttatgcttacatttggttaaaattttttttctaaacaaataataactaatatttgtaaaat

SEQ ID NO: 125024 - DNA, 1012 bp, Cannabis sativa
attccgtcgtgcttctcaacgctggcagccattcttactgattcatcttcgtccctatcatctccggccttctcgactaccaccgcaccttttactccattatttccttctccggcagcctctataccttccccaaacaccttgttgtgatcaaaatcttgataccaacaagtaccaaaatatccatggaacttataatttaaatcattaagcttgaacaatttcaattcaaccttcccaccgtcatgttccaagaccaaagactctggtacgaaaccaaaatcatcacccctcaactggagcctcatatgcgatagcaagctagcttctgctgtctctttgtccacgtccaatagcccgccacaacagtcaccaatttttctgaatatcttcatatgccaaagattcagaggcataccttgtattccaatctaagaatctctgcactccactttaatgttatccttttgtgactcccaactccttagagaaaaagacactacaatttgtgcccctggaacactacaattttaaattagcatttgcttattgtccttcatcaagattgttgtcattctccaatcttttgagttcgtttgtgcttgcatatattcatagaaattctttagcttcattcttctttcaaggtataaattcttttgtttaaatgttgaattaattttaggtaagcactcattttccaagtttctcccctccatttcttccccatgataactttaatcgcaatccttttttttccttttgtggtttcaatgatttttcaccaagtttgtgcatcctctttcctttttcaacctgatcttccatcccttcgagtctctttcttcaggtctaataactgttgtcattttgttatttttacgaactatgaccactccctttcttccctgctccatgttctgctaaaattcttccattgttccatataaccaagttgttgcatcaatggttatggtgatctcgtagccaatcaatctagtactttcgcata

SEQ ID NO: 125025 - DNA, 1271 bp, Cannabis sativa
tctacgtagtggtcctcggtggttttacgcagtggttgagatcgatcggttctatgtggtggttctcggtgactgcacctaggtcgctggtcttcaacaatgccgctggcttggtggtcctcggcaacggctccagctcggtggtcctcggtaatggtgtcgcacctggtacctgcatccattccagagagagagaagaagggtatgagaaaatgaaaaagaaagaataagaaaaaaattatgatttttgttattttaatttttttaaaattaattatttaaaaaatatttttatatttttaatgattttttatttttttaaaaatatatatttatgcggaccaataaaattatgccacgtgtacactatgtccgcatggataatctaacatgacacttaacagctaaatttaaatgaaaactctaaattgctaacggtatcatgattttggggattttgccacaatcaacccaacccgctttaaaatagagattctttaaaatatttctaaattaaaactacgctacatcagatgttctacactctatgtttattttaaagtttctttaaaattcactattcatattctatatttataaaatattatttattactctaaacatattttattaattgtttgggatttttattattctttttatatagtaatatatataaatattaatattatatatttgatatgaaaaaatatattaaaatttgaaagaaaaaaaaagttaaattttattgatatgttttaaagatgatggtgtatggtataatataaagtttaaggtaaaatgaaaaaaatatgattttaataatgtattttaaagaatagagtaaagaagttgaactcaatatttttgcttcgtacaaacattgtctgttttgatttttatcaaaaatccttccaactttagatattgtacgcacaaataaaattctcatatatgaaatgcattttactctaattttcaattccatgaatctcataaatctcgcaaaatttttatatttttacagatctagtattttttttttttttgagtttttagcagctaaatcatttttattattgtttcacttgcacttaatcctccaagttcaaattttggcagttaaactttccaaactactgaactgttagcaaatataagatgtcatccggttaactgctaccatagactgcttatgtgtacactcttatacacgtgatacttttatattggtacacctaatattattatttctaaatttattttaaaat

SEQ ID NO: 125026 - DNA, 1580 bp, Cannabis sativa
agtctaggctggccccatcatcactatgttggccggcctagtggacaacatcctggccggccacctcctccactggtgggttgaccaacacctcgtcacgggtacctgatgatgacccctgtcaataagcagcagtctattctatctccatctgactttcgatcaatgtctttccacgggccagtgttctctccgcaaaggccagactgcccatgtatgacaaattggctgaggattgtgcaagaagaactcgtaagtaatttcgaaggacaggtcgaggtaatattctttaatggcctggccatcgagagcctcatgtaacttcttcttatgttcctcaagatcagtctacaacccagagatgagagcaacttggttggtgttctcggtgttcctggcactcaacataatctctagtcagagaccattctctgcttctttgcaagaaggaactccagctcgaaattggctctgtcttttgggcaaaggatgcctccaagaccttcacacgctcctaaaaagcgtttgaagaccccttagagctgtcacgagccaaactcagcttcatcagggcctgaaaacaaagcaaaacaatatcagtgtcaaacaagtcaactctagccggccagtcctctcattggactgctatggccgggcagaaccctgtatggatgcccaagtccgaccaaccacatgcaagtaacaccatggtcggccagcttatacagtgctaataagataaataaagctgaaagtataactcactagggaaaggtcctaaagtccggcagagtacagcctgcaaggcacaccgtcacccaactcctgcaaagcctcatccaagaaagggatagtcctctctatatgccgagtggctgactgagaagccttcctactagcagctgaccctgctcctctactgggcctcctcgtactgtggctggcaggctgaaccataggctgctcggcgggtgcaggcccaggtgcaaggggaggcagtgatggtccactagcatctgcaccacaagaggtcatggccaccttggccctcactcatccagtaggctcatccgaagcccacctataaggcctctcaacttggaagacatctctgcagaaaaaaaaaagtagcaaagtcagaatgcattcaaaatattcagcacaataataaaagcatggtgttataactattaaataccatcatcatctaaagaagagctgtcaaagctcataactacagctttgcccttgcccctagatgtaggcatagggtgtgtaagtctatctgaagccgggtctcaaggcccgatatgaagagaggcattaccaacttgacccccacgggccaagcgcctatggagagccctctctctcctctccagattctgtacaatactagacaaaggtgcttcttcatcatccaagttagggccttgcccatctctagggtaggccacaccagttgttagcactctcacaaccccaggagcagggggtacaagccatgcatccagaagttgtccacactggttaaccggataatatttatatatttagcttacaaagaaaggatgtgattc

SEQ ID NO: 125027 - DNA, 3309 bp, Cannabis sativa
aaattaaaaaaaatagtatatgggataattcccctaaaaaatattaaaaaaaaataactaatttttcaaaataggatcgcactctctccagccacgcaagatttttttttccctatcctacgattcaaattgtttagtttctcatgcgatcaaaatcaatcaccaaagattcttcgtcaagaaactcgttttaataaaataaaaataaaatttatatcaaaaaaacatataaattcagtttttgaccttataaaaagataatatgacaaacttataaaaaaaaaaaaaagacaaaacacaattaaaaaaaatgaagcaacccacagtaaaatagaggtactcgaaaaaacacaaaaatcaaactactctctccagccacatgcataagattttttttctctctcctacaattcaaattatttagtttctcatgcgatagaaatcaatcaccaaagattcttcatcaagaaactaatttttttatcaagaaggttgtcttacattaagaaactgattttttcatcaagaaactgactttttcattaagaagctagtttctacatcaggaaactggttttgattatataaaagtaaatttataataaaaaacttaaaataaaaaaagacaaacacaataaaaaaaaaatgaacaaccccattacagtaaaacaatgctaaaaaaattactgaaaattaccctataaaacttcctaaaaacaaataagaacattaaatataagcttttaaaacctaatttacatatatatgtcattttaaatactataaaaatacctaattaaaaaaaaatcacataaattagtcaaacttaaaaatgttatatttaagtaagtgtaaattcctctattacatatacacattaattcactaacgtgctccattaggtgttcggctcaaggcccattatattataagaaaaggcccgtatcttcattcatatcaatattgaatttttataaatatgagatttttttagtgccatttatttttttatgacagaaaaaaataactcaaaaaaatatgaaaaaaaaaatagtgacaaaaatatgagaaaccaaacagtatataaataggcttaaatatataaaaaaaaaaggtcatattttccaaacaaataaatcagatttcccctgatcctctctcctatttgctcttcgattttctcttagaatcgagcgatcatctccgacaattaatctctgcaattcgatctcaaacgtaagcatttcacacaacaaatcaatcacacaaaccagaatatgcatcaacttctcaacatatatcaatgatcgatgacaaagcagaagcaataatcatcatcgccgattgtcttctccagctccggtgagttcgtcaattggttatgatcctcttcctcggttgtgtgaaacctaaaaatcaatgctcatataatcgcataccagaaaatgaaaaatcaaaccaaattatatacacagcaacaaatcttcgacaacaattctcagtataatcagaacaggtatataaactcaataatcaaaattatatatgttgataattatatatgaacatattatataagaatatatatatcatctgaaaaataaatgaaactctacaatttaaatacacataaaataacaaaattttcaatataaaataacaaaaagaaccggttaaatcaagagaaaaaaagtaagaacaaccttatataaaatctgaaataaaaatataacttcatattaaacagtattgaaaaaaccggttataaataatattaatgaaataaaatataaaaaataataaatataataaacaacaagaaaaaaataatcaaagtcataacagataaaaaatatatatactagaaaaataaccagttaaaaacttaaataaaataatcaaacataaaacttaaatgaaatcggttccaaatacaaaattataatcagattctaacaataatttctttcaaaaatggaaaaagtaatcaaagtcataactgacaaaaaaatatataacagaaaaaaaaaaaaaaaaaaaaaccagttaaaaacttacataaaacattcatacataaatttaaacagaactggttccaaaaaaaaattataataagattctaatattacttttcttttaaaaatacaaaaagtaatgaaagtcataactgacaaaacataaaaggaaaaaaaaccagttaaaaacttaaataaaacaatcatacataattttttttttttaaaaaaaaaaagaaaaaaacaccgattccaaataaaaaattatatttagattctaataatacttttcctttaaaaatgcaaaaagtaatcaaagacataaataacaaaaaaaaaaaacataaaagaaaaaaagatcagttaaaaacttaaaaaccagttaaaaatttaaaataaaacaatcatacatataatttaaataaaacccgttccaaataaaaaattaaaataagattctaatattacttttcctttaaaattacaggtatggaacaaatcgtgtgtgtgatcaaatatgaggaccaatggacaggaaatacaaaatataatgactacacaatgactggaattctaattccaaccaattcttcactagcaaacttgatggagctgataaaaacagaaataaattgtaacagaaggaacatagacttatcgtaccagatatcactgggaccaacaccaatgaagctactgagtgataattccctcaagttctacattgagctaagaaaaaaataggatggagtaattgtttctccactatccatcacaactacggaagagatagctatacaaacagtggaaaatcaatcttttgaacaaccaatacaagagcaaagcaagatagtggaagaattggtttataaacatttaataatctttttcttttagcttcgggtttttctaacaataggctctttcttatctttgactggaacatcagaactagttccagttacagcgtgatcaacgaaatcatcatcatttaaatcagtagttgccttgaaacacaaaatatggcaaaaatatagtatttagattgttttataaaaagataatatttttataaaaaattccgtgtggcagtaaattgtaaactttgacccaaaatctaatatttatgtaagaatcccaaaataaaacccataaaagttaaaacaaaaattaaatctcatactacaaatactttatttaaaaataccataagaaagtaaaaactgttataaaataatataaaataatataaagtagacgagaagaaagaagaagaagatgaagagagaaagag

SEQ ID NO: 125028 - DNA, 2180 bp, Cannabis sativa
  modified_base (1367)..(1394): a, c, t, g, unknown or other
  modified_base (2140)..(2143): a, c, t, g, unknown or other
tgattcacactgatgtctgtactatgcaaactagaactcttggaggtgcactttattttgttacttttattgatgaccattctagaaaagtttgggtttttgccttgaaatctaaagactgagtgctcgatgctttcaaagaacttcatgccaaaattgaaagagaaactggaagaaagttgaagtgtattcgtgcagataatggtggcaagtataggggtccatttgaatactattgtagactccatggaatcaagcttaagaaaattgtataagagtttttcataatagcaagttcaattaatatactatcataaatatttaaaaaaatttaattaattaaaattaatctcaagattgaaaaaaacattatagaaaactgaatcttgtgaaaacttgaactaatagtggatttggattgagtatgtcatcgtcggagttgtgtaaaccaaagaaacaactgccacactgaacaatttactttgtcaaaatatatatactggtcaataatatatcgatcctttaatataggaatccaacgagcttctctatcagactgttgtctccctatcgactagacgacgactcgcccttaagggaaatacctctctgtataatcttaatgtactgatgagatacaatcttatgataacctgtcttgatacatattacaattttgattgcacgtcatacattccaaaatttggaataataattatattatgcaattgttaatcttaaaatataagggtagcaatttgatcattcagtacgtctgaaacatctcatagttatccaaagttatcatatactgtccaatttgaatgatatcaatagtaatcgagatcatttaaattttttttagtgcaaaattttttatctatttattatgcatgtttttcttttacaaagagccataacttttcatttgaatgttatttattaatgcatgtgttattttattgttcactattacaattcatgcaatacaataaattaacaatgaaaaatataagacttcccaccataataattacaaccttaatatttttatagtataattgttccatacattattgtttaaaataaaatttttaaactattaaattaatttaaaagttaaattaataatgaataaaataaaataaatcatgtctttacaaaggtagcaattatattgtttaaagtacgtttgaagcacctcataattatctaaagttgtcatagactatcaaattttaatgagatcgactataaatcaagatcgttcaattatttttttagtgtaaaatttttcatctatttataatgtatttttttatttttaaaaaattattattcaattttcaattattattattattatnnnnnnnnnnnnnnnnnnnnnnnnnnnnattattattattattattacatatgttattttgttgctcaccattatattttatgtaatataactattaatatatattaacaaataaaaatttaaaacttttcaccacaataattataaactttacaatttttatagtataaaaattgttccatattagtaaatattaaagaaatttaaattattatttaaaaaaaataaagaaattaaagttattaaattaattcaaaagcttaaactaaaaaaaaaaacatgtctttttgaaatgattgaactcatgtcattgtagttgatgtaatattataagataattttacctcttacaccataaatattattggttgcatttattattgtaagattaaataacttgaatattttgtacttttctagctacaattattgtgttaaatagaaaataaaattaattaaaaataaatacataaattataaattataaaagtaattaattgaaaattataatagtcataaagtaaacaagtaaaaaaattataggtttgaagttcggtgtgtagttttgttagttagagctaattaataatatttgaaattaattataaataaaaaattattaattatgtttaaattttgaagaattaatttgagcaatttgattaaatcaatgactataatatactatacctaataagtaaaaactacacctattgtattaactcccataattatatatatggaagaggtttcaatggttacatttttattgtnnnnatcatggttacattttttttaagccattggattacta

SEQ ID NO: 125029 - DNA, 848 bp, Cannabis sativa
  modified_base (260)..(263): a, c, t, g, unknown or other
atcatgacaacaaaattatatgctattattatatataataaaatacaaactaattaagtattatttaaaataaataatacaccatacaattaaaatatcaaaaataataattcaatatatgtattatacttataaaattatatatatacattaaaatatttatattatacaagcaaaattatatactattattatacacattaaaataaaaaatccattcaaaaaataaaaaataaaaaataaaaaataaatatcatctnnnnataataatatactatacaacaaaacagaagtatattatactacaaaatatatataccaacaacccataaaaaatttaaaaaatcgacgtaacttaaaaataaatttttttaacaaatatgaaagggtcatttgttaaaatattggaaaaaatattaatttttttacgtgacaaaaaataatataaataataaatagtgtaaaaatattttttatctacaaattttaaaataaaaatatttacaaagataatactattattttggatcatttgctataatgtctttatttcaaagccttcaaacaagctaataattgagcaatataagtagtgtgtgaggtcactatgtttagacttgcagattagattgtaaaggcctaagcccactatatattgttttcctatcttttatttctttttgaaaggagtcccattgggtcgattttgtttatatttagaagagaaacccattgggtcgaattaaagtttcaaattttaacattttctattcatttctagttacacatttttcttagaaatttttacatgaaaaatccattttgcacaatttattacctaaatacct

SEQ ID NO: 125030 - DNA, 1220 bp, Cannabis sativa
ttttttatgtaataattttaatttagaaaattattaatataattaattaaaatatattatatttaattattgaaacagtggatattacatgattggaatgacgaagaaagtgtgaaaatattaaagaaatgcaaagaggccataaccaagaataataagaaaggagggaaagtgatcataatagacatgaaagtcgaaaatgagaaagatgaagacgacgagtcatatgaaactcaactctttttcgacatgttgatgatggcgttggtcactggaaaagaaaggaatgaaaaagaatgggctaagctttttaaagatgcaggcttttcggattataagattacacctattttaggtctaagatctcttattgaggtttatccataattaattaattatacttataattaagtagtgttaatggttgtgttgtttgtgagctctttctctctctattattggtatgttgtaataaggaaacataattaacattatgagtaattatgtaagccaaaagaataagatatattgatgagactcatgaagtttaataataatgtgtttaaattttaattatgtttgatatgtattattttcctttcataattagtaaaactttaacaacgtttgttgttttatatgatgagtttctttgttttttttttttttttttaaatataatttgacttttttgaacacatcttttagatttttcaaataattctaattttctaaaattttaaagtattaaaaaatattaataagaacttgagaaaaatattaaaaagaatttggcccataaagtgcaaccaaccacatgcattgtttcatcataaacatgtttttttttcctttttactaattaatttaacttaccaaaactctctataaataagtttttatgtgaatttatttcctcataaacttgattaattatcttttatcactccttgttaatttggctattatattgtacttatctctaacaatatttgttagtggttagttacattcatgcaacatttaacaatatataaacacattagttagttcatcaatcttattattagagtttttgttgcaaagtgatctatacattaacatgatatctagatgccataaccacttgaggctagctcaagtggtcataggtgggtatgtatgtgttggaggtcctgggttcgagtcctaggtaaaacatggttgtaatatataaacgc

SEQ ID NO: 125031 - DNA, 1567 bp, Cannabis sativa
  modified_base (47)..(48): a, c, t, g, unknown or other
attagcaacgagctgcacagtacttttaaaaatcacgtaatacgccnnagatagttagggtgttacacatggcatcatcaagagtttctcagccatgggccatccttaagtaaatgggcaggtagaagctatcaataaaaccctcaaggacactctaaagaaatgccttgaggaaccaaaagccaactagtctgaattgctctcagaggtcctatagtcgcataggactattgagaagacaaacactgggaaaactccatttgctctagcttattgctatgagccaatgttgcttgtagagctagtgccaccatctcatagcagaacaacatatgaataacaaataaacaataccctgctggtagagtcctttcatgaagtagaagaaaaaagagaacaagccaacctaaagctagaagcctaccattaaaaggtagcaaggcacttcaacaaacacgtcaagagcaaaaaattctgtataggacacttggtgctcagaagagtgtttccaaacactaaagattcagcagtaggcatgttaggatctaactgggaagacccttatcaacttatagagataacttggaaaatggtgtcaaagaaagttatagttttatatgatgtttttttttaaaaaaaaaaaatatttatttttttaattgaaccaattaattgttttaatacatttattgttagcttgttcatttttaattactatctaacaaattagatattttgattttttatttttgtagtagatagaaagattttttaaaattatacctaattatatataaatattcattatttataatatttttctgagaaaataatagtaatattataatttaataaaatgattttcataattaattatataatcaaatttgaatttaaatgacattataatttcaataaaaattataaataatctaaattgaatttatataattcatataaaataaaagagtacaataaattaaaatctatccaatatttgaattcaaatctcaattttaaaatatctaaataataaaaataaaaaataaaataatgacaataaaataaaaaatagtatatcagtctattagatgaacaataataacttgatggtctttttttttttctttgaaagaacaattgaacaaacattgttcaaataaaaaacatcactaagaacatattttctagaagaaaaagagaagagtgcatgagaatatatgtacataaaaaaaaaaaaaaaatcatgcaatttaatttataactttctatctaaaagaaccataattatacattactcaaagacttatatatataaagtcaaagtatatttttaaatatatattaaaagtaaagtacatgcattgaataatatggtaagttagtattatttttaagtaattaaatttaataaaaataaaaaaaaatgaaagaattaaaaagataatacataaaagtattttgagtgatcacaaaattttcaaattcttcacattatgatctcaagcaccacgattccgagcacttccaagtccagtgctaatttagaaaaagatatttttttttt

SEQ ID NO: 125032 - DNA, 1074 bp, Cannabis sativa
  modified_base (73)..(74): a, c, t, g, unknown or other
  modified_base (445)..(445): a, c, t, g, unknown or other
aaaaagtcagtaagaaggctactaatgtccttcaagcagtcagtgatgatgattttcagactcagaaggttgnngcggaagttgtttcaagcaagaaaaggaaaattgttaatgatgacgctagtgcgtcaaagaaaagtaaaactagggatgtggtggagaattctaatttggtatgtctttttttttcttatattttttttggttgttttgtgtattgtatttgttggacaaatgtttattttttagttgtatatatattatctatttgtttattttaatagttttttttttcattttcctttaattgtattgtgttttatgttttttaggataaagtgtgtgaatctaatgttgctgatgatgagaagctgactaatgttgctaagaaagttaaaaagaaaccagtttccaaatcccatggcaagaagaagagcgaggctcntgctgttgacgctccattggtaatttttattttctaaagaaattggtttcttgctttattattttccatgttttcaggttttctgttgttttcaggttttctgtttacagatttatttgaatctggttttttatttgaatctggtttctataatctatatgtttttattttaagtttttagtttttttctttgttttgggtaactagtttttgaatttttttttttttttttttgtgtaactttaatttcgattgtttatattgttttttctctcacaggaatattattttaaaattgatgtaaagaagagatttgttgggacaaagtcataaaaggaacaaaaatcataaaagttatcaaaacgaatatggtgcaaaaactagcgtagtcctattagcatatacactttaaatatatattaatataatttagtaaaaaaataaatcaaacattcatatataaatatatatatatatgtaaataacaaatacgaataataaacatattgaaaaatactttcacaaatttatatacatttatattgagcaaaaaatatattcttaaaaaaatacggaattactccatatactatttttttcactttttttttttcaaaattacggtttgg

SEQ ID NO: 125033 - DNA, 939 bp, Cannabis sativa
tgcaccatcatgtcagagtggatgtatttagtgaactttacttccttggcttcctccaatatgagactaacttaggtcaagaggacgtcactctttttgcttagggaaaagtcaattatgctagtattagtgggttggactcttctaatgtcttgcatgctgatgtgttgtgaaaaccatgtcttttgttacaatttaatttgatgaatattttgtttgctttgtgtagatcaaccagtcactctgtaaatggtactactaaaaaaattcttaggtagcatcaaaactcaatttgacgagattcaagagatcatgcaaggaggtagagatggcgaaaagaagaactaggcttttgaaagtagatctcaggagccagcacctccagcctcaaattcagaagctgcttctaaggctccaggcatggaggttgcgtctactgtcatcacaaacctgactgagctgccctgtttgtggagcctttaaatcaagttcctatggagagctctagaggggatagctcaaactgcaacggacctgtggtgactaacgggctggttcatcttatggtggtgccagtaaaaaggcaaaggtggagaccaaagagaaggtcttgtagttggcaacctcaaggaggcagacaacgaatactcagtcctagaaggggtctaacgcttctgacagcagaaggccacctaggcaaagcacctagacatcaaaggacaatcaagatcctcctcttccaccccacagtgcctaaagttattcctgccacctctagccaactatctagggaaatgactgaactacctccactacctctgacacctttcactcttcctgttaggcctttgcatttgacggaaggggatgaagcctgcctggaagttgtggatcagttctaccataagaggcatggttgtgaatttgaggagatgaaga

SEQ ID NO: 125034 - DNA, 636 bp, Cannabis sativa
ctacacaaaagagatcactttggtaatattttgtttcaattaatttaattaaatattagatatccttaataaattttaaaaccaaaatttgaatttagttgtctctgtattattattattaaaataataaccataataacaataaaatgcaccgtgcattttttacatacgatacacaatataagcaaaatttaaaatgaatatgtataatacatttatactttatactgtagtgaataaatgcctatattgatatttctcatcaatccagcggagataagtgctcatataagtgtcaggaaaaagcagcaaccaacaattgaaatcagaagaaattaccaacaatcgtatattatctaaattatatgaattcaaatcaaaagaaacaatcgtatgtatatatatacattaacaaaagagcacttttatatatatatatatataaaaatacatgtgcgcttcaatcgcagaatctgatttcacttcaatggcatatatatatataaactccaatgcatatatataaacgattattaagcatgaactcatcaaatacaaaataatttaatggaagaccaataatatcataaattctcaagaattaatttaaggatgctctgataccacatgttagaa

SEQ ID NO: 125035 - DNA, 1279 bp, Cannabis sativa
aaatatgaggttggatggttttttgcaagtaaattgataatttgagattttgccatgaattacttttataataaatttatgttttagttagcataagggctttgatagactatttatagcataactatttaacgcattggcatatgtgtgcatagtgttaaatttattgagcatcaaacaacacaatcagagattgtacaacaacaattatgctcatctaacacaatataatattatcttatttaaacatcaaattttatatcataaaagacatctttatcttctaataactcatgcttctcttatactcttactatcttcaatctacacatcaacgaaaaaaccaagtatgcaaggattttgatgaacgctactcttatattctctcattcacacttagccatacccatctctcacaccttaatcacaaaaataaagagcataactattttataaggaattataggctaattagacccacatgcccaatgtaagagaattaaattgttttggcctaatgggctgaccaaagacattttagagcgtgtccatgggccccaaacatgttggtacattatgtcaatcccattattgcccgatagtaataccattcattatcgattatatagttatcattataagttaatacccacactgagtgagtaacttaattatatatgttagtccacaaaaaatattctaacattctctcacttgaactacataattacatacatatgtgttctcacaatgcaatagtgtcaacagacagaaatatcaagaaacactaatatttataaaaataattatgcaataaataatgagacatctgaaattcatgaaacatgatgataattactgatttggattcactcgaacataacaccgagactaagccactagatcacatcaacaagtgtgcatagacaatatcaaagagctatccagaatatccatttatttaacaaccaataataattcttaacatgtctatcatacatgaaaacaataactcccactcattaaataaatctttggttcctaacaatccaaacaagaaatgacttagtacatactttcacgtaagtcgtgtcaatgtagcaattgacatgttgtttgtaagtgcgtgctatggtactaatagaggaccccacaattttcttattacatgtggaacgtcatcaccattaatgattaataatactcttcaagttcaaacagaaagataaaattatgatatttatcacataagtttagtaagttcacaatagagtcaact

SEQ ID NO: 125036 - DNA, 720 bp, Cannabis sativa
aatcacatcatttgtaattttggtgagagacacgctaaaacacttttcgagaactttaaaaatcaaactaggaataaccctatcaatgaaagacatgaccatatcctgaatatcaacaatttgaggcaaattagggttcttggaaaaactccaatcggtaaattggtttcccaaccggctaaccggttcactagggtttcttgagggacaaatcggtttaccagtttctcaggtcctactaaaccggttaaccggtttaatgcatggaaacccaaaaattgatcccctaaacataaatcaaccccaaactctccaataatctccagaatacctatatacactatagtgaactaaactcaagcattcaaacacagtaaacaacccaaaaaataaaaataccattagagctcgaagcttgagctctcaagctccaacctcacccaaacttcacaactaccaaccaaatcagctctaaccaacctaaataatctcaaccatacaacagaattcaatctcaaaccatctcaacacgtacagcaacttagaatcaaaattcaacaccaaaacctaactttcatgcaagaaacacaaagagggagcgactagggaaaaattaccttgagcaaaagcactcaattccttcaagaatcctcaaaaataaatagaataatccaaactctagctgccttctagcacaatcgagagagagagagagagaga

SEQ ID NO: 125037 - DNA, 507 bp, Cannabis sativa
taaaataaagattagtttttcaatagataattaatcatcatcatccacgcaattccttaacctgtgcccttggagaacaatatccattaaaatagttgatctgcatatatatagctccaattaagatcatgtttttatcgccatgtttaagatcgccccattgaccctttcaacgagttccaaaagctatcaactagatgatctaaatcttcttctcccgttaatgaagcatagttgctctgtccaacacctttaccaaaataaaaatcaataaacaaacaaactctgttataacagatcaaaagagaacaaacacaacatgaatacatattatatattacttcaaacaaattatataggggtgtttggtaagatggttagatttggtgagaatgagattgttactttcattccgtttttgcaagtttgtgtttccaagtcacccctactttttacctttatctaacactacaaaaaatcttatttttagtcacaataaaacttgtg

SEQ ID NO: 125038 - DNA, 877 bp, Cannabis sativa
tgttttgaagtgtaaaaataaaatttattctttgattgtagttaatttaaagtcaaactctttaaatactttaaagtttagtacgatcaactccctagattagaatagttaggattaaactcttcaacttctacaattgttttgttttgtacttattctgtacactttagaatgttaattgtcaaataaactgccacgatgtacacaagtatacactgcagcgaaattttattagtccaccttataataataatttaaatattaaaaaaataactttaaatatttaaaaattttaaaaaatctgaaaaataattttaaaatatttctttttcttcttcttcgtgtccaccattctttttcattttcttcttcttcgttgtttcttcttcttcgtttctccacaaatggacacaccaagaaacccaagacgtaagaactccggtcgcttgctttaatgacggatctgggatcccatgccttctctctcactccaccagtctctctctctcttcccgccaatgatgacaagccaagagaagctccttcttgacgacgacagggcttttatatatatatgattttttttgattgatttcgtattttggtttgtggtatttgcgatttcaaataatgcagaatcgattgtggatttttgtttagatttgtaaagaaaattttaaatttaatatttttttttttttttttttgtaagtgtttgtttgtttgatttaggataatagtggtggtggaggtgggaatggtgggatggtattggtaacagtggggtgcctggtaaaagtggtggtggtggtgacaattggatagtagtagtggtggtggtggtggtggtggtggtggtggacacaaaataaggaaa

SEQ ID NO: 125039 - DNA, 3646 bp, Cannabis sativa
  modified_base (582)..(583): a, c, t, g, unknown or other
  modified_base (2584)..(2594): a, c, t, g, unknown or other
  modified_base (3453)..(3454): a, c, t, g, unknown or other
tcattgatcttatttgatatttaatttaatttgataaaaataattcaaaggttctcgacaaatcctctttgacgaaagaggagtcgaaatgatataacttcctgaccaaacctttttgacgagagaggggtcgaattgttatagcatcttgattaaacttttttgacgaagaagggatcaaacaactataatttttgataaaaaaaacctatctgacgagaaaggaaaatcaaaagttataacttgcgtataaaactgaatacaaacatttcgcacgagctaggaaattactaaaggagatattaagacgtcctgataaaagtacttgaacctagaaaatggatagataacctaattattcatgtgagcaaatctgaaatatacaaaatgattaaatcattagaagtatattccactttgcttaaggcagattattactaccatagcgaggaagaattgacaagtgcttgaaaatcaaagagtttggtagataactaactacttaaacgagaagattacgagcaatggaaaaaccccaatgtactatacatttgatcaaaatatagttgcttacattgtgannaaaaatgcaagcaaacacaattgtattaagttcgaatgaaaaatggtcaaggcatttaagagaagaaaaaaccccaagttaggttataaacttgtctttacaaaaatgccactaggggcaaagcatgaatcaacttcctaaacaaagaatgtaaggggaaggtcagttaacttgagaaagaccgtctacacatagcttggagaaaggccagctacacgtagctcgagaaagaccgcctacatgtagaaggtctcaacctctgcatagaactcattccccctcattataagatcccatttcttaagccgagaccttactcccaaccacaagaaattcctcgacatcagagaaaggttgtcacaaaggtcttctagtgcaggtttgggtcttaggtttgttggatcctctgaaagaaaccacgccaacttccccctcatattcattcaaaacaacggaaactttcccacgggattccttgttagcctgaggaggaccattaagaacactcataagatctatgtctattcctgcggatacataaaaaaaagggggtcaatggagcaaataataatatgtatgatccgactcaaaccaccattcacaagggataatagttaacctcaagaatcacttgtaaagatcgctcataacgatctatggggttcccttggtttggatagctcagaagctcctcagccttggaatctgtcgtttctggttccaattgagttttgaatcccatgggaatgaacaaagaaaaaaaatggttggtgcatcctggtgttatgaatttgggcaggtgaaattctgaactcaaatggaacattttagcaagaaagagataatcaaatctcaagatggatctcaccaaaaaaccagacgtttgtgaaagatggcaaggctaagccgcccttttatacaaaaagtccagtgacaagaaggccaaagattgggaaatctaatggatgggagtagggttgactatgaagagatgattcataattaccctccaaaccgtacaactgccagaatcaaaggacgtgtctttccaaaaaagggattatgacgaaaatgccctctataaatattaaaaagcacttttgagtaaaaaagaactttttatggggcaattgttatacccaaaattaggctaccatctcagtgggggacacgtgtcgagataaaaggaatatggatagatacaatcgctttttatggaataaatcattaattacgtaagtatcagagtataattgtaacctgctgactgtaaggtcttatgcgatgaataaatatacaaaatgttgcgtagtatattaacgagaaaccatatgtcgctaaatgtgtatagcgagggatcaagtacgttacatttatggagacgaaagcgacacatatcgactttagtgtataatgtacaaactaagtataacagtcgggttggctcaagacctaatcagcgaggtgcctatcttgctatgggaaggcttcctataacttcacccagttaacttcagacatcttctcagtgaggctcacaatcttgacgagtcagaagctaacattcgaacgagcctcaaagaactctttgtaaataagaaccacgatcatcacaagacgtgcatcatcggccttggaaggaaaaatggccccagttcgctattatgatcacttgaaccaagcttctgttgagacatccctggatacaacaattaaagacgtgtttaaatacacgatcattttgacccgataaaagcagaaaaatcacactatatgattctccaatcataaccgtatttacacaacgtgatatgtaatcaaatcccatgattttaggggatgatcgttgtaaaaagattacagtcaactttttaattaacgggccactatgtgattataaataatggccagaaagataaaaaaaaatggaccgaaaaactcatacaaaagaggccctgagaaaataatcaaaaatccgaataagattgactcgtggactannnnnnnnnnnaactgcaaaaccacataaaaatcctgtgtgtttgtactttttattttatagcttttattttttctgtgtgaaattgtcactgttaggttcaaatttggttaacaaaaatctgcgttaacaacatgtatggtatcttcagtaagctacataaacattttgatgagctaattcagttggagatggttgaaaactcaccaaaggttgcagatacatgccattgtgtgttctgtgaaagaataaacttgggatctttcaatactagaaaaataattcccataacggtcaatcctcttaatacaaccttctactaactctcattttccgttcaaaagctctacccttatatatattatgtgaataatcacaagtatttgagttgaacccacataaattataaaaagtgctttttacctaaaaaatggataagagaaaagggtacctatcattgatgcccaatcttaaagctctagtcatatgccagaattcattgccttgaaattagacaagactaccctacaatttgatgtaaagtaacaataacttcattttctgaccttcatcaaagtaggctcaagtacaaaagaaaacaactttcctgaaacaaataaattgtataacaaatatattctaagtttgaatttgttattctccaaactgccaatatgatatttagcacaaattaaggaacaaccaagctttggtctttcacggatattttctcaaacacaaagacgacatttcaagtcaaacatacataaactaaaaaagaatagagagaacaacatatacttgtagtatatatatatgtaaataaatatatataaataagtgtaaacataaataatttttttaaaaaaanntatatatatataaaaaataaatgttattattatatatactaaatacctaaatcgtcaatgattatggcgatggtggcgggcttcagttgcagcagtggtggtggttcgtcgatagtggtttgtcgatgagagaaagagagagcagagggagatcgcgagggggttggcctggtgagagagagagagagagag

SEQ ID NO: 125040 - DNA, 894 bp, Cannabis sativa
ccataataaaaatgtaagtatattctataaatgccaatgagagttataattatgtaggattaacatattcaaaagatccaatcatttaaacatatcattcttgacttttctgtgatttatataagccatccattaatataataaaaccggggcatttatatatatagttaaataaaaattctataacaatatcacaagtaaaatagtgttgctctgaaaattgagctttcacaggttataattagccacaataaatatgtgcacatatatatacataagctactttactcttacatgaacacgtgactcaacttaattactattaaagcttttgattacttaacacctttaatattaataataacaaaataggccctttaaaatagtttagcttcaagttgtgatgattaattatccacaatcctagacatggagaattagtactaacttcatttagttattaattatacacaggaaaaaattttagcgagaacatattacttttgcttttactttgatatagagaaattaatattgaaatatttttatatgtcggcgtgaactaggcattctggatgtttttgaaaaaattataaataatttgtaatctcaaaagtatagaactcaaatttagttttaggcatttgttttatttttattttacacacggtaaaatattaagaacttttcgaaaacggacatgatatctattacaagtacaatatccaacacaatacatgtatatactaagtaatagtaacattgattgctaagagttatattagaatttctattagttaattatcaattaaatctaatacagtttaattatattttttaattatataaaacttaatttatttataatagattatatctaactaattttattaa

SEQ ID NO: 125041 - DNA, 3573 bp, Cannabis sativa
  modified_base (46)..(49): a, c, t, g, unknown or other
aacataaaatgttatttttgatcttattaataagtaaatctgattnnnntgaaatgagttttatttagggcacaaaacccaacagttacttcatatgtgtatggattattggaaactgaataagcttactatcaagaataactatcctctaccctgaattgacaatctgtttgaccagttgaagggtaagatggtcttttcaaagatcaatcttcgcacaggttaccatcagctaagaatttgagaagaggatatctcgaagactacattttctactaggtttggacattaggagtttctagtgatgtaatttggactcaccaatgccccaactacatttatggatcttatgaactgagtattcaaagattttctggacaagcatgtgttagtgttcattgatgacattctagtttattccaaatcgaaagaagaacatgaactacatcttagattagtacttcagtaatgacgcgatcacaagctttatgctaaattcaagaagtgtgagtttaggttaacacatgtctccttcttagggcacatagtgaataaagatgggatcatggttgatctggccaaaattgaagctattcgggattagccaacaccaaaatgaactactgaggttagagccattttgggtctagttaattactatcgtcagttcgttaaggtttccttgaaaatagcaacacctttaatggaactgacccagaagaatctgaagtttgtttggactgatcggtgcaagaaaagttgttaagagttaaagcaatgcttgattaccgcttcagtattaactttccttttgataaggaaaagtttgtcatttattgtgatgcctcgagacaaggtctaggctttgtacttatgaaaaatggaaaggtaatagcttatacttcttggaaattaaaggagtacgagtagaggtaccctactcataatctagagctcgcagtagtagtatttgcactaaagatttgacggcattaattatatggaaaaaaatgtaagatttacactgatcataaaagtctaaaatacttctttagccagaaagacctgaacatgagacaaagatgttggcttgagctggtaaaggattatgactttgaaatcctttatcatcctaggaaggccaatgttgtagctgatgccctaagtagaaatggtcaaaaccaggtgaatacaatgaaccatatctccaaacaattggcagatgaaataacccgagctaacattgagtttgtaatgggagggtttgctaacattaccctgtagtatactcttctggaaagaattaatgaagcgcaatatcaagattcaagtttagtgaaatctcaagacagggtttcagcgggaaaaactaatgatttcacagtggatggtaatgggttgttacggttatgaactgtgtttgcattcctatggatgatgatattaagagagaaattaaatgagtctcatacgactccatactttattcatctggggacaacaaaaatgtatcaagaccttaagtccatattctggtggcctggaatgaagaacgatatagcagagtacgttgtaaagtgtttaacctatcaacacgtgaaatttgaacatcaaaagcctacaggtttgccgcagccactgaaccttccaaaatggaaatgggaagacattaccatggactttgtagtttgattacctaggactacgggacagtagaactctgtgtgggtcatagttaacaggtttacaaagtcagaacactttttacctattcagacaaatttctccattgatcagtatgtagactgtatgtaagagaaatagtttgtcttcatggttccctaaagtccattatttctaatagggatccggagttcacatcaagcttctacgagagtttatatcgagctatgggtactcaactaaaattcagtatagcattccatcctcatatagatgaacagtccgaaaggaccattcagattttagaagacatgctacaggcatgtgtgttagactttgaaggatcagggtaatgtaccttcccccgattgagttctcgtacaacagcagctatcaggcaacaattgggatggctccttaagaacaactttatggaagaaagtgtagatcacctattcactgggatgaagtaggtgagagaaagttcttgggtcccgaagttattttgtgaacaagtgaggccgttgataagattagagcgggaatgctcacgactcagcgtagacaaaaaagttatgctgatccaaagcgacaggatattgatttccagatcagagatatcgtatttcttcgaatatctcctatggaaggtattgaatgctttggaaagaaaggaaaacatagcccgaggttcattagaccttttgaaatccttgagaggataggacaagtagcatacagattagctatgcctccagcactggcagctgtacatgatgtgtttcatgtttcaattcttcagaaatacgtgtcagatccgtcccctgtactgagttatgaagcattggaacttcaatcagaattttcatacgaggagcaactagtgcaagtattagatagaagagagaaagtcttgagaaacaagacaattgcactgaccaaagtattacggaggaacagttatgttgaaaaggcaacctgagaactcgagatagatatgtagcaaaatatctagagttattcaagtaaatttcgggacaaaatttccataaggaggggataattgtaataccctaaggtttaataaccggattaccaaccctaactagattaattatgtattaatgagaaattatattgttatataattaaatatgtgaaactattctggtttactgcatttaaagacctcgttggcgtgtcaggggtattttttgtaattttgacccaagaagggtaaaattgtaattttatgatatattgtgcttatggactatattattatatagtatgtttattctatctatctgcaggtgttttctaacaagttagagtggtatagtcacaatcgggttatttgggccgaaccgggttcgggacccaaaatatatttttaggatttacttatggcatttatatgatgaatgagaaaatttgaattattgtgatatgtgtgtgagtgaaatgactatattaccctcgttatatgtttgtgacattaattatgccttagggcattttggtcatttgaccacataatgcaaattctaggttctggaccccctggccaactctctctttctctctctttgattggtatttttcaaactcaaattgtggaaaggagctaggatttgaatgtgatttgtgtgtttctcttgcttgaagcttaaggaatttgtggattaccggtgcttgcttaggaacacctagggattcggaatctccacatacttggattacgaggtaagatagcaagctagcacgtagagttaagcagagtggcgctcgtgtctgttattatacgtaattatgtgagaaaccaggattagggttattaccctaaaataagtggttatgtggtctagggttattaccctagcatttaag

SEQ ID NO: 125042 - DNA, 523 bp, Cannabis sativa
aaatattatgacgtcctaacaaaataagaataaattaatgagaattaaattaaaatcatatacatgaggaccgacccctcatcctcaaaaaagaaaaaaatcaaaccaaggaactttaaaatttaattaattagttatggtttgcacataacatatttttcttcaaattaatgaataaatataattatgaaaaatataaataatataattgattaattaattaatggtatatatttatcccttgaatatccttaattataccttgtattaaataattgttaaacagttatttgttgtacaagtaactaaaattaatgttttatttttattctatatgttgcgtatggccttaattataaatataataataataattaataaggcttaagcgtttaccattacaaaaagtcttatctttttcacagatcctatacatattgtcactaccaatatattattattattattattattatcgcaatataattaattaatttatcataattaatacttataaaataat

SEQ ID NO: 125043 - DNA, 1857 bp, Cannabis sativa
tcccgagccacattctcccgtggcgcaactgaactttccattgtggtccattgagcaatgtgagcggccccagaatctgccggaccatggtgctgggatgtttagggataaggaagcacttggagctaactcaaaccctgttgaaggtatttgggggctccctgcaccagtgacagttcctggccagactgtaaagggacaactattcttgaatgtgaataatctggcagagtcagctcctacattggacacatgtattgtaagattttatttgtaaattttctatagaaaaatcataagagtacaattcaagcctaagacaacaagtgtcaaattcaagagtaaaaactaaaatgaattgaaattcgaaaacataacaaaaatgtttagatgggacttgcctgagaggaagattattgcaaaggtgaaaagaaaaaatgtgtgagaatccattgcaataatgttttaggttgctcttgtttcagctacttttgtatgtggtgtgagtaaactaatgttatgacttatgaggttgaggatcaacacaagagattaatatatgtagatgagcattgattaaaaaagtttactttattttctttgtttttttattaacctacaaaagttactaaaaaaatgttctttattaatgaaaattacagcataataacaaaggatggaatttgtatccaaacaaggttattatggccatgcatacataaaatcaaataaaagcatttaaaataattaacgaagttgttagtggttgatcaaaattaggcagcaatgacatgacaccattgggtaaaaccaacctctcaaagcattgaaagagtgtgtgtgatgtttaatagtcatttaattaactcatgcacgttctttgaaacatgtcaatctctttctataactattttaaagaaagaaaaagaaaattcatcatcaaaacctaaacaatcagattataagaaaatatggaaatagttggtgggcaatcttaaaaggtaaccgattcatccataggttaagaataacaagtggaagattgatttagaacggtattaaaaactgtgaataaaaactaaagctggtataaattaacttaaaaaaaaattattttaattaaaaaaactctagtaaattattttgtactaaaaatatatttaattatttataatatattacaaaaaataaaaaaaaaatatttttttaaaggaaaaaaatattcaaaataaaaaatatttaaaattcttattttttgttttattttaaaaaatattctgtatttttattattaaaagtccacatcaacctatattacaattttttttacaagtgataaaaatataatttaaaaatattaaatttttttttatcaaatacatataaatttatactatgagaaaaataattaaaaatatataaaaataaaaaatagtatataacataatttttttttaaaatatttgtaattataatgaactagattataacattattattactataataaaattttaacaacttacaatactttaaaatttataatttaccatacagtctgctcaactttaatctacaattctattacatctatttttactcacaacacatctataattgctttttctcacaacacagttgtgctaaattggcccttagtagctccaaaaaaatggcaagaattttatttatactccaaaaaaaatataaatacaacatattcttcttcttcttcttcttctataatttatactaaattttttctttcctattacaatcaaccatttttttacatacaatatatgttaaaaagaaaaactaaaaatatgagttacaaaaaactaaaaaaaaaaaaaa

SEQ ID NO: 125044 - DNA, 2249 bp, Cannabis sativa
  modified_base (44)..(52): a, c, t, g, unknown or other
tcatatttagggtgtttaaacaatatacttgtgagtagatctannnnnnnnntaaaataaattccaacaccacctcccacacttgtatataatgattccatatgggagatggatcaaaaagttaacaactttcgattatatggcatgatggagctttatgccacataagctggagtgcgcaacattccaaggcttatgtggcataggttatctactgcaaaagtgtcattgtaatatccaagattagtatatggattagaaactctaattaaaatagattaattataattgagtaattatattattatataattaattatgtaaaattatttaaaaattattacacttaagaccctatttataagtgaagggtattttttataattctaaactgagaaagataaatttgtaattttgatatatattgtgctaatagactatactattatatagaaagttcatattatcttgatgtaggtgattttgacaagaggtattttggttcgaatcgggtttggggtccaaaattcctgaactttgtaattagagcataatttaaattatataaatgtgtgaatatattggtgtggttcttaattgttgtttatattgattttgtgtctaagggcaaaatagtcttttgattaatttttctataatgaagtacatgattcattttgtgaaaattaaaggaaaacaaaattattttctggttctctatctctcaaactgaccccctctccctctctcaatcacttttgtaatttctttagagaatcttgaagatttgaatccatttctttggtggattttgagattggaaccttgaggttttttaagtcataaatttaatctttgaattgaaattatttttagttgaaaatgcttattattgagctaaaattgcatgttaaattttgcttggtttgttgatgaaagtcttgtttataaagctaagttttggttgtaaattagctaattatttaagttttacagcttgatcttgtttaatcttttgataatttagttttgaatttagtaatttgagtatgtttaaggtattgtgcttgtggtgagtttgaagacatttgttgcttgtaactttgtcatttagaataattttagtttgtgagatgggttgtatattttaaagtgtttaaacatgttaatttgatgtatgaaatgcttaggaaatactttagtttggtttgaaaattaattgttaggttttgataagttttggtaggaattggtaaatgctcgatttcggtcaaaacttgattttttggtcatttttggatttttaagctaggtcatcgcgaccagatatagagtttgtcgtgatgaggctcgaacctagaatatggatagcccctgcccaagctctaatcgtggtgagccttaatctagtcacaacgataattggtcgcgactagatgacaacaatagttcaatttttgctattttgttttaagcataacttttgactccaaaatttgattttgaagttctatatatcgttgaaaagatcattttgagctctgttacatcatttagaattatagtcttatatgtggatatttatgaatgtgattttgggattaactctattgtgtaaaaactcaagaattatgactaggagtaccagtgcttagttagaatcacctgtggattgagatttctccacatacactagaaatcaagtaagaaatcaaactaagcacatagagtatagcgtggtggcacaattatatgatatttgattgttattgtgaaatcatgatttatggttattaccctaagtgcgtcctgtgataaatatgcactaatatgttaaacagatatttgagtagagttatgcaagtaaggcataatcagattagactgagtaactataacgagataaatcctagtaaggccttatatgtaaaagagacgtgttagtgtaacacgtaggtctatgctatatagatatttttttaaggtatatagagacattaattatagtggtattatagtatatgaaataatgtaatatgtagtgcggtggcatatttatatatgcagatgcataatgtatgaaaggaaattttataattgttcataatgtattattttttgttttgttgggccttggctcacaggtgctctattgtgcaggcaagagtaaagcagtgtctggttaaccatgagttcaagggttgtgttatatatgttctgaccaagctagatcacgagggttgggtcca

SEQ ID NO: 125045 - DNA, 650 bp, Cannabis sativa
ttttttaacatttaccctttaaaaaataatgatattgctcataagttttctttaatgaataaatactattggacttttttattttataaaaagttgtcgattgatatcttttattaaattacaactcaattttttttttgtttttaaaatggtataaaataaattctgaactcaattttaattaattttttttaatataagtaacttaaaattagtttttaatacaaattgatacaatatatatataaatagtcttgttataatactttatgctaaggttattattaagttttaatttgacgaaaactaaattaagaatctattgtgtattattttaaaaaacgtagggtaaaaattatcattaaacaaaataacgagtccaaacaataactttgtaaaacacaaattctaaaatagtattttaatattttataaaacaagtttaatggtttagtttatttatttatgagaaatactaaatggcactcatggtgcttagcacccttgtgaggtgtaatatcgctagggattggtgcaactcaatatcgagtaccgcttattttagtttaatgggtaaataccattttagaccttgtgctttgcaaaagttactaattggactctctataacaaaatagaccttgtatttt

SEQ ID NO: 125046 - DNA, 774 bp, Cannabis sativa
taacattcctcatgagcaatctacacaagagaggttgctttggcgacatcatgtttcaatcaactcatttagaatgagagacaaactttaaaattttagtgtgccaaagatgcacaaaattgatccattttttcttttttactttagactttaataaattttttcggacatatataattatatgataacccatatatataattatatatgaaaactatataatatatataatttgaaacttaaaaacttattagtccaacactatatatccaaaatttgaatctttaaccaaattaaaaattacataatctttcaagtaaactcattgtccaaaagtctaaagtctagaacaatatcaaaatatatatgaaattataagagaaaatccacatgagacaaaacatataacacaaactctaattcaagaattcgtgaattcaatatcattcaaattcagatgaaaaattaaatatagcaacatattgcattaactttcataaaaaatcattcactagtctttaatacagattaatgaagttataaaatatcacacacatatatatatgtatttatataatgatacctgtcaaatattatctctctgtttaatcatgcacatataatttatataacaaatatatgcactactgcttgtcaccgaaaacaaaattaggctataaactttaggttaattaggattttttgcccttgaattttgacatgtattaaattatgccctatgaacttttaagatcgttaaaaatgccccctgaa

SEQ ID NO: 125047 - DNA, 3301 bp, Cannabis sativa
  modified_base (48)..(48): a, c, t, g, unknown or other
  modified_base (367)..(378): a, c, t, g, unknown or other
  modified_base (706)..(707): a, c, t, g, unknown or other
  modified_base (2614)..(2616): a, c, t, g, unknown or other
tatccttaaaacacttagcttcgtttaaatgatatttcagtaaactantataattactaaaataagagctcttctttttatctatattaagccaagcttgaaggaaattatcattttacttctatgttaatataaaagctatatatttcgtatctatgattagcactcccactcaattgtactaccatgttcctaagatgtaagtattgagtcaatccaattggtcagctttaacgaataacctaaggagcacaaataacagagatgagattgaacttaatcatgatctattgatctaagagcaactaagtgatattgacttataaagatacaacggtaagtttataatatcttatccaagttcaannnnnnnnnnnnccgatgtatactccatacatctcatactagtatactttaccaataccttggaaaggacataacacttatccaacgtgtgagtaaactttatcgctaattatcacgttagtgtaaatccagtgcactaatgaatcatgggacttaaactttaaagtatataatcacaattaccttccactatgatggcatcactgtaattgtgaacaacaatatattctggatttatcaaaaattgtatattaaaatataatcataaaaataacatgttaacttaaatgacttctaaccttctattgattacaaataagattatattgaaatgggtttnntttagggcataaaatcctaacaaaatcccacttgcactaacataaaactagaagtttatttcagtcaatccattctcatgatattcatatcaagtgtagtgtgtttcactatacccaaataataggaactataagattgtagtaagcaatagctttctctaccattactttcttctgtgttcataaaacattatgcaacatcaaatttctatatgaattactcctctatgaatactgaattctttactacttgataacttcatctaaatgtacagaaaacacaactctaattctatccaaaatggaaaatcagtcaagaacattcttcagtttaaataactttatagtgcctttcaaaagcaactaagttatttagcttcactggtggaactaaattattatagatgaatttttacactcttctagaataattcctccatccccagagtaaccaccatctctaataataagttctgagttgatgaagatttaggaattctaaatatacacccctatcacctaacatataggtcacttttagagattctttcttgattgtctcctaatattctttgtttgattacatctttgagggctctcactcaacagtaggagtatggtttaatgcatactcaagtgcgcatttaacctcttaatgttggtactgaaggacatcttgttgtgacgttttatcttagtttagaaacattaagttccttctagactaagtcatcaacatatcattctaatattaacattaacgtaaaatacttgcttaagattaagtaatcactagagctaccataaaacattccataaggaccaagaattgtgcctaatcctttcgaatatatattgtaaaatttcatttcttatcctcataattctgataagttattattgtccatgtgaatggttagattaactttttttttttttgttttattttaaagttcctttcttgaacatatcatagtaggttaatcactagtatcatccaaataataatgggctggaaaaatcctcccacaaagataaggtactgtgattctatgtccatggacttcactggtatctatttactattacgatagtaacatacatattggaacacttatacaagatcaggaataagttctactagtttgctagttcatttattatattatatccatgtctagtcaaaatatgtgtgatataaaaattctgtagtgttatgaatatggtctagaatttaatgaaaagttgtttgaactacatatatcaataacttcttccactcctatgtattatagagattctgtggtgttttaaatataatatagagttcaatataaaagattattcaactgcatatattaataacttctttctacccctatcagatcataagatattttattaaataaaatcttaataattgcttaagaattggcaatcattcataaatattgaatttaaattctaagtgtttatgtggtattatcactttacagagattaatataccataaattttttattaataataaatattaaaacacataaaataatgataaacatataaatataatactgcattagtatacaagttatagaatacaaagctcaattcataaaagtaattcataataaaatcattttgaagagaaaaaatttagattaatactgtcaaaaatatcacaatgaatagtatagaataatatgaatttgggaataaaattcttatactaataattgaaattaaattgttcgataaataaaacaattaattcaaaaattaatgaaatgacgagctttatcttcaacttggacaatcttcacccttctgtccaactatctgtctcaactcgctaggataacaatccaagtctaaccagctggagctgaaataagaagaacataaannnggttagtagatctagaattaataatccaaggggataataattctctaaaacacatgaattcacaacaaagtgcacatgcttggcatcatcttctgcgaatattattatgagattcatcatagaggacgctgcgtaggtgactgtacaagattgcatgtgtcatcttgtttaaactcattcaagtatctcttttgtgcatttttggtgcttccagcaatgtgtgggcctccatatatggtttccatatggccatctaatgttagtggagcaacttgaggtgggtatagatttctaggtccaggagcaataacaggtcttgttgctggggcattttttaccccttgaggggcctgtatagctggaacttgtattctaagagttcgctagagacctactccctgaggaggatttagggctctaggctgtctaggaataaaaagttacatgtgtgctactgcttgtctaggatagataattaatatcctcacccaattggttaaatggtcgttccagactaatccttcgatttcttccctcaagtagtcacatttatttattgtatacccaatatgtaatgaccgctctagtaatatggattagaaaaggcaattagcactaatttttattattttaatattatttgtgaattaaatttaaatgttaaccccaatatttagaaataaat

SEQ ID NO: 125048 - DNA, 1043 bp, Cannabis sativa
  modified_base (56)..(56): a, c, t, g, unknown or other
  modified_base (163)..(180): a, c, t, g, unknown or other
tgttgattttatgttgtttttgtgttataaaaaaatattatttgaacgtaaaaatntaaatattttacaaaaaatagtatcttacgtaattattcctattatttctgtgcatgcaaacctttgtttgtattttaggaaaaaaatttaaaaaataataataatnnnnnnnnnnnnnnnnnnaataataataataataataaggactacatataactaggtcttatttggtaagacttttacttttatttataactaaataattatgaataattaattactgtttgaatattaataactgcttaatttttttatcatataataaaaaaaaatttgtgaacaaattaaaaattatataaattattttcattataaaatagtactattcaaaggtcattttgggacaaattagaaattttaacttttctttattaaaggacttttaaatttaaaaataactactaattatttttttattcaaacacggatagaacaactttttaattttagaggctaaaaatgagcctatacatccacaaagtcttataaagattacagaagaaagattgtttactgagcgtttctcctattaagagtgataaattgaatttgagccagtatccaaagaataattttgaaagagaagaaatgaagaattccttatgcttcttctctcagaagcctaatgtttgctcaagtgtgcacaagactcgacatcgcttattttgtcagagtgttaagaaattttcaaagtaacccgaccactggaaagctacaaagaaggttatgagataccttcagattgtactaagaattataatcttatgttcaaacaaactgataatctagaagtagttgctactcggattcaactgtcgttggctgtatcaattcacgtaaatcaacatccaattatgtgtttatatttgttggtggagctgtgtcatcatcgaggagtaacaaacaaaccttaaccgctacttctactatataggttaagttcgtttttttgttttgaggctacatcacatggtgtatggctaaag

SEQ ID NO: 125049 - DNA, 1382 bp, Cannabis sativa
tgtgtacaagagtatacatatacgcaatccaagttggcagttaactgtgaaaattagattgcaccttaaatttactaacggttcagtagttttgagggttttaccaccaaaatttaaacttggagggttaagtgtaaatagaataatagttgagagggtttagtcacagaaaactcattaatttttatacacttaacctcatggtattttttttgtggcaatcacatgtgtacatagtggcaatctagttagcatttgacgactggatttaactgacgcctcgaatttataaatagaagtggattaagggttacgtgtataaacttaatacataggggagtttcgtcgctaataaccctaaaattatgctaattttggcttaaaaataaatcagtattatatttgactcaacttttacaattatgtgtcacgatttatgtcctaaaagtatgtatttaatgtataatatattaaagaatatataaaatacaattgtattataaatgaatatgttaattatagaaatataattaataaatataaaaaaaattcatattcatatagaaaagttataatcttgtaaggaagtacaagagaattaagatcatactatatgaataaaaaaagtcaatagtgtattaaaatattctttaatatagaattaccaaatatgatttactaagcactactttagtgacatgtaatttgattcaaatcacatatgtggataaatatttaataaatataatttgtataatttgattatttatcattaaagagttcttcgtatcacaataatgattattagtagataattctaaatcctaagtgttcatgaactcctgtttgtgttcattaagttctttgattcacgtcacaacttctgttttgagaacttaataacatgaatggttagaaacatgttatacaatatgttgaatccaacctttccgaaaggattgaatattaattctcctaaagtgttaattttggagtgattacatttgggcctaaatttatgattgaaattatagattaactatatacattgaattaatggtacttaaggaatgcaagagataataagatgggtaaagcattaattttgacaggctctaattattaactaaaatattggagtatgaactactaatattgtttatatcaatggactatttgaaagaatacgttaaatatgattatatatagtcaaagagtgaaattctatatttatagtagagtaataatagaattaataaattaaattatttattgtcgagttcaatagtaatttagagttcattggagtttcgaaatataggtcgatggtccccagatcacctctataccacactatacagggaaagatttaatttaaggat

SEQ ID NO: 125050 - DNA, 615 bp, Cannabis sativa
tctccagcacccgcaatggccttaaaacctaaaaagaaatcgacggaatcagctccatcgtctggatcgccctcatcctcctcaaaaccatctttaacatctacatcacccacatcatcatcatcatcatccaatgatgatgaatcatcagtcgccacatcaacagatacatctggtgctaaacgaccagttgttgttgttgccacagtctccgttggtcttcttgctttgttcttatgatacatatcatcttccgatcgatcgagacagttatcttacgctccaaccatattaattaactaaaaatattgtttttgaataataattaataatatgcatgcatgcatggtcttttcatttcttttcttttgtgtacgtacgtacatgtactaattaatatttgattgaattttgtgttttccttttcatcattatataatcattatatatatatatatgtatatatcagtatgggatgagagatatataattgtatatatatatcacattaaatttatttgctgattatgttatatgtacacaaacattatttcttcaaattcatgcacaatactacatatgaaagtattactaaattattagccaacgttaaaa

SEQ ID NO: 125051 - DNA, 1284 bp, Cannabis sativa
attttttaaattttaaatattttttacaaagattttataatatttaaacaattaatattatgtggaccattaaaaatttgacatgtgtacatttgtgtatactgtggcatgtccaccatggtacttaacatagttttggacggaaaaggtaaatagctaacaaaaagagggttgtgatagttttgccactaaaatttcgatttttatgattaaatgttacagcaggaaaattcgaatggtttcactgccaatataaataaaaaaacaaatgtgaatttttgcatggaaaagagagtagcattaagcattgtgagaaaagaagtataaacacgtgtcctaatgagaagccagcaccacgcgcggacaaagttcttttcattcacgaccttgtaatgttgggtggcctccgaaatctaccgttacgtgggtaaggggcgcgtggtgtaaagaataaaaagaaaggctgtaccaaaaagagcacgtttggcctttggatacgtaatggaaagtaattgtcatgacagctgggatgtactaacataccaaaaataatcacctacaaccatatctatcctaactaaaacttattctgtactcgaaagtttgactaaatatgcttttagactaaataataagttataataatttgaataaattccaatatgattattaaagttttatggagaatatcttaatgtaatttagatcatgtaaaaaaaagccttcttctccaatactttcacacgacttattagtttgggaattagtatagcagctaagaataaatttattgaagtttaaaccatttgttatgatgagaatgtgaaattacaaataccagggagattttgagttggattaaaattagagaagtgttaaagacgaattgtgtagtggtggttaaaatcatttgtagttagttgataatgaacttttttttagattagttgttaataattgaagacatttgcttaactgtttgagtgaaatttctttttggttatttgtcgtgttttgctaatgagaattatttgtcataatttagctataacttcttattattttccaaattaattttttagtgtgaggtatgttcttactaaatttatatatattcttgtagatggtggtttatttttacaaggattatttttttgtctaacacagtgtggggatagggatgatacctcgtttattttagtatattagactcgtttggtacgttgtattaggtcgtattgtattatattatattgaatgtgattatatattatatttttatat

SEQ ID NO: 125052 - DNA, 611 bp, Cannabis sativa
gtttggttcgaaaccacagtttaaatgaaatttataattatttatattttttaagtaattgtactatttttactaagtgtttaattttatttttcaaaatatatttttaaacatgataagtaataggattctcaactagggtttcacccctagggttataaaaatcgtaactgaccagtcggttataaatttgtaaaaactgaacataaccgaacgattgtcacctctaatctaggttgacgttatatatcaacttgggcgttgggttgtcaacctgggtgttgggtcatgaactgcctttagtaaaacagtcataactcactcaatattgatctgattgatgcgattcaacttgcattttgaagatatttcaattctctattaagtcatgtctcacacttcaatcaaaactctgaagttatcgacaccaaatttcaccccaagggagttacaaaaataagctccgagttactcgcaacgggtcccgccaggctctgaaaaatgattatcaccatcataggctaatttttaccgttggattatcatctacggtcaaaaatatctaattttcattttttttcctatttttgtgggtctccttcacctataaa

SEQ ID NO: 125053 - DNA, 1491 bp, Cannabis sativa
catgcatgttaagatcagtataaatatgttaaaacatctgtaaagaaatcaacactggtagacttttcaatttaaattatcagattcaacgctggtttattgaacagattccgattgagaaacgggatcaactataggatctagatcctgaaaaaaataataacaatgtattagattatacttaaaatacatatataaaaataaaaaaaacaacaacatagaacaaaaaaaaaatcaaaatataactaacaacaaaaaataaataaaaaccttggcatcaggatagaataatttcttgttacaagactttatttttttagcacctctcttcctttttctaacatattaaacaagttgattaacatttttatccatattgattgtaaacctattgaacaaaaaagatacaaagaaagagaaataagaaaataagtacaatagattaacagtaaccatataaaaataataaaaatgtaactgtcaacccacaccacaaacacacgaaataaaattgtcacaacgtgggatagacagttagtgcacccactaaaaatatcaacaataaaaggaaatagaacaatacaacatactatatcaaaccaaatcaaaaaataaaaaaataacatggacataataaaaaataataaaaaagttgtaaaaacataacaaaaacattaaaaacaccaaaaacaaaaacggaaaaaacaaaaattaaaacatataatacaaaattaaacataaaaaataaaaaaaaaaataataacaaatataaccagtttgaaattaaaatagagatcaaaaaccataaaaattaaggacacaaaattaaattaattaaaaagcaatatcaacataaactattagataaataaaaaattggtttcatttaaaaaataaacaaaatacctataatggaaccggttccataaacactaaaacaacacctaataaaaacttagcatatacttaacagattcatcaaaaacgaaaataaaaaaatatcctaaaaaattcatgaagctaaaaataagaaagatctggaaaacctaaataatgaacacaacacaaaattaaagaataaaaaaattaaaaaaaaataaaaatgatcaagcaaaataatagaaaaatatgaatcagaacacaaaacaaaaacacaaaaataataaaaatcaccactaatcatcacacaaacaacccaaacaatcaaatatatacacaaaaatctaaataaaatactttaagctctaaactaaaagaattaacacaagaacttataagagaatgtttacacatcaactttcgaacccacacaaattgttccaacaattcaaagacacgaacaaacacaatcagaaggatgaacaacactcgcacgcaggggcagaggtaagtgatagcctaaggtggccctggcccccagcccaaaatacatcatgttctcattaattttattatgtagttttatttctataaaatgttatactacgtgtc

SEQ ID NO: 125054 - DNA, 2032 bp, Cannabis sativa
ccgccgaggtcggtggaccagcacatgctgatggtgtgcccgccgccgcctaggaaagctcggccgccaaggagaaagttgaggccgcgtagttcttcacaacgggttcttaaggttccagaagaccttacgtcagtgtttatgttgctaactaatccttccaagaagatcagaacaagttaagaatatatatataatttttcttgctttttttttttttatttcgcattctcatttgtatgaaaatttagtaatgtatcataacaaaatatgtgtagatgggaatcggaggtttgaaattgttaagatttgacaaagaacttatagtgttaccgaccaaaaaaaaattgtcaacatgatgttgacttattaattaatcaagtttagtagtttttcgatttacagaaggttgtagatcgaattagagcaaaacattgtatatattgctgcagtgaaaataattacgcatgctaattgatatggatgcttttattattactattaatattaatatatttcatcatatattatctctgaagttgtttagatgaagagtggtgtaccctatatacttcgctatttacagtattttctttgtgcatttttagagagttagtaccaaattgctaatatgtggaaataaattgttaccagatgaatgagctacttctcctaaaaagccaattgattttgagatggaaccccattcactatattcccaaattctaacatggtatcaaagcccgttgtgagtccaaagtgccactcgtccaaaaaaatcgtttgtgatccgttgtgagccaaagtgctgcggttcaaaaaaagatactttccctgtctccctttaaccttcatttgggatcttttggccaatgtgtgccaatttccagtattgagtctttgacctgtttcaaaatctataaatttggcgacgtgtacatccacaaattttccgatatttggccttgtgagattctttcaaatgtcaagttcagtcctgtggtctcttaaaggttgtccgttataccatacactttctaagcccgaacgtgaggaggctgtattagagttagtctcacattgctaatctgtggaaataaattatcacaagatgaataaaatactcctctcattgacaattaattttgagatcaaatctcattcattttattccaaaattacaaacattaatttgtctaataattaatctcccctgaaataactaaataaataaattaatcacgtatgaaatcgatccttacgagatagatagagagatatacacatataatatggacaagattggttttaaagctgctagatcatgattgtatcccatggtaagtaacacatgacccagatccagcctatacaaaggcccaaaggcacagttgatataatattataaattaaacttaaaagcaatatatagctttaattttgtaaattccgatttaattcattccataaaatatgtgacatgtcgtaaaaaaaatacaattagtaaaaaggtaaggagggaccatgtgagacatatacatttatatatgtataaaagagacatacaatttgtttagtgaaaaatgatattatatagggaaacaaaatgaaaaaggtgtggcctcagcatgtgccgtgccggatcattgagctggattagataagttgcttgatctttagacgaatttgaaccacatataatccagctgatcaatggtccgacagggcacatatatacatattgatattcacttctatgttagatacataagttgttaatttgtaatgactggattatatagatactttataacattaatgagaatgaactcatgtatcatcggaccttttagtttgattttcaaggtcatctcggtgtggcctttctaatcttgagttcattttaagattttgatcggtaggtagtaatgatattgttgacggtaatatcatatataatatttaacattaaattatagattaatttgcgacaaaacccccttaactatcaatttacttgcaaaaaatcatc

SEQ ID NO: 125055 - DNA, 731 bp, Cannabis sativa
ttacataaaaatattacataaaatacaattcaatataatacaatacaatacaatacggcctaatacggcgttccaaaaaagcccgagtgcattaattaatccaatccatatatgctctcattactaattttaaatattttttaagagttcttgaagttattaattaaagacccgactataagggtgcacttcttccttcccacctcctcttttagagaattttcttttagttatttaatcacgggttttaataattgtctccaatttttaatattattttttaaaaaattaaataattcttttaaattaagattatgatgggttactaattgcaatataatgtaagagatgtatatatagctatatatgaaggagtgcaaataataagctcctaatcacaaccttctttaattacaatctctatctctgaaaacacatgtcgaaatatttttttttcaatgacagtatttgttatagttacaatcttataaaaattccgaagagtttacaatatcaaaaaaagatttgaggtattttgaacatgcttggtaaatcaggagctctattaattattttcgacataataaactttgttaaaaaatcaaaataactcaagacacaaaatttatatatactctagaatacaataatgatatataataattaggtatgcgtacatgattgatccataacaattacctcaatttgatagtgcaatactataaactaag

SEQ ID NO: 125056 - DNA, 977 bp, Cannabis sativa
  modified_base (929)..(941): a, c, t, g, unknown or other
ggcataaaacccaacattttgttctttggtgaagaacaggattttgagtgagcatgatggtacttagattatcacaccatatagtaggaggttgagagagttgaattcaaagttcaaagaacaggtactacaactaagtcaattcagctgtagcaatagcatcacttctatactcagattcagtactagatggagagatggtctgttgctttttacttttccaagtaatcgaattcgagcgaaggaagatagcaaaccctgtatttgatcttctatcatcggggtctgaggccctatttgcatcacagtaggctacaagatcaagagtatttggattcttcagattaagcccatactctgttgtaccacttatgtagcgaagtattcatttaacagctgaccaatgagcaaacaaagttttttgcatatattggcaagccttatttacactgaaggaaatttcacaccttgtgatggtcagatattgcaaggctctaacaactaacctgtacagttgaacatcttccaatagttctccctggtaagctgataaacgaataccactagtcattggagtaggtgcaggcttggcattactcatttgatccttaacaagcagatctttagcatatttggcttgtgacaggtgaatacctacatcagtttgtgtcacttcaattccaagaaagtatgtgagagggcctagatcttttatagcaaactgtcgattaagagctataataacaacatagcagtttgatcacttcctgtgattattatatcatcaacatagactactataagtgtaacagaattagaagtatgttgaataaaacgtgaatggttagacttggatgaagtgaagccaagagacaacagacaatgtttttgttgggttttgagccctatataaaacccatttcaatatnnnnnnnnnnnnnaattaataaaagatcaaaaatcattttatgttgcat

SEQ ID NO: 125057 - DNA, 560 bp, Cannabis sativa
aaaaaaaaaaaaaaaaaccatcatttctttccacttattctctgattcaaccaattaatagaaagaaaagaagaccaagaaaaatcaaaaaccatttataaaaaacatgaccgaatacaattatatgatggtattatattgcgtaaggaacctagccatcttaaactcaaaagcaagaataaataatgtttgaccgatttgtttagatatatgtggaacaatttttaatgattaatagttattgatgagtactaaaaaaaaattaataatataataatttaataactttttatagtaagttactaataatattttttttaagaaaaattatatttatcttttataaaactgaatataacgattacaatcaatatgttaaaaaattataaattatttttagaaactaatttaaattactatcttattattttatgaaattatgaggtcttccctttaaaaaaaaattatgaggtctttaattattaatttattattataaaattaagaatcacttacatgtgtattaatgtgtttttttttttttattagaagacagaaac

SEQ ID NO: 125058 - DNA, 1016 bp, Cannabis sativa
attttgttatttttcattcccatattctcaaaaatgccaattttccaatttgttttgggaaatcagcaagtgttcttcattactccaatgaactatatgatttacaacctaacagaactctttaaaagagcctgaaaaagcttctatacaatttcataaattcacaatgtgttaaaccatgataaatcttctataggtactttgttaggccatacactatgtattctatttttacaagtaattttcaattgctgtataagtactttcggattctcttctttttgttgccaaaatttcatgtttctagctctccaaattgagtacaccagggcaacaatggtagctgctataactttcttttggaaggctgaactcttcctccgatccaaactgtccattaagcaaggcaaccgggtctttggagttctccatcccagccaatttttcgcttgttgcagacattcagcagcaaaggggcattcaaaaaacagatggtcacaagtttcaattccattatcacacgatagacaatgttcatctgatgccactgtgaaacgaaatagtctctctttggtcttcagcctattttgaattgcaagccaaaagacaaaactgtgtttgggagtattaagtctaccctacacttccttactccatttgacccggttctcaatcgggcataatagtttatatccgtctgcaattcgatatatatcttgaatgaaagtgtagggatttattattgttaagatagtacctttcaatgcaacaattttcctccaataccagctgctttgttgtggagctgagtaaccccaccaatccgcttctttgatgtagacattatggatttatttgacccaaagattgtcctcctttgttgcaatggcccacacatacttaaacatggctgccttgttccactcagccactttcttgaagccaatacctcctgctacttaaggttgacagatgttttcccaagccacttgacccgaaccagccattagttgttg

SEQ ID NO: 125059 - DNA, 575 bp, Cannabis sativa
  modified_base (507)..(509): a, c, t, g, unknown or other
cctatttttaatcataattctttttatatgagtatacacccttaattatttaagaaattccataaatttgttagaatttaaaaaaatttaaggagacgttctattgcacgtatgcgttttttttttctaattttatacagatgtaaaatagaatattgatccgattcaatttgtattttctagataaataatatttaatccgcactaagtgtaaattttatttttggatccaattcaatccgcaatagtgtggattagatcgattattttagatcagttattttttttaatgataaattatttaacatttcattaaactgcaaaaaaaaaaaaaaagagactattatttcttaatctctaagaatcatctctctccatcctcatttacatgcaaattaaaccaatatacatatgtgtccatatatacatatacttattgatgaaaaaaataacgaaataattattacaatatatatttggatttacactactatatatatatatatnnntatatatatatggaagaggttttgatagttacatttttattctaaccatcatggttacattttttt

SEQ ID NO: 125060 - DNA, 967 bp, Cannabis sativa
taaacaaagtagagagaccacaaagaatcacaaaatcaagcgtcaaatgcatatcacaccgtccactagacccctagctctcaataccgctcatagaagacgacatccgaaaccgagtagtcgcacttgataaccaccataataccagggctcaaatttaattcacttcttgtacagattctaggtctttcacctgatctacctatgatgacacaaagactaggtcgtgaaattaacaacaatatgcatcgaacatgatcaacatggctctcatcaactatgtcgtacgttgtcgagaagagagttctcccatgccttcgagaatgaaagatttattagagtgtgagaggcgctacccacctttggtgtcgagaatgacgtcgttgccatcgagaatgagaaagagagtgcaagagaggttgtcatcgttgagaacgcgagaagggatgctggatgctggatgctggtggtcggggaggtggcaggggctggcggagaaagagatgagagagagtacgagagagtttgagaggagttgttgggttgtttatgcagctaaccttgagaaaattttataaaggctaattaggatttttgcctccaaactttaacatgtattaaatcacaccttaattttttaggttgttaaaaaatttctattgaattattgagattgttggatttaaggagttctctctaatttcattcaatttgactaacgtgtcaattgtccatctatcgaccatgtgcctcccaaactttgatatttatcgtattgtgcccctgaactttgatatgtactaaatcatgactcctaaattttcatctatatgaataaaaaaatttaaatccaacaatttcaatagttcgaaggaaattttcaacaaacgttcagtgaacataatttagtacatatcgatctaagtttggggacaaaattcctaattaacttttatatatatatata

SEQ ID NO: 125061 - DNA, 1410 bp, Cannabis sativa
cacgtaggataattttttagtgacctgtcattgccacgtgggcaaaattaggacttaacaaggctgaacaaacgacaccataaaaatgtaaagtgaataatactttggaggatttttccaccaaaatatgaggttgggtggttttttacaagtaaattaatagttgagggttttgccgtaaattactctaaataatttaacaatttaacattacaataacattgtttatacacaaaataatttgaaagtaaagttagaacgatattgtatatcccaagttttcaataacctatctttctctattcaggttgattttatcttgatttaaacatgaaagttgagatctaaaatataacagtcaatactcaaaattataagcttcatctacactggaaactcattccagccgactagtgcttgggttccccaaactagggtaataaccttcactacatcaaagaatgtttgtacaataaccaatccaaattataacacaaaaacaaactcatctttacagtagtaaacttttaccctaaataaccaaatcccttggttataaatgcaagatccccttgcttcttgttcattgaaatctcttcaacgaagctctagatttgaacacctttaaatctgtaatgccaagtcttagttgtaatcccttcaactctcattacttgactacaagacttgctctgtaacttcaacccacaacaatggagtttcttgctagtacttgcaataaaacacacagacaaaacaagaaagaaagaaacaaatccctaatcttcgatgaaaaaggttagtcaaaacagtaacaataaaaggtatttatatccaactaaataaagaaactcaaacttaccaaaataaaataaaataaagaaactcgaagtagacagctggaaaattaaacacccaaatatcttgctaatgtggactatcactaacaatctaaactctagacataacaccacgaactccagatgcaactggacctaatttgtcactacaaaaaatactagtgtaaaacaaaatattaacaaatcaaccataaaaatatgacagagtctaaacaaacataaaaataaagttgtcaaacaaccaagcaacaaacacaacactttacacaaaagataagtatttctccccattcattgaacataatccatgccaaaaataccatggttctaaaccaaatgcttcccctgagaaaattaaaagtttaacaaatagctctccctgaatggcgacagtaaatgcaacatagatatagatattaggtataaacaaataagagagattgaccaagtaaaacaatcaatatcaccatgatattacgaatgatgcttcaaatgagatttatttttataatttcaatcaaaaacatgccaaatgatatatctcaagaat

SEQ ID NO: 125062 - DNA, 644 bp, Cannabis sativa
  modified_base (603)..(618): a, c, t, g, unknown or other
aatctagatcgtggtaaaatatatccaacaaaaggtagttaggcgtctccgacccactactaaatctctcgtccctatgcgagttatgcggggatgacttgggataatcttctaataatagttgaagaagatcatcatctactcggtgttcacctccccaataatcgccataatgcatctgcaaaaaaagaaagagcggggagatgagtacaccgagtaatgctagtaggctatccaacatggactcacttactagtttgcgaataaaaaaaagaggaagggaaatatgcataacattcatagtgcttaaccaaaaaaaattttacaacgatggaacaaccattcatgtatccaaatggaagaaacaacaatgacaattacacacttaaaatttttactaagtgtggaagaaaaaacaacacatggaaacatctatagaagatccaaaaactatgcaacaaacaatcatctccaccccacgaagttgctctatggttgtcacggagcacaacaccccaaccccccatggggtgatcttggggtgatacaccccgacccccatatgatggacacgggggtggtgatgttggaaatattttaccnnnnnnnnnnnnnnnnaccaagtatgtttgattaacatccta

SEQ ID NO: 125063 - DNA, 592 bp, Cannabis sativa
gacccaatttttgtatttttttttttttaagaaatggaaaaattatcattgaaggcatctaccaaaaacccgaatacagtgattcaaacacaatcatgtaaactccgccaccaaaaccataaccagggtcgcgacccaaatattaaatagtttgggccattgtataaaggttcacattttttaaggctcaatttttttcattttttttaaccaattttcttttctttctattatacatacataaataaaaaatttataattgtatcttaaaaataaaagctagtaataaaattatggtctaatgtacatatataattttttttttaataaatgatctaattttaaacttttacacaacgctctcaacatatttggatcgactctaaccataatatatatagtctaataaaagaagagtttttacaaaaatactgaattttaaataaaaaaattacaacttaatttactgccgcacagaattttttacaaagatactatctttttaaaaacacatgtaaaacaataaaatagaacaattaaaaataacagttgaacaactaaaaaataaccgtaaaacaacagtgaaaactta

SEQ ID NO: 125064 - DNA, 2151 bp, Cannabis sativa
acacatgctatataaatatctgtaattaacaatttacgcttatttactcatttatagcaaaatttaaattttatgctgaaataaattagtaagatcataatccacttattaccttattcacccataatataaatataaaccctaattatttaccattaggcttatcgggctccgagctctagcatgtggtacagggatttaagtcccatcagaatccaataactgttggaagatagctggaagggagctagtcccaaggctccaaggacgtcctagtagtaagaggcaagtggtagcacacaccccaccataaacaaagaggtgccccacgcgaatatgctctcatagggaggaaaatagctaagctcagtgggagtcggggctctccatagccgctctccaccaaagctaagcccatgagtactaagataattgcatatttgggatatacttttgaatgaagaagtgatgcgactcgcctcaaagtataccttcacaggtttggccctagtccgtagagcaggccactttgtactagtagaaggttggttagtggcagattcctctatatccgcgaggttgtcacgcaacgacatagccttgggtctcgcaactcactttttgttcctagaaaagttcaacaaaaacaaaaaataggtttggacccgaagaaaccatgacaatgtggctatttattggaaaaaagggaaaagtgtctttattgtattcggtggaacccaagtgcactcttaaaagtcatggaaaagtagaccaagtcgcccatacgaccacatgctcaaaaacatgcaactcccacttacgtgaagcaatggcgcgcctatgaagacgaccattgacattaaagatgacgtggcaagattccattatgagggaccatgtgacaagaaactatgacaaagagacccaatcatttagagctctcgaccacaccaatccccacatgggaacatgccacatattcaactcagacgaagacaattcaatgatacaagtaatcaagccaagaatttgataaaattacatgtgttcgagttttccaatgtaaaaaaacacatgtttttctcacttaagaatttcatcaagcacatggtgggacctaatttccacaacccaaacttaagccaaaaagtttgcaatctttgcccaaaattgtcaatcctacttccatattgtcattttcatcaccaaaaccataactaattcaagataaagtcaaaacatatccaaacactactcccacaacatatatccaaacacattcaagaagaaaagtatttttcctaattttcatatccaccatcatctcatccatgtaattgtgggaaaaatcaattgaaaactaccaagaaagcatgaagaatagaaattagctcaaagaattgcttgaatttccaaggatccttgaagaaaatttgaaagatcccttctctcttcacccaactagtgccacggccacaccaagaaaaagtagggttttgtgagtttctaatttaatgagagagaggagaagagaagatgaatgggaatgaaaaagaatgaaaagaaaaaaaattaccttgattactgcttgagaatccctaactgacaccttgagagatgaatggtgatatggtgttcttgaatgttggtgagtgaaaattcaaaaaagtgatgaaatgttttgggaaataagagggaagaatggaatttataaataaaaggtcttatggccatgtggtatttttggccaagggtttccaaaaatacccttggcctaaatggcacatgtttttatctttaagtgttaatgacacttgtcatgtgttggtaaaatttgtgatttaaatctttaattatgtgaaaaaaaaatggaaatttgtcatccttagacaaattaaatttcttttcacccaataaagtttaaattctgcaagttccgtagaaatcatcaagaagacacactcgactcgcagcaacgacaacttcaattgatattccaagagacaaaaaaataagcaaaagatgtcatgcttattatttcaagttaagaagggtataataacaaaagtctttcccaaagttctcgacaaacacttttagggggcaaatgttatacccaattttcaaaaaaaaaagtcaaccttacgactt

SEQ ID NO: 125065 - DNA, 581 bp, Cannabis sativa
tacgtttaaaaatcacgtaacatgcctaggctagttagggtgttacaaggtatcacaagaaaattctaaacccaaacccaacccatttattaatcgtatcaaaaactaaaatcaaaacccaatctgatcgtttataaatggattgacctgatccaatccatttaacccgtttatataaggaatcatacttaattttagttaacttatcaattcatcaacatgttataaacaagtttaacatatttacaatcttgttatgagacaattatgagcaatttaacatgtttatatcctatttaactaaaaaatataatttacatgtaataaatataataaatttaagagtgtactcttacataggtcattatcatgttattttcgggttatgagtgtcaaactcaaatctgtttattataagtgcaagttttgcgtagtgttattgtgtctgaccctgattgccacccctatacttttggatctatcatatggatgtttaacattttcattgtgttattttttgttatttttattttttaaaacaccactctactatatatgattttcttattagagtatgtttt

SEQ ID NO: 125066 - DNA, 844 bp, Cannabis sativa
agtagaaatttatttcaaaattacaaaactttagaccctatcaaactcattaaactccaattaatttttacaaaatgttttgtattataacgactataaaatgaacctttccaattctagaaacatgttaaaacacataaaaaatattgcatgacaatctagtacaattcttagaacaatttatcaatttcacaataagtacaaaataaaaaattcatacagtaaactcagtacaagaaaatctcttgaacatagttgcttaaaacaaatgactctaaaaaaaattaacaaaaattgtaataaaaattataccattcagtgaagagttaagggtgggtttaagaacttgaaataggcctaatcctcaactacaatgactctccatgttttttggagctccaccacgcacgacggctgtcttagatcaaaaattgtgcatggagacacgaatcttgagatctagaagcccatgatgagaggaacacgttcttaccacctgtttaactcaatgaaactcagaggtatctcaatcaaggatttgaagctttggcaccgatgagctccaccaagatagtgaaaatagtgatgtgggccattggtttcgagttttaggacctccaaatcgtgtttctgtagtctatttgggccaccaacatggtctggccatggttgtattgagaaccaatgagatgagtgagatcaagagtttgagagtgagatggagaagctcagttcgagttttttaggtcttcaaggttgtgcaagacttggaataactgtcccatcctagttggccgggaggcatggtgtaacaccctagctaacataggcgtattacgtgatt

SEQ ID NO: 125067 - DNA, 976 bp, Cannabis sativa
ttttttttttttttggaaattatgaataattatatgttgattttgttttatttacattatttttattttagagtattaaagttcctttttttctcctttccgagttgcttttttctttcattaaacaattctaccaaacaatgttttatagcacattaattacattgacatatgtcccaatactatatgttagacagggaattagacacactctctagacagaggatttgcttcccctttttactctctttcttactaaattatgaattttcaacataactaaagaagtgtgttacaaggtctatttatagtatgtatagttggttgtttgttagacaaccaactcgggtaccaactttcaaaacagttggtgacacatcagctgaaaatgaaacataaaatggttaaactaaacaccacaatttattatttatttttttaaaaaaaacataaatattagtatttacttacaactaaaattaattctcatcattttttaatgaaatctaaaatatgtctaaagaactccattttttttctctctcctaatttttctaatttatttttatcaattaaaaaagagaataatttatctattctcttccttttttgatggatatttataatttaagtttcattgaatttttcaaaacaaaaaaaaatgtataatttattactaggcgcggtagacaattgttaaattctattgttgaccgaggttttcggcaactaataaaataataaaagattaaagagctgtaagaaattaagggaaggatttttacgtggttggggcgataatgagccttagtccacgagtctgtatatttatgagtgtatttaatggaaagaatgttcttggtgagtatttacccttcttgcacttatgcaacccgaaattctctacttcattaatgaactttgagggggtatttatagtgtttttgtggggtgattcccagaattatagtacatg

SEQ ID NO: 125068 - DNA, 762 bp, Cannabis sativa
actgaatggcttcccccccctccctcccggatgggtgatgtgtaacacggatgtctctattgggaatcatcaggcggcaggggcggctattttctacaatgagtttgggagaatcattcattttgtaacctctcggttcactgtgaatgaccccctcactggagaagttttagttctttgcaagggtgctgaagaagcgttgaagaaagggtatgaaaagatcatttttcagaatgattccatcaatgcaattgaggctttgaagactgatgttcaggaagttggaactctccatcacagtgttcaagatcaggtggcaaactttcggtcgatcgtgacacagttcaccatgtgggaagcctcctggataccgaggaaatgcaatggtgtggcccattccatggctaaatgggcgaatcaagacaatcgttttggttggattgatttgccttctgagattggcgttcttacctctgcgtctgcaggggcggattgtcctcaaaatctccctgctcataggctttagacttttgcttgtactggtttagtagctagtttcttgttttaattgcttttcatttctgttagttcttgttttgttgtttcagcttctactaggttgttctgctctttagcttttgttgttcctcttgtttccctgtttccagggtcttccaatcaaaaaaaaaaagtatcttttccacaaaatttgaaaaaatatctgatttaagttgtattagaaaaaaatctagaacttaaata

SEQ ID NO: 125069 - DNA, 676 bp, Cannabis sativa
ttcttcttttctagatttcttgtaatcttgatgaaatacttttatttgtattttgagtattttgattgtaatcctcctattctctcttgtaatgagaatttttccaacagcttccacagtgatggtggattttcttattcttcttctcctcgttgctgttggagtttggcattctcagtgttctcggcgaaagtatggctgctgtccagttcaattaagaattggtaagcagatggttaggggacatggatccggaaagagggctggattgctgttctctagcagtggtgccattttctcaaaccatttgctactgtatcgttgaagaaggtaggtttcatagtggatcccatctgaattttcaaggcacaaaaacaacataacattgtcgtaaaaatgtctcgtggtttttcttaatcgacaaagtaatggagtctcttaccagagtcaccaaggcatataacaggaggagtcacatagctacaaacaaactaatatagtaagtttaaatatggcatctataaaatacagtagcatctactttataaaacaatatagtaagtttaaaaaaaattataatttttataatttaaaattatacacttataatttaaattttattatacttgtaatcttaattttaaattattatacttaattatttaatttttttatt

SEQ ID NO: 125070 - DNA, 698 bp, Cannabis sativa
  modified_base (71)..(75): a, c, t, g, unknown or other
taaattcacatatattgaactatataataatataattcctcaattactcataattatctagttagggcttnnnnnatcctttttcttaattccgggtattacactaataaagctatatttgaaaaaaatcctatttctatttagatagacttaacattttttttagttgtaataccttttatcttcatttctgattgcaaattcaaagcacaagttaaatattattattaaatgccaattgaaattacacaatatgcacatgtcatatttttatttgtctaaataatttaatcatttaaaaattataaaatttattttcaaatttagaaaataatttaaaaaattattataaataataaaaagaaaccaagaacttaaacataaagaattaaaaccctatttctcaaaaaaaaaaaaattagtaaaaccctaaaattaaatagatttatctctttatttttctttcccctattcctaaccccaacatgaacaagcaaaattcaaataaataaataaataaataaaacagaaaagacaaagtaatacattcataaaaaatctagatttaaacctaaagggtcgtttagtacagtgtgatgtattatactgtatagtattaggttagattgtattatattagtactatttaatacaatattatttttgatattgaattgtattaataagttgagtaaaat

SEQ ID NO: 125071 - DNA, 1586 bp, Cannabis sativa
  modified_base (1380)..(1380): a, c, t, g, unknown or other
aatgaatataaaatattcatttattagaaaatcaattatttatttatttccttaaatagaaatatatttcccaaaataaaatattcttatactgccaagatctttcatttcaaattctgttttgagtagatttttaaccatatcaaccctagatctttcttggcttataataagcatgtcatctacatataggagtagatagatgacatcttttatagagcttcccttgcagtacaaacaggtgtcatgataacttctgttaaactcatgctttatcataaaagcatcaaaccttttattccattgtctaggagcttgtttaagtccatataaggacttaactagtttgcagaccatttatttctttcctttaacttcaaaccccttaggctgctccatgtagatctcttcttctaggtctccatgtagaaaagctgtagtaacatccatttgatcaatttccatgtcaaattgatttgctatagatagcataatccttatagtcttgtacttggctactggtgagaatatctcagtgtagtcaacccccttttttctgtgtaaatcctttggctactaacctagccttaaaccttataggttcttccctgaatctgccttctttatgcttgtaaacccacttgcatgctattactcttttccctttaggccttagaaccattattcaggttttattcttctttagtgagaccatctcctcatccatagctttaaaccacttcttagcattaggccctgtcattgcttcttcatatgtttgaggctatgaacttagtgattccatggctgacataaaagcataggctatgtcttcattccagatgttgaaactgtacttaggattaggctttggtgtcctcttctctttgtctctagttagttggtaatcatctaaagctttagtgggttgaacaacttcattttcatctccctattgctcctcattctgtggttcttccctgttagagttatctgtgtgttccacctaatcttgatcaggttcatttccagctgttttcacctgattaatatcaggttcttcttgatcctccaatctccataaaatagggtcaaattgtattgtacctgcaggattagtatctaatgtacctgcagggttagttttaagtaaacaagaaaattcattttctttaaatataacattcctactaataatagttttgaaccccccctttttctcttaaccagattctataacccttaactccttcaagatatcctagaataacatcctttatagctctaggctcaagcttaccaacactttgatgcacatatgcactacaaccaaatacccttaagtttgagagattaggtggtttaccagaccacctttcntcaggtgttttgaattcaataacacttgaggggcatgtgtttataagataagcagatgtcataacagcctctccccagaaaccatgtgacaaaccagattgtattaacatacatctggctttgttcaaaatgtttctattcattctttctgctacaccattttgttgttgtaatacccggtaaaaatatacatatattttaaattt

SEQ ID NO: 125072 - DNA, 1197 bp, Cannabis sativa
actgtgtaattaccactctaataattaccctagtaattacacagttattttcaaacacaccttaagagaattggtaagaaaacgcgttataaatatctcctaacacactttttttttttttgtattaaactatagtataattaagtatagagtcttatgtagtttaagaaaataatttattataacataatgttatttattatttaatacaatacgactcttatacagcatactaaaggagccattaatttagtatacattagcaggtcaaccgcatgccataaaagatatacataagtcaaacaggccggctgtgatgatatgaactcggcaactacctagaaaaggaagatagtactgtaatactactgtgctatgtatatatatatataaagaaaaaagaaagtcttattgtatatacatcattaatactattatcattattattattaatggaagtgaagaagaagaagaataattacttgtggtgctgcctttttttggtgttgttatgggcatcaatatcatcagtaacagcaggtgttactatggtaaagtcacccaattgtgagacaaaatgtggagatgttgaggtcccataccccttcggaatccacgaccaaaactgtgccattaataaagatattgataagtacttcttgctcaattgcaacacttcttctgcttctcctaaattaatatatggaataaacttagaagttagcagcattgatgtggaaaaagccaccatgaatgttaagaatttctactcctacgactgttacagtaagaatggtagcttatctataacattgagtaagttcttcacgctttcagattctgagaacaagttatttggtttgggatgccatacacaagctgtgaagaataatactagcgttgtggttgattgggttgtgggaaatcagacgtgtgagcaagctcaattgaattcatcatcatcttcctatgtgtgtggagcaaatacagattgttactattcagagaatggtggtggatatcaatgccgttgcaaacaaggatatgagggaaatccttatctcaaacaaggatgtcaaggtattttccaaatttctattttcgaccgtgtgttttgtaaaatttatcaattgaaccctctattttgttaaataacaaaatgaacatgaactaattttttgtcaaattaaaatttaa

SEQ ID NO: 125073 - DNA, 1015 bp, Cannabis sativa
tccccaagccccgtgcattccagcttaagagtttcatgatgaagagcgggattgcatagcaatcaccgctgcattgtcaatgatctcatcagaatttcaagaagcatctgaaactcaatggagagagtccacttcaactgacaaaggagaagcttgaggaacatgattacctcgacatcgtttaagtgtttatctcaaagatcttgagtcatattatcgtttaaattgacggtttgggcggaaattttcctggtcttaaaaagtctgggaaatggagatgtgacctgtggtggaattaacaataggttgggatgtggaatatatagtagtggagagaggcaaggtcaaagaaggatgtttagatggatatgtggtagaggtcatcgggggataagtagcaatgggatgattaagtggtgaccctgaactaggaacaaagttattgccaatatcaggtgtgtatacatccgatagatgtgcaaccgaattacatgatgtaggaggattgaccattggagaattcataacacatgtgaaggaagataattgtgtttctgaagtgtgaaccaaaccagaggagatcaaagaagattgacccagtaaagcaggtgagaaaaaagattgaatccttgaagttggagcagttgtggagacataaccaacaacagtagcagagggaagtgcttgagaattagaagactctccaatcagcaaacttgttggatgtgcagggggacgagaattgatccgtagggccacgcgtttcctttagaaaaatcagatcgataacggtcataagatgaagaaggaagagcaggtccattcaacatagggccataggccaactctggctcaataccattgtcaagattttcaaagaactgaggacatttatgatataagtgaccaataataccacattccatacaatattcagggatacattcataatggaattcaacccaaaattcatcccagactttgggtaatgtaatcatcttgccacgaagcaacg

SEQ ID NO: 125074 - DNA, 749 bp, Cannabis sativa
cttaatttttgacaactcttttttttaataaaatcaacttgaagataattcctaacacgaatagatacaaaaaatataaaaagttttatcagaacatatttagatcagattattattaaattttattttgataaaaaatcagttcaggatcttatttgtaccatttaggaaaatacagggctcattttgttatttaacaaaacagagagtccaattaataagttttgcaaaacataaagtccaaaataatatttacctcaattatattcagttatttattaatctttataaaacccaataacctgcaaatagtaaaaatcataattttttttactaaaaatattatcactaaaaatatattttttttatttttttttattgtgagggtaaaactatattaagcataaattaacctacaaaaatatagattgttatttttacaaaagtattatttatatttctatgttgttcacatgactattaaaaacctaatagatcaaaaaaaaaatatgtaaattaatcatacttcatcaaaatatgtaaatttttgcgtagcataaaaaaattaaaaaatatgtagcatattagacactttgtataaaaattctaactttagtatgtgcggaactatgtgtagaagcgtacatgctcctaattcctaaagggaaatttcattaattgaccctaataaaataccccatttcaaaatatataccctccactaatttatacaaattaattccattatt

SEQ ID NO: 125075 - DNA, 1237 bp, Cannabis sativa
  modified_base (1017)..(1019): a, c, t, g, unknown or other
tgctcaaaccaaaaagtcgaacaaactaaaaccaaacttgtgcaatataagtgaccaagagtcataagtctggtcggtcacttgggggcagttatacccgtacaaagcaaaggtaaataataagcctgaaaaaacacaacagtttgcatgtgtaatttttaaagcttaagcgaaaatattcattttaaaagatgacaaagcacaatataaactcgggattaaaggctgcccggtcagctagttgtcttaaaataaaatgaagtcttactaagtttaaaggccacttggtcgaccatattgtattggaaaaaggcccatcggccaaactgaaaaaaaaaaaaaaagagaaaaaagtaggtttcatacagccagagtccctggctctttgtatagttcaatttgggtgtcagaggccggagcatcaaggttttagtcggtttgcgctttggggttgactgcctcagattcttccttgtctttctggaccacataataactaagatatgcctccttgtttttattgaggtaatcaaagattccatttaggttggccttccagaattcatagcaaacctccagggctgccgtttccaaatttttgacctctttctcgagtacttcccactctttctacacgctcttgacactctcttccaaatttgtcttttcttgggttaacatagcaagaagagtccggagaccttccctatcatctttcaaagcattaacctttcccgacagagcctaggcgtctacttcgagctaggtagtggacgacaaatcctgaatctccttctccagttcctcaacccacactactaaaaaactcagaattctcaacatttgtacaccgtggggtaaagaattcccgacagtctatacaattgtcgcctacacaagcgtcgcgaattttaggtagaataggcgacagtggaaaaatgtcgttataaaagaattcccgacggtttaaaactgtcggctatagtcgatactataggccacgatttaaaactgtcnnntatactatagctgacggttttaaaccgtggcctatagtagtttagccgacggttttaaaccgacgctatagtggattgccccaaaaaaaattatcgccttcatcctccttgaaaccatttctcacatatatcgcatccgctttaaaacccttacaagcttcatcctcctccactgttgttgtgctgtcttcattctcgtcaaaattttcttttacaag

SEQ ID NO: 125076 - DNA, 2808 bp, Cannabis sativa
cctcaaagaactgcacaaacaaggtataattgaaaatttaaattcttatgccttaccattttgtgaagcctgtgttttagggaaacaaaataagttgaagtttatagtcgatgtctttggacctacttgttaaccacgaaggatgagtgttggaacagtttaaaatttggaaaactcaggtggaaaaccaaactgatcttaaaattaagaatcttaggattgataatgggttggagtttgttaactccaaatttgacaagatgtgtcaaaaatttggcatcactaggcatagaacaatagtgaagaccctagagcaaaatggtgttgctgaaaggatgaaccgaaccttgttgaacaaagttagatgtttactgttcaaatctgggttaggaaaaccattttagggggaagctttagcaaccgtaacctaccttgttaataggagcctgagtttataagcattaacacaccttatgaaatgtggtataatagaacctccaacctaacacatttaagaatatttaggtgtactgcatatttacaccaatctattgacaagctggaacctagatctatgaagggaactttcatagtttatgccttaggaaccaaggggtatagaatatacatctctaggaagggtaaaccagtggttgtgattgctagaaatgttatttttaatgagttagaatatcatcacttgacctttggaaatggtagtgtgtctccgtgtgttttaggaaaaataggaaataaagacaccgtaagtgtggaagtggagtacagaacaaagcccccagaagaaggttcacaggtggaagatagtgtggaaccagaagacaatgcacaagtagaagttgttgtggagccggaagaataagattatgaaaaccaaatagaggtgccaaaagggtttagacagacatgtttggaaggttatcacttggctcgtaatagaactcgaagagagattcaacctccggcaaggtttgcggaagcaaaaataatagcatttgcactggcagtagttaaacaaactgaaattgagaagcccagaagctatgaagaggtaatttcaggtggaaacaagtctaaatggctccaagccatggatgaggagattgattctctacagaagaataagacttgtgtagttatgccaaagtcggagaataggaagattgtggagtgaaaatggaatctcaaggtgaaagagggaatcaatgagaatgaacccgttaggttcaaagtcaggttgtgctaagggttttacttaggtggaaggtataaactatactgaaatcgtctcacctgtggtaaaatacaagattataaggttgatcgtatccttagcggcacatttggagtttgaagttgaacaacttgctataaagactgcttttctgaatggattcttagatgaagagatctatatgaatcaatcacctgggttttaggtggaagggaaaggagttgaattagtttttaagcttaatatatctttgtatggtttaaaacagtcccctagacaatggaataaaagattcaatacgtatccatcaaatcgggttcaatcgatctacatacgatcgctgcttatattttaagaatttagagcaatctacagttgtgttcttattgctctatgtggatgatatgctcatcatgagcaatgataatttagtgatcaaaattattaaggccaagctcaagagagaatttgagatgaaagagcttgggccagtttaaaagatacttggtatcgaagtctctcagaattggaaggaatgaactattagcctaaagtagtccaggtacatcaaaaagattattcaaaagttcaacatggaagatgcgaagagtaaatccgttccttgaaggggacagttcattttgtcaaaggaacaatgtcttaacagtacgaaagagaaagaagagatgaaagatgtaccctatgctatggttcttggatgcttaatgtacgtgatggtgagcacgagaccggacataactcacgctttaagcatcctaagtatgttcatgaccaatccatgcatggaacattggaaagcccttaaatgttattgagatatttgaagggcacatgggattatggtctgacctatgagaaaggaaaagaagaattaaagttgaaaaggttcgtggacacggactgtgcctcaaatagagatacgaaaaaatcaaccacttcctatgttttcttgacaaatcagaactgtatatgctggaaggctcagttacagtctgacactacctcatacatgtattcagattccaaaagattttagaggttgtaagttgtaaccactcataataattttgggataattatataaactgctaatttttgtaaaaaatttataattttacgtttaaagtttttttattttacattttatagtactctataaaaatacaaaaaaaataataagaaaacaacactaaaataatataaataataatatacaaataacataaacttaacaacaaaataataaaagtacaatataaaaatacataaaagaaccatattttatgttaattaaatctaaaaaactgttaaaattttgaatattctatacacaccgtatttttataattttttttttggttatttttgctttttttaaaaattatattaaaatgggttttatttagggtacaaaacacaacaggcataacggggttgttttgagttatcgatggtgtggcaacaactgcagctatattagccaggatcactacctcggtagtggcagctggtgcgttaggcgggttgactatgtt

SEQ ID NO: 125077 - DNA, 886 bp, Cannabis sativa
ttttaccaccaaaattttagaattgggggttagttgcaaaaacttggccacttaaagaggttatgccgcaaattactcttaagattaaggaggcactaaaagaactttggtggctaaaagcactcctataaatttctatgctatatattttaaaacattaataaaacctcaatttttattattttacctcaaagtgttatattaaaccatcatcaatttttatattttctatctctatattatttaaataatataaaagaataaaataatataaatatactaataaaatatacagtgtttagaaaataaaaagtagtgcttctatattctttattggtttctttataataaagctactattggcataacattattttgctaaccaagctgctcatggtttggcgaaacaagctttagtgttggataatgattgtacttggttagaggatatcccctctactatcttctcttatgttattaaagaactatcttaattaatgaaagtagagttttttcctcaaaaaaaaaaaaaaaaagaaaagaaaaaatacacatccattaattgatataactgctctaaaggactagagaaaaagaagaagccctaaattttgaaagctttggcaacatatgctttaaaatagaaattttctaaaatattttaaaaaattaactaaaaaaacacgctatattaaatactttcaactacttctctattataaaatttttttaaaatttaatattcatgttatacgtttataaaatattattcattgctctaatgacatttttactaataagtaatggaaattaatggtaagagaacttaattaaataagggagaacttctcccaccaattttgtaaggaatgccattaaaggtaat

SEQ ID NO: 125078 - DNA, 2444 bp, Cannabis sativa
  modified_base (1812)..(1815): a, c, t, g, unknown or other
taataattttttttttatttataaatattaaaactgtttaatattttcttttaaaattttcacaaaattgtttattttgtatttttataaagattttttatccttaagaatttctaaatcattgtcacaataatattattattatcatgttaaacatgaattacaataatatataatacacattttattgttttttcaaactataattaaataaacacacttttaaagtttctatacataattattttgatattatatttcaatgaaaaataattaaattataataaatcaaaataaaataaataataaacatttattttttaataattaattatgtttcttaaaaataaatctgtttattatttatttattttaattctacttctattgtttattttatgtttttataaacattttattatatttttaaatatttctaaaccagtgttataataaacataaaacattattaatatcaattaaacgtaaatcatattaatatataataaacaataacaacattattattcaacaaaaaaataaataataaatattttaaacaaattattgttagtattgaaataaatattttttttatttctccatttaaattgtaacactttttgtattctacggtttaaatttattaactaatttatatatgtcttgtacatatatatcatgtatcttattattaaaataataattaaaaatactaaaacaaataaacaaatggttatttttcatatacgattcttacctatcggtgccaaaaattatgtatggtagcttacgatttgagatttgttgcttcgttgtgcatcacaagaaaaaaaaaaaaaaaacttctgaaacaaataacattcatatagttgaataattttcttttcttatttcaatgccattgtaatgacattaatcaacatattttgatgaaaaaatggttgtgtgtatacattaaagtgctatacatataacaatttggagtaatttgattcaaaaattttaaattaccacattctctataatgtattaattatatctaaaaatcataataatgtgttaattttttaaaaaatatcatatattaattttatttaaacataaatatcttaatttaaaaatctaccctataatgatatgttattaaaatggctctaaatatggacctttttgctattcctagtgtaaatacatagagtagtggaaatgttgatgtttaaaaatctacagatattcaacatagttaatcaaaaaaatcatgattatatatgtattgatttttaaaaatattccatacatcgatcatggacgtgatttgtatgattaatacaaattttattgtttattagtagtatcattataatgattatgttttgtaactattaatatacaattagtcataaaaatagttacacaaatctaattatggtaagttgactcattaatacatctattataattaaattaagaatttgtatgattttatttaaatatgttttcaaatgtgtatatttttaaaattaattttttttatacattttttgtaataaaattattttgattttacactaatgaaaaaaccctattttaatttactacatgtattcgaaattttttttaccaaatagaatacttcaccacatatttttgaaataaaagtaaaaaaaaaaaattgtaattaccactcatctatatttattgttaattatgatttttttttcttttaaacattaacatgtatcaaattatttcccttgaacttttcaaaccgttaaaaattctcgtaaactattgagattattagatttnnnnacttttgtctaattttactaataaaagtctgacatggataaaaattcaggagacacaatttagtacatgtcaaagttcagataatacgatttagtaaaaaatttgagagtaaaatttagtacataaacaatcattacgttagtaaaattgaataaaaatttttaaatccaacaatctcaataatttaataaatttttaacgactaaaaaaattcaaaaaaaatataattttgagatgaagaaacaaacatcctaattctttattatttgagaagactctcttgaatcatgctgcaacactcaacattactattattatttatttatgtgagcatgccataatcgttgggtttcttcattataaaagataagataagataaggtatacatattccagagattatttgtattcaaaacttaaaaactaaacctaaagcaaaaatcttataatctctttcccacaaaacattgaaagaaatagtaatggagactattgcagcttggaaattgaatgattcatcaacatcatcacttgtggttgtaatggttccattcttagctcaaagccatttgaaccaactccttcaatttgccaatgtcgtttcctcatacgacattccagtccactac

SEQ ID NO: 125079 - DNA, 669 bp, Cannabis sativa
tatgaagaaaaatagttttagaaacgagaagaagtttgctttgaagttacatatgacaaagacttacaatagagttgaatcttgtttcattaaaaaagttatactgaagttgggctactatgatagtgggtggaaaagattatgaggtgcatgaaatatgtgaagttttccttatttcttaatggtagtgttaaaggggaggtgattccttctagagttctcagacaaggggaccctttgtcccctattctattcatgttttgtgcggaagctttttcttgtctcattcaaaaataagaagaggtaggaaagataaagggtcttaggttcggcaaaaatttggtttcaatttctcaccttttctttgtcgacgataacatctttttcttgggagctaattaagaagagtgtaaggtgtttaaagacattctaagtatttactcgaaagcttcaagttagctcataaatttccaaaagtcaaatcttaattgttataagtgtgttggatgagaggaaaaaattagcttattttcttaacattaatttggtggatgtttataaaaattacttgggtttaccatcttttgttgagcgaaataagaatgagatctttaccagcattaaatataaagtgtggaaaaggttagaaaatatatatattctctgcag

SEQ ID NO: 125080 - DNA, 2174 bp, Cannabis sativa
tgtccttttcgttatattatttttcttttttcttttaataattataataatatatatggttagtagagtaatattgtccatattaaaagttgattaaaaaattcaaaactactcgtatattatttttctatttcttttaaatttcagaccaaacttagccatagtcacaccagtcgccaaccgccatttttgtgagctttgttttgacaatatatataattataattataaatatatttttgttttttttaacaaaaatagcgtttataattaattagtagtgacaattttgcaggaataaattgaagcattccacatccaagagcaatgattaaaggtaaaaatcttaatggaaaataaaagttgaggtatattatagaaaataagatgtattgaagttgatttttttcagatgaaaaaagcagtaacaattgacacattctttaagagaaagaatattgaagcttcgatatctaatgtctcatcaaatttatgtgtgaatatttatcatgcaaatttagaaaaccgtctgcaaaatctttaagaattgacatcaaagaagggttcgatataactcattggagcgtgacccaggattgcgaccatagatatgggagtatccacctgagaagcgtgatgcggggttgcaaaagtagaagttttttcacttgtgtataaaagtggtaactcttattattacacttccagtttttacagctaccacaaagtgatattttttaactgtgaatatagtaaaaattatacttcacaacaaaattatagataaatttttaagtgattgtttgttagtctatattgaaagagaaatcgctaaaacatctagtattgattcacttatagatgtcttttgtgatatgcaagagagatgatttatattttagttttagttattatgaatttaataatttatttgaaaatttttattacttcttttaatatatagtttggcctccccaatcatctcatcctggctctgcccctggcttcaagtctagttctgccttataaaattgagctctacaaaattgatattttttaccaaagtatgctaaaatcattccaaaatactttaaacacatgattagccttccaaaatcttaaaaaattaaaattacactaattaaaggtttaaagaattaatttaataacaataatgagagaaaataacacaacttaatagaaaaatatgcacttatcaaattcccccacactaaaattttgctaatcccttagcaaactatttaaataacaaaaactcaaaattaaaaattaagataatataaactaatctaaaataactaaacaaaggtcttatcaaaagcttgattgtctttgagaatcacacaataaagtaatgccaacacaaatcatattttcatgctctttagaattttaaccctacatgcaattcacaatttaatttccaaaaataatttaataagcacgtaatcacaacaccaactaaaatatatcaaaattgacccaagaggtacctaattttgtgcaaataagtgaggactcacacacttgatccacaacacacgcttgcacaagccgtttgaggcgagttgggctagttggtgtggtgtggtgtgacactttattattttaacagaaaacttatttaataaaataattatttttattataattttttaatttaattgagaaacatgtttaattgaaggtgattacttagtcgtgtcagttaataggacacattcaaccagctaactactccccacgattcagaaaatgttcttcttcccattatattatttcaatacattcatctatatgatgcgattaaactgacgggaagaatacatctttttcatatcgaaaaaaatagacacagttttcaccacaaaagtctatctgcgatgtcattaattttaggatgtattcgacagttctctacaatgcagtggggttccgatacagtacgactgagttgttttattcttgggacgaccaataaattttgactgcttgcacattcttgggcagtatcacaaacgtcttaaagagagcgatctaatctgcgacttaaccaaaaaaatttatccaataatatcgttcctcttttatttttactaacagtttaatcaacattattactgtaacgccctaatgctaaggcacgctacagt

SEQ ID NO: 125081 - DNA, 2416 bp, Cannabis sativa
tctctctaacactatatctcaactgactctttctcaatctcttcgttccttatctctcgatctatttcggtggatggccagaatatcgatggtttatcaataaaatatctatggttttatcgatgattctgccttgtgtgattaattttgctatattttatcctggatcaagatattatcgatataccatcgaaaaattatcgaaaattgtcatcccttaccttcttaccttaattatctagaagatatcgatataaaatcaaaaaagcatcgataatttgttaaaaatccagtttggcaagaaaaccatatctcaccatttcaataaaaaaatcaacaaaacaacatcaatgcaaataataactatacagatgatgatgatttagaaatcctttggatatcacctactcattattgaggtaaatgtgtatgattttttttaatgatgatgaggtctggccatccactgaaatagatcgagagataaggagggaagagattgagaaagagtgagttgagatatagtgttagagagagagagagctgaatgtgtgtgtgtgtgtgagagagagagagtatgtgtaattagtttaattttttttaattaagggtaaaatggaaaaaatatataaacaaaaaaattattttgtataaattagctgggaatctaaattttgggtatggggtatttttttaaagataaaaaaaatgaaatttctctttctattttacatcaaacatttacattataccatatatcagtttctttataattttctctaaactatttaaataatatatttataatacatatatatgataaaatattatatattatgtaaaatgtatttatttttacactcacaattaaataaaatacattataaaaataataaaaaattatagttaagcactaaaactaagataatgcttagctacatttcataaggtaaatttttgagctatttgaaaaaaataaagttagtactgaattagatattttgtggctatagattgagagtctgttactagtactatagaaatatacaccataagagttaattcatcaattaaatttctatataggtagtttatacgtataatgtattaaagttatatgtaacaaaaaatttatacgtagtttcaattaacgattctttcagatgttactagctagtctatagagacatgtccaaagataattcatcagtcaaatttctcaagtataaaataattgacttaagtaaaatataaactccctctaataattttgttgcagatttaatgtactcatatttgttgaataaatctccttaattaattagttaagacaacgtttgaactcttcaaatgacgatgaatactaacaattacaaaaatacacaaactcactaagaaataacagaataattattttttacaaaaaaaaaaaaaacactcttataaaaaaataaaaaatcaaggagtaaaagttaacctaaagttgagccattatactcaacaagaacaactttacacaattttagatgcaataaaactaaaaagaaaattttcaaattaaactttaaatcacaattaatataattatctgaaaaaaatttcaatcttagattgattatgaggtgctcaaggttaatgaagaaacaaatcaattagatatttttggtaataaaataaagactaaaaagatatggaaataattaaaagtcttaaaatatgagaatactaatatttttctaaatacaaattgtcaaatatggatttatcaagtttgtaatcatgatgaactagatatattgtagtaaaataataagtttgtgtattgaatcccaatctctatttctaagcaacccataaactattcataagaaaatgtgataaaataatatgtatgttatcgtaattaataaactactcttaattaagcaacctcttataatcaacccttaaattaatttttgtaagtaattccaattgtatataattcaattgcttgagtttcaaagtttccttatatattatacatggagtcgtgtttttaagagcattcacatcagtttctttatttttatttttttaaaatatttttttttttattttataacacaaatttttataatacattatacattaattttttcgtttaaatattgttaaaatattgttttaagaatgaataatagcattgtagcattctttaaattttgaactaaaatatctcatgagccaattttttgatatttctcttttctattttgaagaaaagagcattatagctcatctaatatgatttgttgtatccacaatccctcaatcctagacaatatgtctttttttaagaatttttttctaacattagtccaggctgttagaaatttattggggtcataactgtatatataaaatgtgtgttggg

SEQ ID NO: 125082 - DNA, 604 bp, Cannabis sativa
atagtgtaatttgtagtagtgtatcgcaacaacagtgtgtggttcttcagttaggttgacttggcagacgacctctctaagtttggctaactcgagaccttcaaccaagtccacatggggctctcctataagaggctcattaattcgtagtcctatctctccagcatagtactaggtatgaggtctagttgttgtcgctgggggttgttcccccgggtccttcctcaagtggaaggcactcgttgaggatcgtctcttagaggctagggccgattgttcagatccactagggtgttggtgtcactttggccagctgtagtggccagatttgaggtgcctaccatggtggtaggattaaccacatctgtagtgatcatgggaattccagtcttcgctggaacatggacattgggatctgaaatccgatggtctttaggaaggactaatgatgtggatgatgcaatcgaagtttttctcgtgttaaccatgaagcttgatcgaatatgatatcaactcgctctcaatgaaatcaccaaactattgacctaaaaaattggccaactgatagcagagtcgtattaaattgatgcttgccatgtgttac

SEQ ID NO: 125083 - DNA, 2354 bp, Cannabis sativa
ttgtgctttttgtatttttctgtgaatgattttagccctttgatcactgatgctgtgcattctacgtacttgtgttcgatcatgatgttctcaaatatctcagatggattcatcatctatatacacatcatattataattatatataagagttttcatgctctaatttttactataagtttgtaatatgtatattatcacatatctcacatcatatcatattattaatgtagtgttaattagtgatgagtgaattactctgtattcttatatatgacttaatatttttacatttaacccgatgtaaaataatattatccagtaaattcatatgtattaatatatattgctatataaaatttgatctaaataaagtaattatttagtaattataaaatatttttattatgttgcgactaaaagattcgtgactaaagatattagttacaaaaattataatttgttgtgactaaatgtgttttcagtcacaatatacttgttctgactaaaattaaattagtgacagcttgtatatacgttttagtcataagtaactttttgttgcaactaaacattacatttagtcataaaaaaatttatattgtgattaaaaagttatcattaaaagtcccaattttttttatggtgagtacttaagacattaaagtgtcttttaacatatttctctttcacatatatataccatcatatcttttaaaatgtactacacatgtttagaatatttgtatcttagaatattctagtaaaaactttagaaacctagcaaaataaataaactagaaaaacctagaaaatttaaaaaactagaagtaacgaagaatgtaaatcaattagaaaagtctagaaaagctataaatcatgtagaactagaataatctagtaaaaattaaatgtaagggtaaccaactataaataccccatcaagtttctaaattgtaactaagcttgtgtagccaaagcaagtcttttactactaacttactaccttgtctcctctcttactacacacataaaaattaaaacactacataactcttccttgtcccaccaatcatccaacgtcaacatcatcaaactattaactacatatccacttattttaaacaaaatcaatacaaatttattctcgaaccatcaatatcatatataaaggatatataaaattttgaatacctcaagccaagagtatgatcttatgagctcataggatgcaaagcctccattattgttgtcttgtaaagataaaagaatatgaacagcatccttaagatgatcctcttctatgccttctcccacaatctcacaaggcatctctgataataaaattgctgcctgtatatgcatatatatatatatatatgtacatgttataataataaaaatgcatgcatgcatgtcacaaaaactatatgaattgcatatataaatgtataaatatagacctccaaagcttcagcagtacaatcagagacaatccaactattgtctggagttgaaaaagcccatcctccctttgaaatgtggcgataccacttacctggattacccccactgttttctgattttatcttcatcattaaaaacaatacaaaaattacttaaatatatatatacaaaaataaataattgtatatatatagttgaataaaagttctattaatcagttgatttaatataattgttatatttaatgtcggactcgttaatttttttagggttagatttaaaaataaaaataaaccaattcataagtatgaattaataactaactcataatataaagaaccagtcgagatatgatatattagtcatatcattgtaggaattgaaatttattttgtaaaaaaagagaaagaatacatattattttgcataaaaaattagattgtatactcatttttattttttatttttatttttatatttttttattactcttaatttatacctatttttaagtcatatccgttagtaactctaattttcataaattatatgagattgtatttagtattttaattataaaaaatatatttatcaattaaaattattttacatttatatttaattaatgtgtaataaaaaaaaattctcaacttaagcatcatgaccggatctaaggatatgcagagtaaactcgtacctaaagctcccatcctatgagcctcgcaaataaaaaaattattttaatttaaatagtaaatatatttttatccgtacataaattaaaggaaaaatttgattttatatacttaaaaaattaaaaaaatttattattaaaccaaaaatctaaaccctaaaaaaactatatttttttttcaaaactccaaaaat

SEQ ID NO: 125084 - DNA, 975 bp, Cannabis sativa
ctaattttactaaaccaaattactaaagcagtcgttacaaactgctccaataataacatcaattccttgctccgaaactccttccagagcattgtaagaattatctatttgagtctcagccattacctattttcctctagctttaccacctttagtaacctgcttaaaaccatttgtatcaactacatccggttgcatatcagaatccccatctttattctctgccgccttgttctcatcaggtatccctgctgcataattcacagcagcatctgtattggctttggaccccttaatcacccatttttcatcttttcctatcttcttcttgcaatcatcagtagcatgcccaattcccttgcagtgatgataatgaattggtttccattcataattaatggaagcatatacatcaaaaccatgctcatcttcaaaaggtattctctctgggaactcttgctcaatagcaacttcaataaggaccctcggatagctcaacttattcctttctttagtcattgcatcaacctgaagtggcttccctagctgcccaacaattttgaaaagagatttctctcctcaatacttcaattctaaatcaggtaactgaatccaaatcagcaccgaacttatatcttcttttttgaaatttacttcaggatcccaggccttcattacaaccggtcgattgttgaagaacacatatcctccattaagaatttaatctctaatctcaattgtgtcaaatcgaacaagaaaaaccccataagacaaagatccaaccttgtcgactttccctttccaaagcctcctaataaaaccatcaatcacagacaacgggggattggaagcactataaatataagagttttggcacaatatgggtatcagatttttcctagtgttgttataccagaattttatctttttcttttcttcttttttattttactttattaattttggtgtaaagac

SEQ ID NO: 125085 - DNA, 731 bp, Cannabis sativa
  modified_base (638)..(657): a, c, t, g, unknown or other
  modified_base (702)..(706): a, c, t, g, unknown or other
gctcaggtttacgaaatgtgaccctgtgctcatgtgcgagatagatattttcctaagtttcattaagctcagtataaatagtgtagattggcacgtacttgctgtgattcttctgttttctcttgtccttggctgattccttggagtcatctttccttttagagcctcctagattgtcagcctttttcgagatggtacttattgagacagtgctgggtttacttcccgagccagtctttaacaacttcatctcttttcttgcttccactgtttgaacaaacacttgagccctctcaatgaactcactgatatttttcactaggcgaccttgtaggtcatcccaaagcttgccttcaacagttgagagatcagtcgtgatccctgcttggagggtagtaagctggatgttgttgttcaaatttctcactctcgctgcaactgtactgaaacaactcaggtaggacttaagtgtctcgcccaggtgctgctttatattagtaagagaagacgcttcaggtcgcctatctcttgctgcatggaactgcttcttaaagtccttagacagctgatcgcaagaggtgattgaatgatgggtaaattttctgaaccagttgttgtaggaatttattttaccaggnnnnnnnnnnnnnnnnnnnntatgtttattaacaccctaaataagaaaccttacattgggtgcannnnnattaaatgactccttctgttcagat

SEQ ID NO: 125086 - DNA, 1154 bp, Cannabis sativa
gagaataatatatatgtatacactcactatatatatgtatacactcactcacatatgtatacactcactcacaaccttgagtgtagattagtggggatcactatgatttgaaatagcttatttccacctatctctaagcactaagggaactctctaagaaatagttttggaaattatcaagccttagagttttctaacaaagtgtttttttgatagaaaacttctcatctcaatgaacacattagactcctttatatagtgtttaggtgatcactcttaggattcaaacacaccatctcatttctctcttataatgagcattaataattgtaacaactatattttataagatttgaatcctatcattaattttgtgtaacatctcttttattacacaaaaatatgatcaaccaaaaaaagttacaaaaataattaatcttgtaactcctctccatattacaaagtacaggttacaatattaggttaaataaattatatgttacacaatttatttactaaacacttaatatatattattcacataataacatatattaccacattttaatttacatattattatattaaataatataacagaaatttcagattattttttatttattcatttttaatacttatgtgttaatgttttctctgctcgtcactgttgttaaaatatgcagatatgagatttctgttgtttttgttgttttgctccactttttgttgccaatgcattttaaatatgcagatatgaatgttgtaactaccatcttcgtgagaaactaggaaaatttatttttacacaaaatttgaaacaaaggtgaaaacggtggctaataatacatcattataatacgccaaattttttttaccataattgtagattgcttcatcattcttcaatatggcttctaaacctcctgttagtttcctttgtttttattatttttcaatcagtgttcaacctcaaaatcatttggttgatttatcttgcaagatcaagcctatgttgcattgcatttaaattcactactgagtaaaaatatgttgggaaacaatcgattcttattgatgcattacaccatgcatgattgcacacttgaactgaaatatcagttctctaaaactagaaagaaatgagagagaga

SEQ ID NO: 125087 - DNA, 730 bp, Cannabis sativa
caggtaaagattgtacatgtcgggcagttaggcctggagcgtacgatctttgggatatcagggcttctactttttggtcgctaggcgacaaatcttttgtatatgagtagtaaaattttataaatgtattttgtaaacgggatcccagaattttataaatgtattactttatgtttttaattaaataagaaaatttttattaatcacgtttttttataatcccgttgattagcaacgagctgcaaagtacgtttaaaatcatgctaacacgcctatattagttagggtgttatagatgatatgaagatggtggctctgacattaggattaaccacatgatccttgctatagagagatctccaacgcaaaagagaagatactttaactaatttcttgacaagagcctaaggattcataaacttagaagaagcttatactcaaggttaaggagtactttcagcaccttccacagacataacaacaacccaaactttgcagatgactaatccatcaattttcccttcggtaattgcctttacaactcctaccgtttacgaaccaagtgctaatgtgcagccagctgcaaatgctagtttttccaaattcggagcggtacaaactgaattctgtgtcattcccgcacaaacaaatcaaaaaatggaagctccaaaagataagcccatcatagtgttgggttttatgccctaaataaaactctgtttcaatgtaa

SEQ ID NO: 125088 - DNA, 1043 bp, Cannabis sativa
  modified_base (76)..(84): a, c, t, g, unknown or other
  modified_base (921)..(921): a, c, t, g, unknown or other
tagtgtacagtaaagcaatgtaacagtgactaatcatttttagttctaacaagttatataaaaatatgatatatannnnnnnnnaatataatacaatacaatacggcctaatacaacgtaccaaacactcttaatgtatctataattaatttaccatttttttttactgaatattaatttaccatttaaaacaagattttaaccgtatattatattacaaattcttcttttctcatttagctatataataatattaaaactttaatcctaagtatataaaatgccatactattctctccactcaactctttgtttgtttgtttttttttttttttgaaaatcaattcccactttatttccaaatttcatcatattaaccatattaaggaaatgagacctgcaattcatggattgaaatgattttcgtgctgaattcctgttgggattcagactcgactacaaagattcttaacgccattgaagggtttaggccattagagaagagtaagattttttctatgttggagatagagaagaaggaatagaaggtaaccgccacctgaaaattttatcttttgcatttttgatttcaagatgtactattcatattattttttaataaaatatttgtacattgtaaaaaaaaaaaatgatatagctaatgtctaattatttaaaattatattttcacttaaaaatgatgtattaagctttaattaagaataattgaatacaggaagggatgtacacataccattagagtgctctagaagtaggagagagaaaagcaattttacttttataattgaatacacagtattcttagctaacattgaacacacgacattgtttgctgacgtgtaacgttaatttttattgattattttttttttttgaataaatttagcaactttattaacnagcaatcgttaataacaatagaaagcacttcgatggaacaattctccaattgaagcacacgacatggagagaaacaagaatccctggctaaaacatgagtcagcttgtttgcagatcgtttg

SEQ ID NO: 125089 - DNA, 679 bp, Cannabis sativa
tcaagttattttatcttctttaagtaatgtttttattggtcatgttaaacggtctgctaacaaagccacgcactgtatgacatgtggtgcttgttattggtcaggtcttctctgttttgagagtgatatttcccttgcctttcagtcttctgtattagcgcacgtttctgtctaataaaaattatttttattaaaaaaaaaaagtaagacagacttccattataaagaagaaattttgtaattagatgtaaagttgatccgtttgtacacctaactttaaatattattgaaataaaaattatatgaaagtagtaatgttaactaaaaattcctgacacgtgtgtgatcttctgctgacgtccacaccgtaattcactaatcttacatatcttacatatacatatataaaaaaaagagtgaatacatatactattgatccaaaacgtcaaccaaaacggtgcgtttttattactttccaagagtagtttggtatagagtgatccttgcatgtgatgtgagagggtaactttcatttttcatttttaaagtactatttttgtccgtttttcacattccaagctaaggtatatataaataaatatgtatatatatttatattttcttcattaatttggttaaacatcttttaattaaactattataactatatatatttttt

SEQ ID NO: 125090 - DNA, 2614 bp, Cannabis sativa
taatatatttggtgtcgtacgtatcttacttactaaaatgataaatattaattttggcaattaattaggcttcacaatgaatagtgcatgttttgtcgtaaaatgtcataaaatatattaattatttatttattattataatattttatttaagttattaaatacgtacgtacgtacaaatcattaattaatatatattgtgataaatagagtactattaatatttttctctatttattgtgcctttatgatgccgtagagttgcctcttgcatgtaatatagatcatcacgagaataattaattgaataaaaagacataacaatgtgtacatacaatcaaattaatgctaaatatacacatttaaattacatctattttgtgatttcaaaaataaataaaaaaaatattacatatattttggcgaggagtgtcatccttgcccccaccttgtttactaatcgggaaacaaaaaatgatcccaatcctcgtcccattccccctttagacggcgaatctccgcggctctgccccattaggggcgagtccccgcgaggcgcatccctacttatgactatggctcacactctaacaaaatttgttttatctttgaatgagaactatgtttggtggtcactggtgtgactatcctaatatgctacttctttgcaaaaggataaaaatcttattgggtttactcaaaaggttttaataaagtcagtttttttttttcaaaaaaaaaagtaataataataaatacatattgttaacttgaaaacttttcctgatgacgtgaacattaatgtttgacatgtgacaagagggatgatgtcacggagttgagtagactcgagtcaaagcagtcgacctgagatgggactctaaccctatgcccaggttgactttgggatcttcgggatggaagttcagactttaataacttgaattcaactcattatctttcaacattatgtatcatgaagacataaaacaacctaatccaaaacccgagagctaaaattacacgaacatacaacccgtaagccaacctgagcacctagggttttacctggcgcccaagttgacatctcaactagggtttcagttttcgagaccgtctcagtgcaaaagggtcaaaacttgcattaagacgtcaactagacataccacagatatatttgaggcatcataatcagaatcaaagcaagttcattttttattgcctggggcacagggccccaagcacccagtgccaggatgcctaggttaaaaatttgtcaatctggcccccttccaagtatcacatcagagatttgactttttcatcttcttcgtcttcatcaaaaatggggaaagaggtcctttcagggaaaaaacaacacttcataggtgctaaaagcaaggcccagggcctaggttgatacctggggctagcctagtgccgaggttgacattttgtcaacttgggccactttcaatgaagttttttaggaactcttctgagcatcttctttgtttccagaaaatattgagattcaactatttttgaggattaagcagaacttccaaaggggcagaactggttttttttcgatcaagttcaccaaaaagtgttcagggaattttttccatcttcaggtataatgaagattcaagaaaaattagggagaaaactacaaacccgagcccctagaatcgggacccatcacccaacttgacaatcaacttgggatgttgccttcaattgctcagatgccaaatttaattcgatcaatgaatccagaatggtctaaacatgataggaaacctcatcctcaagttcaaaatgttggaagtatcaaaataagatctcggggaaaactcgggaatagggtacacaatggcttgatgcattgggctctgcttatctgattctaattctattttgaccattcgtatagtttttcacaataactaagatccatgaagttagagaagtcaaatttacaaattcatattactcgtttccaacatgggaaactcactcggaaatgaagacttttgagtctctcattttgtagaacaacaacatcttcgagaactggtgaccaactttgccacaacagaaacatgctaagtgatgtcaaaatatcacttagacaccgtaaagtacatcccttggacatttttacacttacatagtgtccaagttgacgtcatatgtcaacttgggtgctggatgttaacctaggcattgggtcatgaactgccttcagtaaaatagccataactcgttcaatattaatttgattaacgcaattcaacttgtgtttcaatgctgattaaatgctctattaagtcacgtgtcacacttcaattgtaattctgaagctatcatcgtgaaatttaaccccatgggagttataaaaataagctctgtgtcacccgtagcaagacccattaggctccaaaaaatagttatcaccaccaagagctaattttcaccgttagatcatcatttacattcgaaaacatccaatttgtattttttatttttatttttgtgggcatccttcatctattaaaggagagctctataagctcatttttttaagttcagaaaactacccacaagg

SEQ ID NO: 125091 - DNA, 509 bp, Cannabis sativa
cttgctcttcaatccattgtatggatgcttctctaatagattatttttattcaaaaaaaaattatggtacatatatcattaatttatattgatgtatatattaagcaatggtagggactcgagtgattaatccttgttggtcaacccaaagacgaaccctatcactgcgaaaatccatggtgacgaatgagccttcagtcacaattattactgttttaatcgatggattctctttagtgattgtcttctcgcctatctcaccttgtattcccactagctccggccatgaactcttatcattacttcccgatctatctccacctatataaagatgcatataatttataaattacatacttaaaaaataaaaataaaatataaaacaaaattattagtcttataaatataactgaattcttaatttttgaaaaattcatgaatgactttttatttatattaaaaataagatggtttattattaaaaataaaatagtttatgagaaattcat

SEQ ID NO: 125092 - DNA, 1047 bp, Cannabis sativa
caaaaattagtataccatttaaatttccctacatatatttaatttatggttatatgtataactgacataactataatgaagcgaaccctagctagcaactcataatgtataataaaaccagcccaattaacgatatcttgtccataacttatagatagacttgaatattatttagatatttattcaagcccactaagtggggaaaagaaacgttatttagacaaaatgttgagattcttaactaagaattcaaacatatctaaccgtttgagcttaggtaggggcacttgtatgatatatatatacatataatttatatatatatatgaatattgactagaaattgacctttttttgtgtgaatgataagcttggtaaacaaagttctagcagcaataattgcatttattaaagaggagcaaaaaaaaggaatttttcccaccttcaaaatatcacaaatatatcttctctgaccagaaagacatgatcatcatgaacttgcatagatacgaataagcacaaaaataagtacccacttgatagttataaaaacatgcaaaaagttaaatgataattaaatataaatatttgtattatttttttcttatcatgggtttggttagacattttgttgactaagggagaggtctcaatgtcaatgatatttaactacgtcattggatgcggttcccaaaatctgtgctggttttttgcatgttcccgacaatgtcctatttttcaatggtatgatggcctttccttaggaggaatgaaatgttttggactgtacttagatagaactatgataccccaaactcttttccaaatatagattatatagattgcactatacactagactttaattagagtactcagacatcaataacctcatctagttattagtgtccttccaccttatttccatttttcattaaattacagctatatagttaatgactttcattggtccatcttgttgagcttgcttaagagcattgtattaggcacagtacggccggtgctaagtattatttatttatttttt

SEQ ID NO: 125093 - DNA, 2425 bp, Cannabis sativa
atccaagtatggttcttctcaagggcctctatttctgtgtccatggcattatcccaaacagggataccttgagcttggctaaagaactctggttcaaaatggcttgaaatagctataacatcagctctaaatgcaagagacaaattgtggtatccaataacctgagacaaagggtgagttgtgacaaaagaggcctgagaaaaattaaacagattattagttgccaaataacagtgatactcattcagatatgagggctttgagacttttctccctaatctattatgaggagagataacattggacatatcaaaagtagtcacatcaaaagaatcacgcaaaacggttttatgaggagattgagaggtacctgctatgtgtgaatcatttgactctgcagtgtgaggaaatgcagaaaaaaaaaattcatgtgtaggaggaatacctccactattaacaaagggaaaaatgtgttcataaaagtagacatctcgagaaatgaatgtcacatttgtgttcagatcaagcaacttgtatgctttcatacctggagggtatccaagaaagatacaaggaacagacttaggtgaaaccttagacctggattgactcaaagtagatgcataggctagacatccaaaagattttagatgttcataggcaggagctttagaatgaaggatgtcaaatggtgacgtgttttgaagattgggtgtaggtgttctgttaattagatatgttgtagtagcaacacaatcttcccaatacaccaaggaatgtaagactaaaatagcaaagccctagtaacattgagtaaatattggtggtttctctcaacaacaaaattttgttgaggtctttacacacatgaatgataatgcataatcccaagttcattgaacaaatctttgaattgcaactcttttgcattatctgacctaactcccataatggttttaccaaactgatgttgaacaagttttataaactgaggtatggcagtttaagcatcagatttttgcttgatgagtttgatccaggtgtacctggaacattcatcaataatggtaatgaatacctataccctttagttgtcatggtgttataagggcccaaatgtcaacatgaatcacatcaaaacacttttcagcaacattatgattagaaatgaagggcaattttctttgttttgcatagtaacaaatggaataatagaatagggaattagaatcaacatgaaactttaaagctttattcaaatgatgaacttttacacaagatggatggcccaatctatagtgccacacagtttcgttagaaattttttattcagaaatgaagaagaaacagaagcaaactttctatcactattttgattacaattcaagtaatgcaggttgccaaactttctacccatcctaatcaccttggtcttcaaagtgtcctggatgacacaattgccattagagaataagaaagtgcagttagttgtggttgttaaggaattgactgacaacaaattgcacttgaaagaaggcacatataaaacattctcaagaacaaggtcaggacttaaaacaaatgtccctatgcaagaaatttcagtatgttatacattaggcaagaggacagtttttagattggaatcaacataggtatttttgaacaaagaaagatcaggacacacatggtgtgcagctcctgtgtcaatgatccaatttgtattatgaacaaaaaatttcttaccagagaagtgagaaaccacaggtggatcatcaaaagcattaggagtgttgttctcagtagttttctgagcaagcaaggccatgagcttctgacattgaacacttgacaaactagaaatgagatctctctccattggcaattcctctatttttccttcattcgttcctgaaaaattcgcaccagcagtcttgcctggaggtcctttagcatcacgattgggaaatcttccatgatatttatgaccaagaggatatccattaagtttgtagcacctctcaattgagtgtccattcataccacaatgagtgcaattttactttgatctgaaaggttgatcagctccagcaaactgtccattgttgctcgatgttgctttatccacatcagatgaggtattgcctccaccagttaagcctttttgtctctcttcttgaacaacaacagcatatgctttgttcacccttgaaagaggatcatgaatcaaggtctgagacttaacaaagctataggaatcattcaatccaaccaaaaatttgagcaatcgatccttctcctaatattcttgaatcactttcattgcaccacatgtacgaacaagttgtggtatatactctctgatctgatcccacaaggccttcaaacgagtatagtaagtagtcactgttggaaattattttac

SEQ ID NO: 125094 - DNA, 1397 bp, Cannabis sativa
tgaatgtgaaaaatgaactaagggagctttcattttataggtaaaaaaaagcccacaaaaataggagataaaatgtaaataaagtattttttaccgttgatgatgatctaataatgaaaattagcatatggtagtgatggattattttttatatttgccgcgtcttgctgcgagctaccaggaacttatttttgtaactcccttgatgatgatctaataataaaaattagcatatggtagtgatggattattttttatattttccgcgtcttgctgcgagctcttatttttgtaactcccttgagagtgaattttgacgacgatagcttcataatttatgtaatgaccagtttgcaaatcacttggacttaaactttaattatataaccaatataaacatatatatatatatacatataattttacaaagctgggatcctgatttcaaaagataattttggcaacataacatatttatataatacgtcacatggtgactacaaaagttaaccccaaaatatttcaagaccaaaattctccaggttgtactactgcgatatgtacaatcactgctgagctccaaaactcactgcacctcagccttaacttttcctttacctgcacattgtaacatactggtgagtcaacaaactcaataagatatgcataaaatatacaatgtaatatcgacttgtctttaggccttcatttgcctaactacaaggtttatcaaatggttaagaatgttcttaatagaagtacgacctctatatcacatgcactgaagtacatctcccgtactaatgttggtagggacgaaccttactctcgggtactattgggtgttgtaccacatgcactacgtacacacttatactagtgttggtaacaccctaacataccttaaatactatacactataccagtgcactccgtatcgtaaccataccagtgttggtagtgtataacaatatagctagcatgcattttcatacatatacacatacatatacataatttatggtaatcttacctcttttccagatttaaacatgctggtcgattttgaatggaaaattcacgaattgaacggaagccctatgtcacattcacataaatgggtaaataacttgggcaaaccttcccagcaacctatacttaaaatcagagataaccctatcgctaaacaacatggaaacgttctaaattctaggaaaacacaagaattaagggttttggtcgtgccttaactggtagaccagattcccaactggtgaaccggttctttgggccctgcctggggaaacggttaaccggttcttctgtagaaaaaccccaaatgaatgaggctatgaatgaagagaataagtctatgcaagacaataaagtttgggaag

SEQ ID NO: 125095 - DNA, 907 bp, Cannabis sativa
  modified_base (27)..(28): a, c, t, g, unknown or other
  modified_base (58)..(59): a, c, t, g, unknown or other
  modified_base (93)..(94): a, c, t, g, unknown or other
aaaaaaattctgagcatagcaataacnnaaattctgagcatagcaataacggggggcnnctgagcatagcaataacggggggcctatattggnncgccgttattgctattttttaaaactttaattttgaccaatctcgactggccaatataggcccgccgttattggtccagcctatttttgtcatagttaccaataacagcgggcctatattggcccgtcgagattggtcaaaaaatagcccagcccgccccttagcctccctttcatcttctttcaattaatctatttttaaccagctatagtttcttccccaattcgaaaatggcagccatttttgcctaatgcaaaaattgatttttacttcttctatttcatcacaatcactccaaaaagaaaaggtgatgctattgattttttttttttttttgatattcttatcctaattgtttttaatttattttagtttaaaaagttagtgaaataatgagatgttagcttgtatttgaatattttagattgaaatatgtttgggtaagcttcatacaacataaaggaagcttgagaattcattgttttggagagttatgtttttttttctttattttttttttgctgaaaatggtgttttttttgaccaaaaatagtgtttttttctttctttagtaaaaaatgttagtaaaataatgaaattatagcttgtatttggatattttagttttaaaattgtttgggtaaggtttcatacaacacaaaggctatttgagtgagaattgtttagaggttcatttgagtgagtttggtttttttttttggctaaatatggctattaaatatgtcaaaatagttgctttgttctaatgttgattttaaaagtttatattttctttaaaatttgtaatggtta

SEQ ID NO: 125096 - DNA, 1603 bp, Cannabis sativa
  modified_base (1566)..(1578): a, c, t, g, unknown or other
attaatataataataaggaatattatttttagtgtaatttttggtgttatggttggagtagaaatactttttgacaccaaatttagtgatactgtaacaacaaatttgatgtttccttggagatgctcttagtttgtagatacacattatttttttctaggattaagttagaataacttagaaacatctatttggaaatcaaaccctctctctccttttccttgttccacctctcgggtgaaccccacacttggaaaaactaaaattttcttcttcatttccctccaatttttgttaagagtcaagctaggatttgggattagtcaattggagagctagtagaaggatcaagatatgttactgaatctcaatttcttaatttttatatgtatatagaggaaagttagtttttttatattttatgtgatatatagtgttaattgttgaagaataatttaatattgagttctttttgtaaagaccgcctaagtttaatacgttggatcattaaataattagggtttatttatgtgatttaattattattaatgattttatatttgtggagatgtttgaaattcaatatatatctattatgctatttatgtgaatttcttattttttcgtaattgtgttcggtagcggtggaacgcgatgctgggtcaatagagagtcacgctttcatatggtttagaatgttatagatagcgggacattattattagacattgaaagtattaagaaattgttggggtctagaaatgaccaaattacccttggttatcactaaacctttgggttatgtatagggacaaaatagtcattttgctaaggttttttatttgtctttttgtgaacttattttgaggataataattagattttaaattaaattttcatatattactaatttttacttaatttagaagaaacctaaaaaataaatcactccctctccacacacactctctctcgaattctctaggaaaacaactagggcttgaatttttctgcctcaattgtgagattctagcaagttgtgagtatcctaaatcaaggtaaaattcttttagcttctccctcttcattttcttcaagctcaagttaaggttaatgtttgaatttttggtattaggttgttgtgttgtggattagagtttggtttgatgttctgaagtttaattgagattatttaagttgaattgagcaggatttattggctgtggtgatgtttgagcaaagtttgagtttaagaattcaaaccttgctctctaatggtaatttaggattatgtgtaaattgctaggttctgttgcttgatatgattctattgtggtatatgcaggtgttctgaagattattagaaagtttggagttgatttttagtgttggggacatttttggtggttcctacactaaaccggtcaaccgattcagggaaaccagtaacaactggtcgaccggttggtccccaagaaaccccatcaaaccaaaattccggttggggaactggtctaccagttaggaaagttttgccaaccctataactacaaaaaatcttacttnnnnnnnnnnnnnaacttgtgactaaaagtgaaaaaat

SEQ ID NO: 125097 - DNA, 888 bp, Cannabis sativa
ttaaaaaataatatatgaaataatcttactaataataattaatgatgtttttataaaaaatcatgtttgtataattattttttattggatatagtttttaataaacacaataacctatagaaaatccttcaaatgagactatttttggtttaaaaattaattttttggtaaggtaattttttatctctttttgaaaaagtgtacttcattaattactttatattttacttaaaattcattttttaaccaaattaaagagtatttattatttcttaaaaaataaaaattatttagatttaatatattaaataaaaaaaatttattaatagtttttattctattttattgtaaacggctttgaatgagcttattattattttgtatgagctatatataatcaactttgtttgattttattttcataaaaaaaaatgtaaaaaaagagagagaaaataatatatgttaatgacctatagaaaattcttgaaatgaggctatttttggcttaaaaaagaaaaacaaaacttttaagtatggtaaaaaaaaatcttttgaaaaaggtgtatttttttttattaatatttctaactaaatcacattaaataaaaaattatatataatattgtgtaaaaagagaaaataaaagtgtggctaatagaaagccaagtgtaatattgttgttagtatgataatagtatacctaaaattttaataaatataataataatgaaacgaaagtgtaacacgttattcttaaaatggaaacttagtctaattttggacagagataattatttatgggtgattctatagtgtacctccttaaaagagatgtactaatccacccttaacttgtttcggcattcagaaaaattttttagtctaatt

SEQ ID NO: 125098 - DNA, 795 bp, Cannabis sativa
ccccccccagccatggccgccagtcgcactgtgttttttgaagttaagaaatcaactggcacccctagcgctcgaccccatattggaaagcaggtcaagtcatgcttccaagattcattcgagttctccatttttcccaagattaataatccgttagataaatagcatggcattttagataagattctactctgaattgactcagaagcaaaggtaaaagttaagaaaagacctgagtcaaatttttcttcgatctttatgttccactccgcctctttcagttgccagattcctcccaggacctttttcagaaatcccctgttgtgctccacgttcgtgcacaatcatcccctcaaattgtattttgcaatcgtaagagacaggttcatgtccacttctcactcatcttcatccgagacttgaagtttgtgagttttcgacagcaattcatccattgctaaggtgagaaacaccactcgacacgtcgggaacccttcggagtcgagggaggagtccagggaccaaccggagcagagcccaaacagagccctagcagagcgaatcttggagccttctttaattttgatttttctatttgttgcaatagaataattattattactgttgattagtcactaattttacttttacaaataatctcacattatttataaaataaagtgagacattatacatacacaataaataattctttcttttgttatttatttatttatttttttttgacgcggtgatcaaaatcacacatgattaaacaaagcagcaatccacaat

SEQ ID NO: 125099 - DNA, 1738 bp, Cannabis sativa
tttttttttttgtaattttctgtttagatattggagttcttcttttccaatcaaattttgtcgaaatttgtggttgttctacactcgatctggtttcattctggttgcgtagcagattggatcgatggaggtttcttcatcatctccgttcgtgacgtgtggcttaatgtatagaccaagttgtatttttgtaattttttcaatgtgggatgtataaatgttgattgggccagcccatagtaatattgtaatattttaccctttttggaattttcctgtttttttccctttggactttaagttttgttgttataaaagtattctagaaaagttaataatggaaataataaaaaaaaaaatattctatagaagtatacggatctcaattattaaatttagaattcttagtcatgcaaaaaaaaaaaaattagaattctaagttaataaaattttctatgtatatatctttaaattttaaagatatttgtatatattgtttgaaaatactaatttattataaaaaaaacttaagtgctttaataaatttaattaacaattctatataagaaatatatatatatttattaatataataaatttaattgataattctatataagtatacatatttatttattatattaggatatagaaaagccaccattcataacctcttaaactagacatgtacattaatattattaaacaccaatatccatccgtatatatttttttttataaataatatttttcaaatttactttttattgttattgttattagattttattttattatttcaacacatgataaaatatttttttaacagatatttggattaataaaatatatttaacatttttattatattaaaaatattcttgttttagttttaaatccacggatttcataatttttttttttttaaaaaaaaacaactgctatataatatgaatgtttgtttttttgtattaagtaattatattatatctataaagtttttttattaatattaggtaatatttgataaagtaaaaattatattttcattataattttatttatatatatatttttctttttatactaataattttttattttgtttttgcaatttacatgctattttgtgtattataattttttttagtttatgtggatcaataagcaatcattgcaagtaatggaattaatggtattgctagctatggtactattaatggaagaggaatttagtaagtttcaattatattgtatactattcatatagtttttattttaaataatattatcattattattaagattattataatgtatttgtatcattattaagaatattataatgtatttgtagaggtgattttaatttgacaaattcggattcctaggctcaagttatctcataggttttgttgtttctacttttgtagttgcaattcttacattaagataagatttacttatttttaataaatagtaataatatttttcaaaaataaaattaatttattataataattgatataaaaaaatttcagtcaaaatcgactaaatcttatccaaattggaataattttttggatggccggcattgttttgtgtggattctgaaaccattttcacattcttaccatttctcgaatgtaagtttgttatcccaaatttggcactctgacgtggcatcacgagaatggtgacacgtggactctacctggagcatctgttcggatcaata

SEQ ID NO: 125100 - DNA, 776 bp, Cannabis sativa
aataaatcaacttccatcatataaataaatacatgaccatggtagaattaggaagtgtataagaccatctctgatgattatattaatttggtatacaatttaaattaattttgtgtataatattttattttttgtgcaataattttaataatttacgctaaatatctctctaaataaatatattttattaaaaaaaatctctcttagtgaacacaaatatgtggatcacatctgcttatttgattggcgagaataaatatataagttaaaaatatatgtgagagacacaagattttatagtagttcattcactatattgcgacagtgatgaaattacgtctacttcgagttttatttctcacaagatggattacagaaaaataggtaagtctcgaaactctaatttttaaaaatagaaactagagagagatgctctgaccttatgactacttttctaaacttaaaaaaataagcttatggagctctccttttatagggaaggaagtcctattaaaatgacaataaagtaatctaaaaaaaatatggaataatacatttaggtgatttttgatcgtaaatgatgatctaacagtgaaattgactccaaaggtcagtcgtcagtttttggagcttgagtcgcgcctgcaggacctatttcaagtaagttgtagcttaactttgcaacttccttggggtaaaatttggagtcgatactttagaattgtgatttgagtgtgagacatgacttgatcatagagcattaaaatagcttcgaa

SEQ ID NO: 125101 - DNA, 2471 bp, Cannabis sativa
agcaaacatataggctcacataaaaattgatttagatggatcctatcatattactaggtttatgacacagatgaaagaaaattacaaaattacttgttacaaattatttaactgatttattaacaattaactatgattaatttggatcattggatccatcaacaagttaatcatgaataactatacgttcaaatttaatagaatttatttattaaacatatagtcatgaaagtaatcatgtaaaacatgcaacataaaataatttgaaccgtgacaatcttaaccactgtagaccgtaaccgcggaaactgtttttagtggtttggttaattcggaccgtttatcacgtaatggttcgattgaggttcgtaataaatagttaacggttaaactgggtcggactgtttataataaataattgatttatatatattttatatatgattatacgtctaattttgaactattttgcgtgtcgagttttttattgcatgaattttagttttttatgttatgtttgacttttgagaatgtttttatattgttatttatatgttatagatctattacttatcatgttaaatatatattttgaaaaaaaaaaattaaaaacttagtgaaaatagtacaattacttaaaaaaatgtgaataattataaattccacttaaatcgtagtttcaaaccagaccaaaccgttcttaatggttcggtttggtttggtttgagaaatttattggtctggtttggttttcaatattcaaaaaactgttatactggtttggttcaaaaagtataaaaattcagaccaaatcaatccgtgaacaacccctactttgacaagtgagttgtgtgctgaaattgagtacccaaagagttaagcccatgccgacaactttacacaaactagaaaaaatgcaagccaccattggcaataataaatgttatctttaaaatcccgtgttacaaagataataagtatcggaataaaataagcgccaaaaaatattaaactaattaagttctaaagtcgccaagatacataataaactaagttatatatacttaataaaattcaaagatgtgaaaaagacttgttagtcctaactaataagtactccacgacaagtggacatatacaaacccacacatgtggtcccaacatcaatgcataaccaaaaagtgtataagaagaacaagagaattcaactctgttaacgacaaaccttacttgccaaccaacttgagcaagagatttaactctattgaaggatgagtttgagaaagggatataactgtactcaatgctcaaaacataagcaagagatttcaaaactccctaaaagtttcaaattcaagaaagagatataactctactctaaattacaaaacttaagcaaaatgttttaaaaccttgcaaaagttctaaaatcgagcaagagacataactctactcgactaccatatgagatataagctataactcggctcacattctaaggagaagccacgtgctttaagaactccacacatataattctaaagatattggtcatgcccatgcacacccctttacaataattaagaacattggttgtgcatatgcatacctcttcacaacaattaaggacattggttgtatccatgcacacatctctagaagagaagtaacatacaaagaagtattttttgcgcaagccttgggaaaagtgcaaaaatcgttacttgaaggcttacaagcaaatacatttggggggaaaatgttatacctaatttttgtaaaaaataaaataaaatggctaatcttgcagaagggcccacatgccaagattaccttgaagacactcaagtcaatccggtgactttgaccgagacttataaatgcaaaataagttaagacatcctacttgaaggccccatggtacctctagaagacttgaaaacattgaccaaccatttggtgttgggactcacacacccacgtgtgcccaaactagggtttatgggcccgcgtgagcgttttcaccctagagacctcaatcagacaaggagaccaacaaggacttaactcatttaggcataaaaagtcttagacttgaacataaagtcaaaattgcacaagaattccatgcaacatggcctatgtgaccactgccacatgaagatggcagtgctctccagtttttagagaacactaccacaaggagatgaaagtgctcgccactcattaaataccaaagggaacttgtaaaaatgtgttccctcaacacctaggactgcaacacaagtgaaagaaaccattccttaccaaataacaaggttggccgaccactgccatctttgtggcacaaattgtggcagtggtaggccacatttaatgggaacaagatttttcgccagaagtattttttaatcaataacatgtcaaaactaagtgagaaaagccaccaagtggtatagaaactgttggaa

SEQ ID NO: 125102 - DNA, 961 bp, Cannabis sativa
  modified_base (910)..(920): a, c, t, g, unknown or other
ttaaagttaacgtagaaatctaaaaagtatcgttaaatcaaaaattctattacataaccacactttatataaagtagatataataataataaaataaaatcaacttaaaataaaactttattaaaataatcaaattcatggtaaattactaatttttctccacacacccttagcttaaggataatatggtcattgatttataatctgcttaacctcaaaatttctaaacattacgcaaaatctcccagtacaactcaaatacaaacttatatcgtggtgatatttctggtcaattaattgagtttccactgtagcataacttgaaaaatttttattccacatttaacatatatattacacatataatttaataaaatattcgtaattaataaattactcctaatttttctatttctaaaaataagcctaatttctgatataaagttagtaagactataatcttacttattaattccctaatacatattaggtttcatatttcataaaatatgttcctgcacacgcaactttaattctcaagttgcttcccttaccttgctgtttttccacaatactttaaccagtagaatcgccttgttttgcaatacttttttctttttttatccaagatttgggtaggttgtttgtcatacagtatatcttcttggagcttaatatcatcatagcttaaaatatgtgtcgagtctgaaatgtattttctgagcattgaaatatgaaacatgtcatgaactccacataaagttagggggtaaggctacttggccctaccttttccaggatctcgaagggaccagttaatttagggcttaacttccatttcttcccaattctctgaatcccttttataggtgaaactcgaagcattacaaaatgttgggttttatgcccnnnnnnnnnnncatttcatataatcagatttactcattaataaagatcagaa

SEQ ID NO: 125103 - DNA, 1429 bp, Cannabis sativa
  modified_base (1192)..(1195): a, c, t, g, unknown or other
ttaccaagatgtactaaatcgtgcatagaatttttcagatccttaattttttttttcaaactattaagatgtcaaagacttccatttaatttttcactaagtaatttggatgatcaactccatgattttttttttttttttttaaagaatcaactccatgaattttatatatttattttctttaccaaaataaactcgatgaattttaattataagcatgtttagtatttttattcatgaatttgctaattatatatatatatattttcataaaatatttattttttgatgaactgttgaatggatatgatttgggaagaaaaatctggtgatggaagtgtattatatatatagattacaagtatataattgaccacattaattttgcacgagcaacttaattatatattatttgcttgcataaagttaacttaatgagattgacatattcaaataaattgactgcactattagaagtcaatttactaaattgggaatctttattaatcaaaggtagctagctaggaatcaaatacagaaaaatactcaacaatatatatcaactatcgatctttttgtctcatttttccacatgttggatgttgggagggatgactccaaaattttcataatatttatattgacacctcaccatactatatttaattaggtttcatataatatagtcgtatcagtatatatatttgtattattgtattatatacaaacataaatttgtgtggtacatatacacatcgatacgtacacgccaatttcatgtgaacccccacaccaaaatttctttgttctcattttttaaaactcatatttgagttactttcaatttttgacgttccaaggaaatttaatttacttattagattacactgcagttttaagttttattttatgctaataattaattgctgtataattctgaatacataaataatcagaaatgtttaaaagttgtgaatgctagccaattattgttttttctttattattattatatatataggatacttttacgcgcctttaaaaagtgtctatcgatacatttttttatttgtttagcatctgagagtatattttagtccaattttttcgtactcgtctatgttgtgattaatacttttagccacaaaccttttaatcacaatacaacaatgatgatttataattagtcacnnnntttttacttttagtcacaagtttattgttactaaaatttttgtagtgaaaatataatatgctgaaaaataaaaattatgaaccctattttcggcgtgttaaatttaatagaccctatttgcaagatgttctaaatgacgtagacagggttgaccctgagttgaaatagactataggtaaaataaatttgggcctttactataaagataaatagtatttttaaaaattattaaga

SEQ ID NO: 125104 - DNA, 1635 bp, Cannabis sativa
taagattataagattaattaatttgtgatttcttcctatacacataataataatctcacctaataactaataatatttttttctttaatttttaattgtatcactgtcaaataacatacaaaaaaactagtataaaatttagtatacgtgcttcgcatgtaactttttactagtatatatatatgagcaagagcaatgtaaaaatatgtaatgatcaaataaaaaaatatcttctaaaaattaaagttcttttaaatgatacttatgaaatcactgtacaattataattgtgtgcaatttaaagtacttatgaaaattcatgtgtttattaaatcagataattaataaataatcatataataaaaataattaaatgatctcatttatactttttaattctttttcatggtacaccacgataattaaatgtaattttaaaatattactatttttagattattgatgttatttttttttatgtaattgctaacttatttgcgaaacaaaaaataaaatgtgacggtcgattttgtgtcgtgttttgtagaacacggaatggttttgtaatattgtagcagtgggccccacatactttagtgaatattatcaatattttaatatgtgtgaaaccagttagtagaggtaattgtaactggttatttaataattttttatattttattttattcaattctgataatgctaacataataatatcaagtacaaatcgcttaaaagttgatatgtactctgacagacgtacaataggttgtggtcccggttcgtattttaagagagtagaagtgtattgtcacacattgcttttggcgggtgttgtgtaataaaattagattacattttttttttttgagggaaagggagcccactagagagaaagaaagacttgaagattacaagggtcatcgccaatccaaattgcagcatcatctaacccggaagtccaatgagcaagtttgtcagcaaaagtatttgcagaccgaggtacatgagaaacttgggcagcagggagaagagataaagcgtccttaatttgcttcagaatgtctccaaaagcggagatgttttcacgggaagagcttagcgcatctgtaattgccttgcagtccgtctcgatctcatgcacatggaaatgctcctcgatgcaccactgtaacatccgaagaagggattttgcttcaagcgaagccacagtcccgccgcctaaataaggagaggccaaagcagctacaacaaggccttcactatttctgatcacaccgtcgaaacctgctttagagcgttccttatctattgatgcatccacattgagtttgagacatccttgcactggaggtgtccacgaagtaggagatgagagtctgctgggtgtggctctgggagattgccctgatgatgggagattgtagtcgtccaggaaatttcacgccagagtcagaatggcatgggctttgtcttgtacctgttccttacgtgctctattcatgttaaaccaaataaaccaagcagtgtagagaaagagttctacttcttctttgggtaaagaaacaaaaaccatatgagcaatatcgtgaaaatcaatctcataagggtatgaaaaaatgtagggatagaaaa

SEQ ID NO: 125105 - DNA, 799 bp, Cannabis sativa
aatcttcttcacattaaacgaacccaggattttttgctatgaatgcccacatattttgtcaaataacacaaactattgttagtccaacaaagcatacgcaatacaaaattacaataagttgtataacaaagccattaccgagatacgggtgggcatgtaccaaacacaatgttggtaaggtagtcagctttcacgctcgtacttgttcatgatttgagaatatcaatcaatgatctgcaataaaatgaaatatgaatgagatacgtacacaacataaaacctatttagtaaactatttgacacttacgattcgctcaacttctcgtcagggtcgcaaaatatatgtaactgtaattatttttataagtagatgatagtcactaatacaaaagcaccatatacttaccctagatctaatgttctactgaaaacaaacttgtaaaacccaaaaagcttacgggcatcgcatccttagtcttgaaaagcccaataaccattctgcctgactcgataaattcctcataagccttctcattaaagtcctcttcaattaaagccacatttcagtttgtgtcttcttcactttcacgagggatttgcctttgttccaaaaagaggcaacttcaagtatatcaaagtcctcatcctcaatgttcttctctccataaaattctttaaaatctacattttttttccataacttcattatcatttgattttgtagcagataacaaaggtgttgatactgattccacaacattctcctcggaatgccccacaacattgagttcgcaaatca

SEQ ID NO: 125106 - DNA, 1176 bp, Cannabis sativa
ttattttctcggacaaaatagagatttaactcaatatgcttagttcgagcatgtagaacatggttttgagtgagcattatagtgctcaagttgtcacaccagataactggtggtcgaggcaagctaagatgcaattaagagaacagggattgcacccaagagatttcagcaaccacatttgctagactcctatactcagcttcagtactcgattgtgacactgtatgatgcttcttgctttgccaagtaatcagatttgagcctagaaaaatagcaaaaccagaggtactccttctgtcatcacagtcagtggcccaatcggcatcacagaaggccttgagatcaagagatgcatattgttttaggtgcagtccataatgttgagttgcactaacatatcttaaaattcttttgactgccaaccagtgactttgtagaggcttgtgcatgaactgacacactgtgttcacactaaaggtaatttctggtcttatgatggtcaaatactgtaaggcacaaacaactaatctgtatagttgagcatatcttcaatgggatcactgccataagtagagagtctttggccacttgtcatcggagtcaaattaggtttggcttcttgcattttagccttgtagagaagatcttttatgtatttggttagagtgagaagcatcccttgatcagtgtataagatttctatgccaagaaaatagttcaacacacccaaatccttaagagagaactcttgatttaattttgatataagagagtcaatgacagtttgatcactaccagtgatcaaaatgtcatcaacatataccaatataatgatagttgagtgtgatgtgtgttcaataaacattgagtgatctgtcttagatgagaggaagccaaacttagtcaaacattgttgcaacctttcaaaccatgctcttggtgcttgctttagaccataaagagcgttgtgaagtttgcaaactagatgagaagctgtaggatttctaaatccatgaggttggagcatgtagacctcttcttgtaaatcaccattcaaaaaatacattattcacatcgaattgtctaacacaccaacctctactcagagcaagagttagcacaaatcttactgtgactggtttgaccattagactaaatgtttcagtgaaatcaaac

SEQ ID NO: 125107 - DNA, 2050 bp, Cannabis sativa
agggcataaaacccaacatataaatcaaatacattattgaaaaaagttagtatgtgttcttaattaatataaaatggatataaatttattatacaaggcaacataccatatatttgtggctcatttttctttgctgcaacagtatttcttcagggatttttgccaaagttgtgaatgttgccaatgctctattcttgttgttccaatactatttttgtaccaaacactggaggcattctaataattttgctactaataatttcctgatctctttgattgctgcattaacagattcaactatgttgcttgtcattgttgcacatcatttgttgcacctatataatcttgcccattcgccaatacaaacttcatcaaacaagtatgattttatcctctcatcaatactgtccaaatctttcataaattcttcaagttcagtttctgtgtaagctttggaagcaccattgaatgcattttttttagctcatcttctccttttttgaatttagacttaatgtttttgaacaagtgatagcaacataaaccatgcattaaatttgggaaagtttcttttgctgccttggcaatgctatcatgtctatctgaaataatgcgttgttcatctctttgcccacaggattcttgtagtttctataaggaccattgccatgattcatcatttttagagtcaacaattacaaatgcaagtggaaatatatatctatttgcattatgtacattagcaattagtaacgtccctctatgtgggtttttcaagaaagtatcatctgttacaattattggagtacaatgattccatcctcttattgaagctcctataacaaagaatatgtacttgaatctaccttgttcatctgtcactaaatctgtaacagttcgtgtggtataaatattatacaattagtatatttttatatatagaaccatataaagtgataataaaacttataaattgtaactataagtagtacatatatactattggtatcattaatgacaatacaagatttttatacatgaataatgtttattaactttagttaaacttgcaactactatctagttgggtattttatttgagtaagtaggcttaatactttagggaagcttaattgtattttttagctattataaaagttttaagatgtacataaaagtatcaaatacctgggttttttttgctgcatcatgtacaaaattacaagtatctctctatatgactcttgtggacagcctctaatatactccttacctttctctcgagctctccaagctttttgatgtgaaattgagacactatagtcatcaatcaacaatctcattaggagggtaattttattttggatttatgtatttgtttttatgacattccctactaaattgcttgttgcttaaggatggtctccagaggttatgtctattgagaaagtgtgtgtatatttgatctttcttattctgaacatttccgttttcccatgttttgatgctagcaaactcaatttgcaattgtcatccaaacatactagtttgtaaacatttaacgatgatcttttaaatttgaaaggttgatttttttgatggagtaaaggctgatggcaatctttagaacctatttgattctgaaaacctgtcaaacttcaatttgttgtacttgaggatgtgaaattacttgtgtcgctaagtctgtgtgctctgattgttcagttgcatccactattagatgtgcaattccttctatgtaactagctatgcttgtgttctttttagagagttctatgtttgattcaaagtaattactataaatatagttgttgtctatgtaaggcttagagaatgtatcaaaatttcttattccttgttcaattctggatatgtagctatctctttgaagttcaccattaaagggtaggttgtctcattatcattttttatttaatctgttggactttgtgccctaaataaaactatatcttaatgtaatcttttctattcaattatcaataaagaaacagatttattttcattactt

SEQ ID NO: 125108 - DNA, 671 bp, Cannabis sativa
  modified_base (62)..(66): a, c, t, g, unknown or other
  modified_base (134)..(150): a, c, t, g, unknown or other
tagaggtatactttgttaatatgggacttagaaaatgtttaactaattacaatttagaggtnnnnnttatttataactgacccaaattgagacctgatttttttataacgaattagaggttattcttgaatagnnnnnnnnnnnnnnnnngttctactgtatatatatatttttaatttgctcttttgtatattgattatgataaccttttagaaagattaattagtgttattaataacttattattataatcatgataatatattaattaagctcgtcatgatggttaattatatacttttataatatttttatctttaatgacacacaaatttttattcactataatttagtgtataatcttttacttttagtacaactgtaataattcatattacgtttggtttggttgaaagaaatgaaaatataagaatagtaattgaaattatagaaataagaatatggaatgaaacaaaatttaaattttcttttgataaaaaattattaaattttttatcatcttacattggaatgatcattcctttcattttataaaatagaatagtcattctattaaaataataaaatgactgttctattagaatgacattccaatactttaaaatgtaaccaaataaaagaatagaataaatattgtttcatttcctttc

SEQ ID NO: 125109 - DNA, 1814 bp, Cannabis sativa
tagccattgacaagccatgtttaacgtgtacattattacacttattgatgctcatgtaaaagcagtatatatgcaaacttaattatcaacacaagaattttccaaaaaaattatcaacacaagatatgtaatacagtaaaccagctgcaacttaataaaaaaaaatacaaatagacacttatatcagttcactcgattatttcccatttatgcaatggatgtgaagttaaaatttgagcaagttgtttgcctaaacaaaagagatgagctgaaaccaagccttgaagaagccaaatcaaactgaagcaggttgtcctcaatttgatgccctccaatcacaatagcagttggggtgaacggaataccccagtcaacaaaatgaagtggaccaccatcaacgaatccaaggcacaacacattgtcactaacctgaaccattgagttggcaccaaaaatggtccacaatttgttgttgggcaacaccaaatcgatctgaggcacgccaggccccactcgtgtgctgccgaaactggaagagttaaagcatagctcaaaaggcgccacagcgttcactctcgggacattagctaccgctttgccaaaagcactaattacagctttgtatatggaagtttccaacgacgtatagggctgaacagtactaatcttagttccaccagtgccgtctttagcaatagagagcaacgaagtgtttaacttaacgtcctggccgttgattttgatccccttaacgccgatgaaatagtctgctgatggttcaccttcgaaagaagctcccgcagtgctgacagggtttaggatgagcggtgtgtagataagattttgagacacatccttattaggaagcatgatataaggtccgtccccgaaaaatacgaccccattggagcttaaacacagagcgaattttcttttaaagctgaaagccgcagcgaactgggaaggaagagcgatcttcttccttccaagaccagcgattccggtgacactggaagcgaggccttctaagaggaatgtagagccacaagtgaaaataacgttaggaattgaaacaactttactgggattggagccgtttgtggattggattgagataaagtcttgtgctaattcgccacttgtgcttgtacggatgaaagggttgtaagggaagagaccacaagtgttgttgttgcagcctggttttggtccgtcaaagcactcgccgcaggactttgatcctgcgaggtggcactgagccgaacggcatcgtgccggcttgtaagttgaagagacatagcccttttcgcagtcaacccaaagaaacccgccgccgagatctatggtgagtttcactgggactagaggagtcctttggtttatttgggtaaggtattgtttggtggaagaatctttggttactgggagaagtaaagccttggggcgaaacgatggtgtttcagctactgcggtggttatgagaagagtgcagaagagaactaagtgagtaaacgaagccattgttgaaatgataacgtgatcgagttgatgatagaatgctgagaggaagcataggtttttatagcaggttagatatttattatttatttataatataatatatatttgttgacttttatgatgtgtgacggttgtgtgatttgtgttaataactttaattaaatgagagaaagaatataaattgtgcacttcataaacgtatatggaaatttgattttatatacttaaaaaattaaaaatatttattattaaaccaaaacttttcaaaataaaaaaactatgacatttttatt

SEQ ID NO: 125110 - DNA, 1304 bp, Cannabis sativa
tctattctctaaacaattcataatattagaagaacagcaaatggtaaaggggtatcagatatgctacgatactaattaaatacaggtgcttcatatataattaatactcaattaattaaattatattatttttgtcccgacttaataaaagaatataaattaataattaattagttaataattttaattaaattattaattcatagaagttttactataaatattatgaaatttatatgtaattatatacaacattatatatctttttgtgtgtgtctgttttcatactatatacacattaatttttcatctttaattttaaaaaaaatcacaaacatatcagtactcttatacataaaataaagtgagatttcccgtcctcattcatgtatataaattacattattatatttggtcactaataaattaataaataatataattgaattaattaagaaggagaattaatatagataatagaaaaggccataataattaaggaggttggtccatgtatatgattgtagatgtactatactgatgaagttatgaatgatagttatttctctctttattagatctcctcatcatcatcatgattcaaattcattatattttgcactctttcgtgtacatgccgacactccctgcgaacacatgtcagtacccaaaaaaaacataactctctctttgcccccctttccttaacaaaccttaattattatgcatattcaaataattaagatttaacacataaatctctcacaacaaaaaatttgatattaaatttgcacaactattaatggtaataataactatatcctatataccaattttcttttggatattctgttttcctttttaatgtagagagattttcctaatcaagcaaggctgtcaataattttaactaaattaaattaaaataccaaatattattattagaagcttggtgagtaattcatataataatgttgagttatgctactcagtccactaatggggagtactcttttgcatgcgtaaaaaagaaggaatataattctaattgtattgtattaattaggtcgtcgatcaaaagatgaagagtatggagtgattaataaagacgaacactttattatacctcttttttatttttatgtttttttgaataatatattattaagtcaactcgagtatatggccctaatcattagagagacaattattggttcatattggaagtccgattaataaatagttgattatacttatcttattttatatacatacatatacaattgatcaaacaccaactctat

SEQ ID NO: 125111 - DNA, 4122 bp, Cannabis sativa
cgatgtacatggagtacgcgcatagggagccttcaatggaggatttcagctatttttatgacataaagaatgtgggccttcataacgatttccattgcttcagcaagtgggccacttctaaaatcaatagggtggaaggcatggtttccaatatgggagattggaaatctaagtggttctatgtatttaaagtaccaggaattaggactgactttaatcgtcgacctagtacgtcgcacttttcaatacttagttaatattcatgttaccttatgatatcgattcacatatactttctcattaatcgcatctagaccagctcgacctgctctgaacccagctcgtagagaagtcgctaaagttctcggtagcctccctgttcaagatcgcgactggaaattactatgcacgaccttgaaattgtgggaacacaaactaactccggaaaacgccagccttcatcgggagccagtatacaaggagccatctcagaaacaaaaagagaagatagacaagcgtctttctaaacagacctcccgaccaacatcaggtaacacattgtgcatatatgcgatatatatatgagttattgtttatttttaacttatcatttcttgtcttcgcagaaatgactttcctgaagcaagctcatgtgctcaatcgcaagtcgaaaaatggaacagtgacgacttctcctatcgttcctcagaaaagaaagagtgacgtcgtcgtgactcctgccgctgactcgtccaagaagcaggtgaagccttcgcaggacaaggggaagaaggtcatgattgacccgaccatcaaggcccgggattttgtgactctgcagagtaagtttgtgagcgacgagttcgtgtcgaaggtggaagtgatcccaactgaggaagtgatgtcgctaggggcggagctggccacgcaattcgtgaccgtgttttcaagggcattcgtcccaggttccgaggaagttgatcttctaaagaaacagatcgtccagcttcaggaaaacaacaagaagctgaagcaggacgcgaatgccaaggataatgaacttgagaaccttcaaaagtccaaagagcaggtggaacttgaagccaaactttctcaatcgaaggtcgaggagttgtctcacgatttggaggctgagaaggagaatggaaaaaagtagtacaaccaagtagtctccgactatatatatacgaccctgtccaagataccagattttgacttcgtaatccttggagcagaggcggccgagatggcggaagcatttcgtgctatgtcgcctactcagactcaagggtgcggggggaatctttttcccgaggacgcagaggctgcgcatactgaagagatcgctgatgaggctgctagcaaggtcgcagatgggtccactacttcaactcctcccaccgctccaaacgcttgacttatttaatctttatttctttaactttcaaactttttaagcggtacatgggtactcgcattttgtacttggacaaattttactttactttcttttgtatttcgaacagcacatatcccttcgagcatacttatttatgctattatgtatgctttccgcggtacatgggtactcgcatactttactatcttgatcgcggtttgaaagcttgagaaagctcataaatcttattataagaaattgatagtatataaacaggttaatcaatagtacaaagtgagtgtgttatatataccccttataattagaacatttatgtaaataaattgactacgtataaatacataaagagtacaaatgatacattgcgagtactattgataataaaacttcaagatttcaccattccaagctcttcggatcgcagtaccatcgagttctgcaagccgatatgttgcgtggccaattttttcagcgataaggtatggtccttcccagctgtctccgaaaaccccatgcactgggtatttcatgtttggcatgacttttcgaagaaacaaatcccctactcacagaattctctccttgaccttagaattgaaattcgagcagtacgctgctgataggccgcatttttcaagtgagcctgatcgcgcttttcttctaaaagatcaaggtggagcaattactttttcgtattttgggtaatgttgaaaacatctcttcgcatggagcctaccccgacttcgactggtaccatggcttcgcatccgtaggagagcgagaaaggagtttcgccagtcgtggatcggggggttgtgttatatggccataaaacttgcaaaagttcttctggccatacccccttacgctcttcgagttttcccttgatagtatgcttaattatcttgttgacgacttctgtttgcccattactctatggataagcaactactcaaaatgcctttttaattctcaactcatcgcacaattttcgcatttccttacaatcgaattgctttccattatccgagatgagtttgtcagggatgccaaattggcagatgatggaattatatacaaactcgcgtaatttggccgctgtaatagttgcaagtgcttttgcctcagcccatttggtgaagtagtcgactacaactatggtatatttgactccgccttttccgttgggtaattccccaattaggtcgatgccccaaaccgcaaagggccaaggactcgtgatggagtgcaagtggcttggaggttggttgacatacgtggctatccgttgacacttgttgcattttttagcaaagtttaaagcgtcttgtcgcagcgtcggctagtaatacccttgccgcatgatttttaaagtaagaattacccccggtatggttgccacagataccaccatgcacctcccggaggatataatcacactcgtctccgtcaatgcatttgagtaacggttggctgaagcttttgcgataaagtcttccatcatacatgacatatcgagtagctcgatactgcagttttcttgcttctattttatcttcaggtaggatctctttttccaagtagttcattataggagtcatccatgtgacttctctggcagtatctatttccattacttcatctcgactcagcgttgggtgagttaacacatccataggaattacatcgagtaattcaacttctcttgtggaggccaagcgggccaaagcgtttgcatgagagttgtgagcacgcggtactcgagagacaagcaccttcttgaatttctacagtaactcgcatattatggcgaggtacctagcccagcatctgcttctggccaggtattctccgtttacctggcatacaacgatttgggagtcgctgaaagcctgtaagtactcgatcttcatctctagagcgagttttaatcctgagatcaaagcctcctactcggcttcattgttagatacaaaaaatttaaatctaagtgcagcatgtaccttaaaattgctggggcttatgagtattatgccaccgccagagccttcactgttggaggccccatcaacgtataaagtccacccttcgccatttggtacaccaagatcgattttcttctctatgagtgccactttggtgctcgaaaattcaactatgaaatcttccagggcttgcccttggtcttcgcagattagcaccgagctaatagcatattcggacactgcaaggtaaatggacaaaacttctctgggcattggttttgacaggattgggggctgccccaaatgtgttttaagtgcttgaaaagcttcttcgcacttctcggtccattgaaacttcttattgccttttaaaatttgaaagaattctttgcatttattagaggaacgtgatataaaacgatttaaggcgatgaccttacccgtaagactttgaacttcttttggcttagtcagagatcacatttctactaatgctctaatcttcgcagggtttgcctcaattcctcactgattcaccataaactcgaggaatttccctgcgccgactccaaagacgcacttaagaggattgagccacattttatatcgtcgtagtatctcgaacatcgcttgtaaatggttgacatggtcttttgcatgttgagattttacgagcatatcgtcaacatacacttc

SEQ ID NO: 125112 - DNA, 4290 bp, Cannabis sativa
  modified_base (2673)..(2677): a, c, t, g, unknown or other
gttaattagaataatctgtcattcacaacaagaactggaatagtaattaggcattaacaattgggtaaacctatcaacaggattctcttccctatcttctcgtttctgattaatttttgttgtctctttcagcttcttgaatttttatttgattattgaacttgaaaaaatattgatttgccaaatagaaacatagatttaatctagtggtactcaatccaattccctgcggttcgacctcacctgtgtgagcttactacttgataacgtatacttgcgtattatttataaaattcataataggtgttctgctatcaggagctgcatacaaaacttgaaagccttgctgaattggaaatcttctcatatctctctctccaatttaatcaaatggattgggagagcaaaggagagcaagtttaggaaaatgttaagggttgctgctattgccaaccttgtttacaacgtatggaggatgagaaacaagtgcctatgaaacaaagaaaagccagatcctgtcaagatgtttaaggagctcaaattgggggtaacacaaaggattgagctattttggccaaagaaaaatttagagaaagacaatggttttttagtttgtgaataatgtaaatgtatagaaaagaagcaagagttgagattatcatgtatagatgattattttaggcccttgttgggtgctattagtttgtaaacacagtgtttctgagccaatacctattctgactcataaaaaaaaccctgtttcctactatcgcttcaatcacataaggaccctcccagtttgggttgaatactcctgcagatgcgtctctcatattcgcaaatactcaccttagcaccgaatctccaacattgaatagcctctttttgacccttttgttgaagtatattgttactcggcattggcacgctgcatgagtaatttgcgcctcagtacatttttcatcaagcagatcgaaggcaattttaagagttcttggttttcttcttaattataaaactctcggctatgagttcagatgtttacttccgtaggtaacattgcttccgagccaaacgctagcgagaatggagtatgtctcgttgctgtgttctcagtagttctatgagcccacagtacttgaggtagttcgtccacccatctacctttggtagcatctaacttcttcttgatagtatccttgaagattttgttaacaacttccacttgtccatttgcctaaggactggatagcatctaacttcttcttgatagtatccttgaagattttgttaacaacttccacttcttcttgatagcatctaactcagtgaataagtcgccatcaaattgattttcgttatcgaatactatcttcatgggaattccaaacctacagatgatgtttttggcaacaaagtcgagaactttcttgcaggttatggagaggagaggttcaacctctgtccatttagtgaagaaatcaactgccaccactgggtacttggctcctcctcgccctgtgggaggtgccctaatgaggtcaatcccccatatagcaaatgggtaaggcaaggtcatcattcttagttctgtcggtggtacgtgaggtatatgtgagaatctttgacacttattacactttttgacaaattcatgggtgtccttgttaataattggccagtaatatccttgtctaattatcttttttgataaactttgccaacttgcatgatccccataaaagccttcatggatttccttgatgatctcgtttgcttctgcaggaagaacacaccaaaggagaggcatcaaatatcccctcctgtacaacttgccttctactatcgtatagcgaggcactgaataaaagagttttcatgtctcgtttttgtcagttggaagttgtccgttgagtagataggtggttataggagtcatccaagtgggtgagctatctatcatctcgatgtcttccttttcacatatacttggctcatttagcatttccaccggaaccaagtttagttcatccaagccgttctacgaggccagttttgctaaggcatcagcgttagagttttgttctcttgggatttgctcgattttgaaataaccaaacctttccaagttcttccaagctcactctagatacttagccatttttaggcccttagcctagtattccccgagaacctgatttacaatcagttgtgaatcactatgacatatgagattcttgaccttcaatgcttctgctatcctcaaaccagctaccaaggcttcatattcaccctcgttgtttggtgcgtcaagctgaaatcccaaagcataattaaacttaaatccttctggcgacattaatatcacccctgcactcgaccctttctcattggatgcaccatccacaaataacctcaacgtgtccgcatctcgctgaacaagcggaattttgtctagagttataacttctattaagaaatctgctaaagcttggcccttgatggatgttcgaggatgataagttatgtcaaactaccccagtttaattgaccattttatcaatcttccagaagcatctggttttgataaaacttgcctcaagggttgatcaactaacactttaattgggtgtgcttggaagtaaggtcgtaacttgcgagatgcatggattnnnnntaaggcaagtttttcaagaggggcttacctcgattctacccccagtaaccttttattgacataatacataggttgctagtgctttccctcttctcgcactattgctgcattaatcctgtcttctcagacagctaaatagagaagtaatgtctatccagttacaattttgccaaaactggaagtgttgaaaaatgccttttaatgctcttaaaggccgccttgcattgctctatccattcaaattttttgttgccttgcaatacgttgaagaatgtagacacttatcagttgacttcgaaatgaactgttaagttctgccatctttcctgttaaggcctggacttccttaggcttggttggtgatggctattctatcaaagccttgattttctcagggtttacttcaatgcccctcgcgttaactatgaatcctaaaaaatttccggtggagaatctaaaggaacactttttcaggttaagcttcatattgtacttccttaatatttctaagcactccgcgatgtctatagtatgacttccactttttaccaattttaccaacatatcattaacgtaaacctccatgtttcacccaatttgatttgtgaacatttcattcacaagtcgttgatatgttgccccaacattcttcaacccaaatggcatgaccttatagcaataaagtcccatgtttgttacaaagtttgtatgttattgatctggggcatgcatttttatatagttatatctcgagtatgcatccatgaatgacataagctcatgcccagcagttgcatccaccaactagtcaatcattggtagtggaaagcaatcctttgggcatgccttattcggatcagagaaatctatacaagttctccaagttctgtttgattttgggatgagaacaggattggctatccacgagggataaaacacctcgcctataaagtcgttgacctacattttatccacttcctatttgagtgccccttgtctctcggaatctaagggtcttctcttctgtctctttgctaggtagtttggatcgacatttaagtgatggaagataatattagggtcaatccctatcatatctccatggctccaggtgaactgatcctggtttacccttcaaaaacgtattagctgttatttcaattattcatccaggttcttcccaatgtaaacacactttgtgagatttcttgggtccagaataacccttccaactctttaatcgatttcaataaagtggtggtccaagagagaataatcactcattatatatttggtataaatttaagtgtttgactttcaattttagattctacatagaaatttttatttcagtttcctagaatacattggacaatatagtatgattttcacaagttattaatatctattttctgtcaatggatccaaactgtatgttaatttatggaatatgagttttgtattctgtgaccaggatccacttagactattctaagaaatttttattgtaactaaaccttttctcataaataggacataaccacataatttatatatctattgcatttgtatcttgttcatactggttttgacaagatcattctctgcaaaga

SEQ ID NO: 125113 - DNA, 4360 bp, Cannabis sativa
  modified_base (2464)..(2465): a, c, t, g, unknown or other
ataaatgccatatttttataacttctttttttttttttctttttttataaaatctcatatttcatgtaattttcactttatatatttggtattttgtgttttatcttaatacaaatttagtatcatctatttcttatatttcaaaattatatatatttagtatcacgaactcaagtttgattgataatattttacgaatataatcaaactctcttcaattttatgaattttaaattcaaatttaattatttatttacatatacttaagaactgttttgtcaaattgataaaattatattgattaaagggatattgatagcaatactacttgaactatacaaattgtaacaagtaaccctacaaatagattttttttacagtaaaagcctctaaacttacattttgttttggttttactattatgttaagtggcaatatggattgctgatagatgtacttgtgtacacatgacatacttacatataactaagaactgtttggtcagattgataaaattgtattgattaaagggatattggagcaatactacttgagttatacaaactgtaacacgtaaccctacaaatggatatttttgtagtaaaaccctctaaacttacattctgttttaatttttactattatgttaagtgccaacatgaattgctgatagatgtatttgtgtacacatgacatatttttattaatccacatcattttcattatttaaatactataaaaataatttaaaattaaaaattaaaatacaaaaataaattaaggaattacaaaataaaacttaaaactctttttcattctcattgaaaataaacattaaaattataaatgaatataattttctttttctttttctcttattcttttttcttttctcagctcttctcttatattcttctccaaccattcagccttgaccttccagtcccgtcgttcatccccgatcatctagcccgagtcatccccccttttttctgtgagcacaaatgagctttgatttgtatccctcattgtaatatcccaataagtataatagtaaataattaagatttatatttatattattggataatcaggttaaaagtaagattatgatcctactagtatattttagcataaattttaaatctgctataagtgagtaaataagcgtaatttataaattttggagatttatataacatgtgtgaatgtaatatgaactatatgtggaataaaaatattttcaggttcaacgacgtgagagacttgatcgggagccagaaatgacataataggtttaattgatagaattaatagaaatattgtgataagttgaaggtattgaggtaattaggagtatatgaaatttagcttagcaccctaaaagcaaaaacaatttagtggctaaaaaacaataaaataaccattaataaaaagtttttattaatattattatattattattataactgttattattattattattattatattaataatattattattatattactattataatattattttttaattaaaaaataaaacttataagttatacgataagttaatacatatattataaatttataataagtaaactaaacagaatgaaacccttcgcctctttcgatgaaactttctccctatttattcattttcttcgattttcaatccaaaacctagcgatctaagctccggtattagcggaacaacaatccttggagagaggaaagcttaaggtaagatttaatttcgtttaaagttagaaactaatggttttgtatagggttttgtgaattaaaatagttatgaaggttctgacctcgtaggattgttctcgtgtagccatgggactagttccgatattttcttgctgaaattgaggtaattttgggctagcaattgagtttgaaactttttatagcttaagtccgaacattagtgacgttttccaattaagggctcgattttagtttgtattgcataagtatggtaattttgtgccctatgaagtttggagtgatttagacaggtttcggtagtgtttcggtgagtgcgtaaaattgagaatcgaggattttccccctgcccaaccggtcaaccggttcttgtggaggcggttaaccggtttgccatttttgggcagtctagaattcaagaatcgtattttcactgtaactttttacttgggtgtccgttttggactttctatttactgtttcgaagcttgcaatgagatctacgatatggtgtattttttataagttttattttagtgtattttcactacggggttttgtagaaaaccctaggttgtcctttgcaactattaagtagtgttttggaataaacactcattggtttatcattgttatgacatagggctcgggatcatcaatcgttctccaagcaagtcggccaacatacctgaaccggaacttgaggtaagaaaagnntaatgtaccacatggcatgacaggttctgaaattatcgattgtctaattaggcaatgataatgtgatgagactatggacataatatacgggctcacctgattaggtgatgcaatatacctagcgacgtatcggttgtaggtacgggggtcaatgacatatgagtaccgggcgtaggtacaagctccccttattaggtgatgcaatataactggcaacataccttattaaatatgggcgacagtaatatgaacatgcttggttatggcatagataaaaatcgttgttaggtttctaattggcggcataccttattagatacgggtggcagtaatatgaaaatgcctggttatgacatagatcaaaactgttgttaggtttttaactggcggcgtaccttattagatacgaacaacaataatatatgagtaccaagctatggtacaggcttgtctaataggacgatgcgatatattggtgccaggttatggcacgggctcacctgataaggtggtgcagtgatattatatatgatgttgtattatgacacaggcttgcctgattaggtaatgcaaatatatgagcatatctatttctatgcatatggctggttatattacctactattgaatgttatggtttaactattttataataatgaaatgtataattagttatttaatgtatcattctttattacttttcttgctgagtctgtgtgactcacgggtgctctgtgatgctagtaaaggcaaggaaaaggtagagcaactatgagatgacagtcttctccagcaatgtacatattaacctcaccggcctacgtgccgggttgccatgagttgttatgggatgtatctattgtgttatagttttatgttttgaggtgtcattgtatatagttcttttataaaactttttataacagggatcctcggaacacgtttttttatgtcgtcacgatgcccatatgggtagggtattacaacttgatatcagagcagccatcgttttaaaggtcctaaagactggtcgaatatgtacatttgctacgaagacaagtcgactcatggtatagtaagtatttatgttatttgatatttccttacatgcttagataattatagtgtatgatgggaaaaagcaatgtgtgaatagtttatgcatattgatattgatatcgtttgaattcaaaatggttgaaattttttgggttacaagacattagatcatgcagtggcggtctggctgtctaaactgcgagttaggactaccatgcaagagcatcctccaccccctcagaattaggaacaaatgtttgctaccatgcaagagacaattaggtagcaaggggagtagattcgagacctgagagaacaacaagatcgttttgcacctatattggccccttaggtagtgccacagaatatggggatcgtatggaaccaatttatgagcggttcaagaaacaaaacccgcttgtgtttgaaggtggcctagatccactgaatgtagaatagtggatgagtatgattacttctatctttaactttatgtgggtcgaagataatgaccgggtatgatgtgctatttatatgttacgggatgatgccgagatatggtgggagattgtttcccaaggtcataatctgaatactatgacttgggatgcattcagggtaatattttatgagaaatactataatgaatccattcgtgtcgctcaggctaaagagtttgcacgattagttcagggtagcatgactgtgactgaatatgctaccaagtttaacaggttggccaagttttcttctgatgaagtagccaatgaagctgcaagaaaggctaagtttatcagaggccttgaagaatatattgctgttggaaatattttacc

SEQ ID NO: 125114 - DNA, 1399 bp, Cannabis sativa
tataataaaagattgacagattaattaataaagaaacataatattattaagtgtaatcagtacgtaaatatcaaattatgttgatcatgtgaacaaacattatatttcttatagatatatgattctccaataattacttacaaccttttaaaatatctctaatatattggttttctcaatttttttttttttccattatgaacgatgatggtgtatgtatacgtatctagtgagattatataggcattgaaatttttcacgagagccttatgaatatccttttttttctttgggtgcatgcatgtgattacacttaaaattttatatggggccatgtaattctaataatttcacttattcaatattcagttttcatcatggtcattattaaaaattatggataagttcctatagctatagtctttcaacttttttttcttatctttgccaattatttcaagtacgaattaagaagtgaagaaccatacatttttatttcatcaccaaaatatatatattaatcttacatttaatatatattatgaaattaattataaaattagctagtcatatattataaattccaattaatcgtcatctttgttgctaattattaaaatggatatttcaaattaatatcgaccataagttttattattattatattttttttggaaaaggaccataagtataattaattaattaggtaaaatatataacaatattttaggtaaaagtttaaattgaaaaggacatttaatcttttatcggaatcaagtacttaagagcattattagataaaattagggtcccaaggtagtaggaccataatgttgtagcctttgtccctatggggcataaaataataaacaaagctataatagaaaaacgatatattgatgccgacaatttacatacatgaccgaaaaaatgtaaaatatataatatgagcattatttatgtattagtgattatactacgatgtgaggttttacaattaattaatacttatttatattttattataattattaaattaaaatatatattagagttaattttatattaattaattacaatataatgatatgatcagtattgttatgggactaaggcgaggtgaggttttataattatattaacagttttttataatttttattaaattaaaataataataaaacctcatattaaattgtactaataataatattacatctaagtacaaggttggccttaggcataagaagctagacgtgagcctaaagcgcacactttttgggagcctaaactaaattgaaagacctcattttagagtttcatttgttagaaataattggggtcacaattgtatatataaaatgtgtgttgggtcatcaaataaataagtcaaatttat

SEQ ID NO: 125115 - DNA, 644 bp, Cannabis sativa
actaatcttaccttgatttcgaatcgttcaacctgagtggaaattgttgcttgatgatttataggcccctaagccacaacatatataaaactgataagtgatacgctaaatcacttttcgaagacttagacttaaaataaaaaatgtctctatcgatagataatatgacaaccctaaatatcgataacataccaaaaaatgagatttctaagaaaataccacaaaaaatggcaagccattttctaaaaacgacaggccattttttcgggtccttggctactaaaaatggtagactgtttctataacaacggtttgtcattttttactgcaaaaacacaaagaacctcatttctcctagaagtttaccttaaatctcaccaaatgctccaaaatacccatttgagtcataaacaacgtaatccaagtggaaaattcaacatcaaggcactaactcaaaaatcaccattaaagagctaagtttgagcttcaaaagctcaaacctagttcttacttgctacagctcaccaaacaagcataaaatatgtaaaacaaccttataaactcaattccaacaacaacaaaacttaaaagtagcttaaacccaaaactgcatataaaaacctaatttttcttttgaaattcta

SEQ ID NO: 125116 - DNA, 3548 bp, Cannabis sativa
aaacttgacacacaaaaaagttctaaattatacatatagtcatatataaaatatatatataaattaattatttattataaacagtccggttcggtttaatcgttaattattaatttcgaactgcaacccaaccattacgccgtaaacggtccgaattgaccaaaccatcaaaaacggttttcccggttacggtttacaatggttcatattgtagtggtccggatttaaaccgcggtcttttgatttatatgaacagtcctacgagggatccacttcaggtaagttgtggcttaaattcataactctcctgatgacgaaactcggagttgataaattcataattccaattggcgtgtgagacatgacttcatagagcattgaaatagcttcgaaatgcaagttgaatcgtgtcactcagaacaatattgatggagttgtggccgttttactcaaggttgttcagcaccttacgaccatgttgacatccagcgaccaggttgacattttgacgtcaactggattgccgggtgagtgccaaaacgtcccaaacttgtatcttttaattcctaagtggtattttgacatcacttagctagttgtcatgttctggtgaagttgttctccagttctcggagatgttactatttcacagaatcgggagactcaaaactacccaattacgagtaagtcactttgccaaaaaaaataaaaatataaagttgtgaatttgacttgtctgacttcatagctctctattactataaaaaactagacgaacgcttgagacaaaatcaaattcagataagaagaacccaatgcaccaagctacatgtcaacctaggcattgggtggtcattctggagcttttgggatgtcgtttgatacttccaagattcttgaaaatgaggacgaggtcttctaccccattttttttttaccattttggagaatattcttggaatagaattcacatttgagtgaaaaacaagcgcaccaggttgattatcaacttgggcgctgggctcagttttcgtgcccctagaattcttattttccccctaagtttacttgtatctttggttatttctcatgatggaaaaaatgttcagaatactttttaagaaacatgattggaaacagcctaggttgataaattgtcaacctgggcgctgggtctagctttaggctgccagatggttctgtttgattccccgaaacacttgtatcttaatctttgataaaaatagagaatattcctggaagaattcttgaagaaactacttggaatcggcctaggttgataaaatgttaacttggtccctaggccctcttcttggcccctaggttagtctgtttttccccgaaagtacttattttctcatttttgatgaagacgaagaaaatcctcaggatagattttcaatttgatgcttagaagtgccccaggttgacaaaatgtcaacttgtgggttgggtgcctgggtgtaacaccctgatacttaggcgtgctacggtaattttctaattattgtgccacctttgctactcaacgggttttccttgaaaattgtgccagattaaatttttgataaaactctaaactttataatcatatatatacaatccggatcctgtatttaaacttttataattactttcaaaataatttattacaaacatgtcgcacagcaactacaaaatatatagtccaagttttccctagatcgaacacttcagatcgcaatgtctgacatgtacaatcatcccccaagctcggaactcactcctcttgagtctttgccttttctttacctacacacgaaagtaatatctgttagtcaatagactcagtaagaaaagcacataatatacattattttaccgacttgtatataggtgcccatacacctatccccaaggcttatcagataagtaagaacattcattactaaggtacgactactataccacatgcactacgtaccggtattgtacgagtgttggtagggtttgctccgtacctcaagtacccttaagtgttgtaccatatacacttcgtacctatccatactagtattggtaacaccgtattgtactctttaaatatcatacgttgtaccaatatactcagtaccgctaccatactagtgctggtagtgcacgaatcacaaataacatgtatatatcacacatacacatattcatatacaaatatggtctatgctagtcttatcttatttctgaattcaagtatgctagttgacctgaatagaaaataacgtgctggattgatgtcttatgttacatttacgtaaatgggtaaataacactctaaaacctgaaccgtgaacctaaactgcaagtttcactatcgataattaacatgacaatatcctaattatcgaggaaacaacaaactaaggctctaaaaataacacgaattgacaaaacaaatttttttggggatcctgcctatgattcggttaaccagttctataggacttttaaaaccagttaaccggtatgcaccaaataacccaaaaaaatccaaaacttgcccaattcgttcccaaacttcatcaaacattccaaaaaagttatactaacttccaacaacagaattcaagtagtaacaacaacaaacaaatacagaaaccaaatctaccattaatgagtcaagtttgagttcttaaactcaaacttgctcaatctcttctcaaaccaacttaaccagctaaaaacaaccaaattatattcaaaataacttgagagatcatactagagaaaaacctaccctaaacaaccaccgattctcaaaattgcaatatcagaccaattttaaagcttaaacaacatgaaggtgagagctctagggtttaccttgattgaattcttccaaatactggtgagcaacactcagaaatcagcaagaattatttagtgcaaagaagaagaaccctaggtccttggtttgtccttcttggttcgaaaagagagagagaaactgagaattttattttcttgatttttcctaatttaatatttctaaatattcaataaactaaggctaaataactaagtggctagctgtcaaacttaaaactagccacctcactctaatgaaaattcccaaaatactcttacttacacttcaagcaacctataagcttacgggtaaaaagtccaaaaccataactccacctaaatcggcattctaaatacctcaaatgttttatcccgctaagaattaggttctaaacttacccatgtgactctaacgaccatccttcacatttttcatcgtcgcggagcaaaaaagaaatcataaaaatttcataatttatatttagcataaacaatactcttagagtttaataaaatctctagaattgagaaattataactctaatgcccatttctaaaaatggggcccacaacaaataaaaaatcatatgtaattataaaacatcaataattaatgctaattgcctttactaatccataatctaacatgtaatcattacaattatccccctattaaaaggatt

SEQ ID NO: 125117 - DNA, 716 bp, Cannabis sativa
  modified_base (648)..(648): a, c, t, g, unknown or other
  modified_base (675)..(691): a, c, t, g, unknown or other
aagataaagatatatatatatatacacatatataaatactagtgtgaagcctccggcacgtaaaatcccatcaaaacatataggttaatcgtatcttattttcatcaattacgtttaaaaaaagacagtgtgatacaggttcttcttgaagataaagtgtatcatttgtcatgttagtttaaatataaattaaagcataggaataattttgtgaatttatcacttattcaagttttattccaatagaaaataaatatcgcaatcaattttcattaccattacattactattagtattcctcaaaactaaataatggtataattttctacactattatttattaataagaaaaacaaaaaacaagagaaaaaagataagcaaaaatgtgtacataaaaggagagaatgtttttaaaaataataagaacaaagcaaaaagaaaaaaaaaaaaactaaaatggtcaaacaaagttgaaaaaaaaaatacatgacaaaaaaaaataggtaaaaaaatgcataaacgattaaaaaaaaaagaaagaaagaaaaaaaagtatatgtaattgcgattaaaagaaagattgatatttttaaaaaaaaaaaaattgagagtaaaatcgagtgaaatttattatatatatatatatantagtatattgttacgtgcgatgcacgnnnnnnnnnnnnnnnnntaagtattatattatgagttcggaa

SEQ ID NO: 125118 - DNA, 755 bp, Cannabis sativa
agattctcttatcttataaatatcagtaatcgaatttaattatagatatttatttatttaaataattaagtatgatttaattaaaaaattattaactactataaataaaagattgatttgacaaataagtagactttgatatttaatttttaaaattaggagagaaaagaaataaataattttttctctcaattgttcttgctcatgtgttgagaactcaacaagaaaaaacctatacacatgcactagtttgaatccaattgcattacatacgagaagtttcaagaatacgtgatagtttttaaaaggtaaattttaaacttattattttatgttttgatttaatgtacacacatctagaaatttattaagatatagtataataataatcagtacgaaacccttccgcgatatagtacaataataatcagttacaaaattcttctgctgtgtatatgatttagtaccataaaactaacatataagataataaattttagaaaacattattaactaatagaaaggtatgacctttagataaggctaaacatacactccaagtacccaatagtaatactcttacattagattaaatagagtgctagagatcgcacatgctttttaacaatgttcaaagaaaaaaaaaatctctttcaatttatataaaagttaattatgaattttgtctcttaaaactttgacatgtaccaaatcatgtctttgaacttttaaggtcgttaaaaatgcccctgaac

SEQ ID NO: 125119 - DNA, 3029 bp, Cannabis sativa
  modified_base (38)..(67): a, c, t, g, unknown or other
  modified_base (1171)..(1175): a, c, t, g, unknown or other
  modified_base (1498)..(1498): a, c, t, g, unknown or other
cgctcttccgatctttatttctgatctatattaataannnnnnnnnnnnnnnnnnnnnnnnnnnnnntttaggacataaaacccaacagtaatcccttggcctttctagcctaacaaataataaaataaactcgtggactaaggctctttaacgccccaaccactacaaactatgagtgttctctcctaatctgtttcttttgattgtttttctttagttcttatattaaataatttgttttccaaaaatctttataaacaaatttaaatagttagttattctatttcattaaataaatttaattattgaatgtttatatgtaacattatttaattagacaattctaattaaatgtttatgtgttctactgatgattccttaatgaatcattaactatacataattggaatggaattccatgtccatgtatatgttttgtcattcgaaaactttaattaatctcatttaatttcttagtttaataatatagaattaaaattatagtttaattcattttaaacataattgtagaaacattcataagtaactatacatcagtgcacttgatctacactgacatgataatcaagcataaggtttacttacacttagtcgagtggaatgtcttttccaaggcatttataaagtaaactaggatcaaatgtatcggctatacatcagactagattgataattacagtggaaaagatatcataaacttattattatatcttttctaagttaacatcagttagttgatcatagatcatttaatctcaatcctaagatggttaagttctagctcaaatgtattgcacgagttctttaatttgttcgttaccagttaccgtagaactagaccaatacttacatcttgggaactcattaatgcaattgagtgggagtgttaatcatagatatggacatctatagcttcaataactatttagaagtgaaacaataatttccttagagcttggcttagcacgataaatgatagagtgctcattttggtaattatattagttttctgaaatatcatttacaagtataaaatggtttgttcctactcaatataaacaatctatagaagataatgattattgtgattgatttaatggataattcataacatatctatgtttggtatatagagcgttctatgtaatnnnnngtgtaattctgaatctatagtggaatccgaaggaattaataagatagagaatttactcgataaattctataactacttattgggagcttgattatataggtccatggtccccacactagctgagataatattgctttgtagtctcaattaattggttttaaacaatcaattacgattataaataagactatgtattatttatgaattttactaagtaagtacatatttgagaagaaaagagaatttaggggttatttgttaattaagagaccttagatggtctaattaataaatatatttaaatgataattttatttaataantaattataattattaaataataaagttagcatttaatagataaatgatatttttaaagatagaaaagattatttcatttaaggaaacaaaataatgacaaaagtcaaacccatgggcccttaaaggggatttgagctagggatttttatatggtatattatttttttatattttgttacttttatactgtgacatagtattattatttttttactgtacactttttatactgtcttttctaaaacagtataaaacttgcttgtataaatattttgtcgcttatttaattttatgttatattttttatgtatttttttaattaaagagaattagtaaaatttttggatgtgatgttgcttatcatatttttgacagactcttttctttttaatataatcaattttttttaaaaaaaaaaaagagtgacgaataaggcacaataaatgctcatttgaaagtggttgtcacatctgataatttttttaataagaattaaaattttaaaaaagtgataaataaatctcctttaatgttattattctgccattcttcttcttcatctttttttttttgtttctttcatttttgttctagtttcctcttcttcttcatttttttctcttgcttttgttagtaaattaaaaatgggtaagaaatattttcaaaaaaaaattccatagccttacatcttttatagtttcgaaccaaaaggaaatcaattatttactttgaaaaagagaaaatcaaaacgtttcaaactaatcattgaagtttcagactctgattttgaacttgatgaagattttgagatacccaaagtgttgatggtatttatgttgtttttcagttgttttagcatttttttcctttcttgttgtagatgttctgcgtttattttttctcatatctatgtcttctgctcattttaatttatttagtgttgctgtggtggttctgtccgtgggtgtggaagatgggagctataagtttatttcttctttgttctctttggctatttttgtgatttttttattctggttctcctataaatatatttgacgagctcactcacaaaagaattttgaggtgtgtggttcttttatatttttctaagtggttatatctgcttcattgttttacatttatttttatgttgttttagtaattttttactctaattttttaagaatgaacttgcaaatatagctgctaatgcatctggtattaaggttgtacagaagattgttagtttttttaattctttttttattttattttgtttgatttgttttagtgttgttttatagttgttttgccatgattatttatttgacgttgatttcactgcttttgttcaatctcgtcataattaatagttattttccagctgtcctgatgttgctgtggtggttttgtctgtgggtgtggaagatggaggcctcgcatttttttttatgtttattgtataaatgaaaaaaaatggggaggacagtataaatgtaatttctatcgtgtggcagtaaaattgaaa

SEQ ID NO: 125120 - DNA, 2657 bp, Cannabis sativa
  modified_base (46)..(49): a, c, t, g, unknown or other
ttttagagaattcatatttagaatgttaattcaacatacttgttannnnatttagatcctggtaaaatattcccaacagtttgaccttcccttcagctaggacatccctgataaagtgtagtcttacatcaatatgtttggttctttcatgatacatttgatttttgctcaagtgcagagcactttggctgtcacactgtatcatgatagttgtttggtttatccataatccctagtaattcccttaagccaaatagcttctttgacaacttttgtgcaagagatgtactctaccttagtcgttgagagtgccactatagtttggagatttgctttccaacttatagtgcagttttgactctgaaaacccatcctggttgtgatcttctagtgtcaatatcagcatagtcagagtctacaaagccatttacagcaggttcatttccatcagagccatatagtaaaccaacatatgttgtacctttgagatacctctttagccacttgacgaccttctaatattccatgcctgggttccccatatacatgctgactatgttaacaacatggcttaaatcaggtcctgtgcacaccaaaatgtacacgatgctcccaaccagattagtatagggaattctttccatttccttgatttcttgttctatggtgggggactgtttgctagacaatttgaaatactgagcaattggtgtgctaactggcttagagattccaaaattgctcaatactttagaaatatagttagcttgagacagttttaaagtcttaacctcctatctctgaatatttccatgccaatgatttttcttgcagggcctaaatccttcatttcaaattccccactaagcatcttcttaacctgattaatctcctgagtatccttgctagcaattagcatatcatctacatacaaaagtaggtagacagtggccctagttttcgatgattttacatagatacaactgtcataaacactccttttgaagcctgccttaagtataaaattatcaaactgtttgtaccattgtctaggtgattacttgaggccatacacggaccttttacgcaagcacaccatgtcctccattcatttttcaacatagccctcttgttgctcaatcagaatttactcatctagttctccatgtaaaaaggttgtcttgacatccattcgttcaagccctaagtcatagattgctatcatggccaagattaaccttattgaggtatgctttaccacatggaataagatttatgtataatctaccccttctctctgtgtatacccctttgccaccaatctagccttatatttgcctttttcacctcatggaacagagtccttgtacttgtataaccatttgcagccaatcactctttgtcctagactcttcttgattagaatctaggtcttattcttcttgagagaatactttcatcatctgttgcagcactccacttgtgtttatcaactgacctcattgcttcagcataagttttgggttcattgttgcattgctctatgttgagagcatagtgtatgatgtcagcaagaccaaaccatacaaggccacaatatatatctatcctattgatatgatgttatgtataatttatttagttaccttatatgtgatagacactgttatggtggttgattatattgtccaagtgagagaatgttaggattattattgtgaactaatataatcataggcataatttataaccacacaattattaactatgtgcttaatatttatcaataatcataatgagatgatttacactaactgattatattagaggtacatgagagcactcttataactataattgatccattaaattatagtctaacattaattaaaccatataagttctattaactaataaccccttaaagttagaggagtgtgatatatatttaagatatgaggctttaattaatggtaatgagaatgacataatgggattggtccacattggcctctcttcaagattcaccattaaacttttatgcattcatctcattaaaagattagaagtatcaaatggctcatatggattacatgggtctaggatgtatattttattactcattaatgccctaaataaaatattagatcttggttgatatttatgagcattgttgatgataataaattaatgttattgtttctttaatagagatccttaagatagacatattaatacttttattataaagcaatttaattggtgcacgtatgaaatgaaaagaaatatactatgaatattgatatattgaatcaatacccggttaaatgggatgtattggtatacaccttaatttatttttcaattggtcctccttgataaatgggtgaaaaaactgtaaagtgcttcgttttatgaaaaaaaaaaaaaaaaaaaaaaaaactctcaacattaggtaacttcctcctcaaaagtaaaaacaaatggcttttttttttttttttttgatttggaagtaaaaaacaaatggttgttaacttgttcttggttgaaatagtccattgtttttttttttttggctgaaagattgtattttctgtatattgtgaactatagaactaggattcaatcatttgcttcttccattcacataagtg

SEQ ID NO: 125121 - DNA, 921 bp, Cannabis sativa
  modified_base (56)..(76): a, c, t, g, unknown or other
tttaagtgtattaccttttaatataacagaaaatacctagcataaaatttagtatnnnnnnnnnnnnnnnnnnnnnttactagtatatatatatatgtaaataattaatgaacttttcaattatattcttaagtttttttgtttttctaataatagtacaatatattcctaagctgtatgactaaaagatacgatatattattctattattggatatagtttttttttggtcagattctcgttgatcatgtatatgctatcttttctccaatttagtttgcgtttgggagtcttttgtgggggcttcctatgtacttactatttacaaataaaaatataaaattgcatatatagtcaaatttgtcaactttgacatataaattagtgcccatgaggtttgggaatagaagaagttggatttaaaagatctagaaaccattaataaggagcccccactaaaccattattacacatagtaccccattgtttgatggattgtgctatgtaatttaatgataattttctgtgtttgtgtattagtcaactcatgatatttcaaaagttctaatatgggctgctaatgctatatcatgaagtgaacgaaatggctgccacctttgacaagctcttgtatagtattcaattattagctatagagaaacaaattttgttagctttagctctttggaaattggaatgaagctctacaacttttttttttttttttcaaaaacaataaatgtcctcacaataggagaaacatgatggatctaagaacctcccaatatatatgggtctgtttggtacgtatgattggactggatttgattgaaaatgacaaaattggattatgctgaaagtaatcctgtgtttggtttaagaatagactggactattttatttattttcttttagaaaaga

SEQ ID NO: 125122 - DNA, 1158 bp, Cannabis sativa
gaaaaaatttccgtgtgacagtatttttgtaaaagttaaccaaaaatccagtatttttgtaagtttcccttaatttaatatgcactatcattcctaactgtatttgtaaagtaatgctaactgtatcagcagtgtctaatattttttataggtgacgccctacgattagttaatgatatccttaaaagttattttcttaagctatatggaatccgatacttaattatactaataatactgaagagggtgttatgcactagtaatgccttttagcaattctcacttctaaagtgttatttcatgatggtgttagacactactagtgtctagatgctgaaaggtatcagtagtgcctaacatcttgtgtggtatcatatcgttattggtgcgattaattatcagtatgtgcttttaataatataatgttttcataattaatacaatttcctttttttttttcctttattctattttggggaaaaataaaatacaatttcaatagaaaaaaaaaacaagttcttttaaaaaaaagtgaaaaatatatgaggatgaaattttgaaatgtattgacaagcatctttaatgaaaaaacgaaaacaacaaaagatattatgacatgattataatagagaattaattaatattaaattttatatattttaatttaataattataatagttaatctccacaccattggacatattgtgcttaataagtaaactaatacatatatacatactttttccattatttttttaaaagagaaatttgaatttccatacttaaaataccttataatttttcctctaaatgcatagttattaaatttggtcatatatgatcactttactaatttcctaaaattacccctcacatttcaaatcccatctcagcctctctcttcctctctcaacttacctacactcacggcaaccaacccactaaatccccaacccgcagcagacgtcatcgctcaacccacggccgtccacggtgaacccaggaccgtcgacgctcaaccccgaccgtcaacgctcaaccggcgaccactccaaagagacccgaagcgaaaatgggattcggatccgtccgtgaatggagaagaggcgtttcggatctggggaagaagatggtgaaggtccgatggtccgactta

SEQ ID NO: 125123 - DNA, 733 bp, Cannabis sativa
tattatttttgttgtaaaagtcatctgcaattacaaggaaaatcaattatcaatgttagttttgaaggccaaatggattaccgacaatccaagcaaggaatggtttaaatctgtggaccaagatctcaagtccaagttaaggtctttatgagaaaaaaaaaatccaagtcaaggtcaatggtgaccaaaacgcgtaaattatgcataactgcaataatgaatgagttaataatgctcattttcattctacaattttaggtaaaaaactatacacttaaatacaaaactgtgttaggtaaaagactatacttatatacaaaactgtgttaggttaaagaatattcggctgctcacaatttagctcaaatgtttttttaggttagttaacacttggtattggattggaagtgacccgttcacttgctcgctggaacctagctaacgggtcactctccccttaaaaaatacaaattgtgtcggcctaacttttaattttcgacttgaatatctccattctttaagaagtgcaaataattttgtatccaatttagcttaaaaaaataaataaaaattttgtatctaatttagcttaaaaaataactaataaatgttttatacttggtttttctaaagttattttttagtttgatttgtcttgatatcaaaatttaataatcatgttttgttggattcctctttagggttgattttaataattttggttcttacaaac

SEQ ID NO: 125124 - DNA, 769 bp, Cannabis sativa
gggagagagatggaaaaatgttgtttgctgatgaaataagatgttctatgggtaaaatggtttaattgtgtctacttaaatggtcgagatgtatgtcctcatgaagctaaagctgatgtgagttggtattggaggaaattgttgaaacttattttaccaagatcttaatttgctagcatgtattttgattatttaaataataatctaacatcctaaaatatgcaatacataaaatgatcaaataacacacaatagtttaggatttcttacactaatggcagtagaatataatatctcattctgttcagtaatctaattcttattcctttttgttatagagtaataacaactactgaacctgaatctttttcctcaatatctcattactataagacttgaaaatatgagagagggggggagagggagagagagagttcaaaattctaaacaaaataaagagagttttttcttaattcgattttctatatttttttttttttttggaaactaaaactcttgtttgaattaaagccataacattccttttataaggtcactctaggtttaaggttagaatataatataatgggttttctagaaaaagataatggctctaaagtcacaccacatggtcgaaatccctacaagcccaatcagtttaatttttgccatatttattttatttaatgaaatttttctatctttttcttaaaatattatttttctattctaattatttaaatgctaattttttttgacaaagtgatta

SEQ ID NO: 125125 - DNA, 962 bp, Cannabis sativa
gatgctgtgctcctcaatcttgtcttttcagctaaggactactacagtgggttagttcatgtctcattcagggaataaactagtctttgcaagaagtaattcttatttcaattttttaaggaaatgatacatagttattgtctgaataaacagtcctttatttctagttataaggaacaaaaaggacaatgtttttagagatttcattctgtttatttgttttatatttcaacaagtgtgtgggaaggataaactcatattgggttagaaattaattaaaaagaatagtcattgttggtagaaactcttttgaaagagcaagattatataaagttatgttctttcttatataaaaaaaaatatacatgcttatagttgtttaatcttcactcttgcagatatgcaatgtatatctacacaggaaaggtcattttccaggtttgtttctcctcagcattttcataattgatctttcaactgaagtgtctcttgttctataatatttgacatattctcgaacttactcgatgaccttactaccggttaaaacctgtccagaactcaatgttaaaaattaagaccataacacaaatctaactagtaactttctactaccattatcatgtaggttttatttggagttcttctgatcatatatcttcccaatttagatcctcatcctggctttacagtaattcaacccgagtctcttgacaacaatgaatatgaagaactacatgatgaaggagagcaagtttgtccagaaaggcgtgttaatgtcatctctagtgagtagaattggaatgaacaagaattggagtatatgtttagattcatttgatttttttttgttactaacattatggaacactttcagatgtatattttggatggttgaatccacttataaagaaaggctacaaaaaacccctcactgaaaaggatgtttggcacttagacac

SEQ ID NO: 125126 - DNA, 891 bp, Cannabis sativa
gcaagaccatgacaaagctgctgcaatggctcaggaagttggagaaatgcatgcaaatcgattctcaccaggagcgtcatttgagagagggtactccgacactaatttttgccatgaatagtgaattaaaaaacttaagatgcctctttttgatgaggagaatcccgatggatggattatgcaaactgaactaaacttctcgtgttatagctacgatgaatacgaaaaagttgaagcagccttcatttcctttttcggagacgcatttctgtggtatcaatataaaagtaagaaacgaaccatcttgagttgggaagaaatgaagcgtttggtgctgaaacattttcgtgatacatagaaagagtctctttatgatctgtttctgtctataaaacaagatggtatagttgctgatttttttttaaaaaaacttcatcggattattagttccacttgacaaaatatcaccgaagttcagctaggtacattcttgaatggattagcacttcgactagggctgattttcagcgaccgaaaaatgtggatgaagcaatgtaaatcgcccaagacatagaagaaatgctgttgacaacctacatcaaatttcaattaaatcatgatgcactttacaaggaccacacaagggaacacaccaaataaacccacctacaccaaaccaataggcgaggtcaaaacattgactgaaaactagatccaacataagaggaagtgaagcaaatgagagaaaatgatttgtattttctgatgatcaattttagtatatagaaatggtataatataatacaatgtgaacacctagaacactagagtaaatgaaataacattaaatgtaaatttacacttaatttacagctagcttgatttcctaca

SEQ ID NO: 125127 - DNA, 1512 bp, Cannabis sativa
gaataatatttttaacatgggaaattaaataaaattgataaaatattacaaaaattaactaaaattaatctaaaaatactaaaactaatatttatgaaatattaagtaaaactaattaaaaagtcactaaaataaactaaaaatgcttgagaacaaaactagtttaatgtacaaaaagagctaaataactatattttcatagagttatcaattagcaaacaaataatcagatattaaatgaaatatgaactgagtaaatattgagatttttaaaattacaatctttaaaataaaagaaataaactatagtaagaacaatatctcttcttaagaattcttctttgttgttcgttgatgtagctttaggaatctcacataattctccataatccattaatccaccaccatgtaattagaagcaatttttctaattattaattaattttaataaattgatttaaacctctaatcttgtatttattaattgtgattaaattaataaatagttgaaatttatttaattatttaataaaaatatttctaaaatattaattatttattaatttctaaaattaattactatatgtaatatataacatatatatagttaggtttttaaaataattttaatttactaactataagataagattaatgtgcattagtttaaaataatattttattacaaatttgaaaaaagatttatgttaagataaaataaaaggataatgcacaacccaaaatatctcatattttatttttcaaaattaataatttaattattaaataaataaaatataatgtatatatacatgtatagatatatatactcatatttcaagtaacaatatggtgttcacacgtgcaaagaagctcgaatatgaaccggcccgaattataaaacaataatgtattcaaataactcgcctcagaaagtgcagttagtagaaatattcgaacttacttttttaaagataatggcgagctatgtataataactattgattgatgtgaccagtgagttgagcgataaataaagaaggtccatctcgggataaacagaaaagacaacagaatgataatgtttggaaagggtagataatgaattattcagatagctcacaactcattagctcacatactgataagtatgttgaaagactaaagacaacattctcaacatggttcatctcgcaatttccatactatgataaacgtctcgcatatgcttcactcaatatttatggaagagcgcgagaagtagtacttgaaatatacttaggcactgtcgatcctttttagaatcaagtgtcttgaagaaattggttttattgggagaagaataaggtatagtcagcataactgcctatagataaagttaaaagagcagttacgagtaattatttgttattatcccatgtgatgtaaatgtgaaacatggagattgtccacgttttatgaacgattacaatgataagatcccaagaaaataactgtcatcttaaactccta

SEQ ID NO: 125128 - DNA, 738 bp, Cannabis sativa
cttggttccattgttcttgctacagagcctctttgacagttcgtggaattttagagatgagatatgctttaggcttgtgaatgcctgactttccccttgtttccatagcaggtttgttggtagttacttgttgtgatgctactgattctggtactggtgcagtgacaacagcagtggtacatggtgcaactggttcagtagcaactaatggtgaagtctcaggtatatcagcagttggagggagtggaatcagagcagaactgatgttgttgctgtgtaaagaagtagtctccagagtattagtttcctgttgagtaatagcagcagcagtatccctaatatcagcagcaggtcttgattcctgtataaggaatgaaaagtttgccagagatggcacaacattagtagtaacagcagtaggagcatcaagacaagatgagttgaatgtattagacaaaggaatttgtgcaggtgtggcaaagtcagaatacatgtaagaatcattagccatttggggaatgggagaaaagggaaaatatctttcatcaaagatgacatctcttgagatgtataatcggcctgaggagtttaaacacttatatcctttgtggtttaagttgtaccctaagaaagtgcatggagaggacctaaactcaagtttgtgtttgttatatggtcttatattaggaaagcatttgcaaccaaatgtttttagggtagtgtaatcaggagaaatat

SEQ ID NO: 125129 - DNA, 611 bp, Cannabis sativa
ccagccataggctctgtaggttgattagccatgagattagtggcctggccgaccacctcatccatgggttggtcggcaatagccttatcaagatggctagtgaagaacccttaggctagacagcagactggcctgccacctggtcaacatggtctgctcacatcctactctcatagagctccttcccctgagcgagtgttctcttgcggaaaggagaccctatgtagaagaattcaacattggggttatgaaaataaacctcatataagacctcaaaggacaagtccaaatactcgtccttgatggcttgttgtccatcaaaggcaagttgctttgactggcactcattctcaagctccatctccaaccaagaagattcgacaataaggttggtcacttcttggttcctaataccaagtaaacgttccaggtcattctttagatcctgggtttttctcaggtgagtttatctctagacatgtgcgtccctctctgtttgaagctcattctcctttgtaacgccctgaccctcagggacgccacatgtgtacttttataaacttattattactaatctataaattttggaaaagtgtggtttaatttaaatc

SEQ ID NO: 125130 - DNA, 602 bp, Cannabis sativa
  modified_base (545)..(577): a, c, t, g, unknown or other
actaattgcataattttgtgttaaaagttttaattttccgaaattagtttaaatttccaattcacccctcctcttggaaacatatcttgggctaacaagttcttagttatttattggaagaaaaaacctaataactatagaaaaaagagaagcaagaagaaggaggagttttttttttttttgttcgtgttacttttttgtgtaatcgaagtgaaaagtcatggttgaagaagaagctccaaatttctaaatcttttattacagaggtagagaatactcaacctctcaatgtcctaaaaactcaaccttctaacaaggccaccattgaatatatcactcaaggaggagccaagtctatttgcaacaacggtgttgccgccattgttcatgaaattctcaggctcctccatcaacgacaaaagtaacaaaggtgaaccccatcgtgggtgagggctcttacatcgacgactagggtggcgatctaaataggagaagaaaggctaaggtggaaatttgtgttggaaatattttacgaggatctagannnnnnnnnnnnnnnnnnnnnnnnnnnnnnnnntatgaatatctctaaaacaatgaaa

SEQ ID NO: 125131 - DNA, 1072 bp, Cannabis sativa
  modified_base (1041)..(1046): a, c, t, g, unknown or other
ttgaaatggattttatttagggcaaaaaacccaacaaagacgcgtcaccttgcgattggatagcgatactccctaaaaattattatattagattatataggacacgatacaatattagactaatagcgatattgacacgtaccactggttccttttagcatttctcttattgaagggataggattggtataagaaaaattagaatgggtaatttcttttcccaagcaaaactttaaccccattggagtagaacaagcaaaaaaacacacgacccttcatctctcactctctctccaacttttgtctctttaaacctgtttttcttacttctttataggggaccctttgtcgtggagcctaatagaccaagtagtgggttatcatggaaaacgaagaggaagaggatgacgacaaagaagttgaagaggaagagtacccaccttattttatctgttaagacataaaacccaaaaaccttctaaagaaaatatcgtgaaagttgatattagggaatcagacacgtcgctaggtagcagagcacaaaacgttgacattaacattggcgactttgggttggaatatctgggagttcagtaactcaacctctagaatgtatttggcgactacctccacaactccagctactagtgtttatgcaatgtcagcagcttcaggcgaggcggaagaggcccccaatgcatttacaaggtctaacgaatcaaggccgggtgatgagcccttcatggcccgcgggtatagccatcaaaaaggaaggcacgggttaatgcaagaccatcatcctcaatagtcgctaaataacatcctcggtgatgggcttcatcacctacatccagatccacaccttgtctgtttgaagctgggaaagaggcactatttcggggacacgtcatggtctgcccgagctacggcggggtcgatgagggataatgagcaaggcgttgtggggttgctgatgggggtcaagaggggaagagccctgtacgaaaatgttggtgtggtggtgttgggttttatgccctnnnnnnaactccatttcaatgtaatctatttt

SEQ ID NO: 125132 - DNA, 851 bp, Cannabis sativa
agtcaaactctaatattgcagcacccacaatacctgaataatgtcattaattctccaaactccacaaatataaactacaatatgagaatcatccggatgaagtgcttcaaactccttcttcacttccttaaccactacattatgatcagtagacaaacgctttgcaactacatgagttttctagctgttggaatctttttagccgaggagagctctggagtccccaaggttggccatgtacagaaaactatttaaaatagtccctaaggtcttaaaggttctataatggagttgctccattatcaaactccaaccaaattaaattatatatgtattaatatttttacataattaataaataaaatgtataatgtaataatgttataagctgtaagacaatgaccagagatgaaggtgggattgagaaagaaaaggattaagggagtgggtgagacagagaacctcaaggtatgtttcggtgtgcaaggaagccggtacgtgatcctcttcatccatcaatagcaaaaatagctttgctggagctagcgcaacgaccgcccgctaggactgggttgattgaaagaaagtgagagaggagaggggaggagaatcaaactggaaactagaggtcgcagcgagaagggggtgagatagaacgattgagagagcgagagagagagaaactcaaaagttagggcttgatgagtgagaaaaaaaattaaatatagtatttcaaattaataataacaaaaaattggtaaaataaataccataaaataattaattaaaggctaataaggatttttgccccctgaagttttaaggccattgaaaatgccccctgaactatt

SEQ ID NO: 125133 - DNA, 1366 bp, Cannabis sativa
  modified_base (46)..(52): a, c, t, g, unknown or other
  modified_base (413)..(414): a, c, t, g, unknown or other
tttatagttaaatttgtttagttaataatttaatatttttaaaatnnnnnnntatagttaaatttgtttagtaatgataataccattgagaagtattacatatatatatataattttataaatgcacacaaattgctatctatcaaattaaatgaatgaatatatacatgtaaaatgtattcattcatccttgtaataagttatatccagtgtaaacattactaattaaatctataaacattaaaaagtcgggcagctcttgagattgggtggaccttggagaaaaagaaaaatacttgagcactttattcaaaaactatatgatatttttgaaaattagtaaaaaatatagggtaaatatcattttggattttgtgttttgcaaaatttattaattggactctctgttttgnnaaatgacaaaatggaccttgtattttataaaatagtaaaaataggactctgagctcaatttttgacaattttatttttttaataaaaccaacttgaagataatttataacacaaacagatacagaaaatgtaatcaattttaccaaaatatctctagatcggattataattaaatttttttttgacaaaaaatcagttcgaggtcttatttgtacaattttggaaaatacagggtccattttgtcatttaacaaaacaaagggttcaattaataacttttgcaaaacacatgattcaaaatggtatttacccaaaaatatatgcatattttagaaggaagatattttttgagcctctaggctagaagggctctaggcacatgcttgcataccttagtccaaacccaacagggctggccttgagattgagtaggccttgagaaaaaaatattggatccttcattgaaaattactaaaaaatagggattatttcaaaaatacacaaaaataataaaaaaaataaaaaaaattacggttgtacagaattttaaatatttttacgtattttataattttatttatagaaaatacggtctttagatgtacttttatattgtactcttgttaatttgttattgattttttattgtttagatgttattatcatgatacttttatgaagttttcttattgtttttcgtgctgtttttatagaatacagtaaaaatataaaaacaatctttgaacgttagaaatgaaatttttttacaaaaaattttactttttctagttattccaaaaaaaatatgtatattttaataagagaatatatatatatatatatataaatatatatatatgggatttttttatatatatacgaataaaatgaaagttttacaattataccttataatatttaaatggctatttatgacgttacacgtcagcca

SEQ ID NO: 125134 - DNA, 1503 bp, Cannabis sativa
  modified_base (39)..(43): a, c, t, g, unknown or other
tgataagatgaaccgaaacatacacaaatgaatgaaaannnnntctgtttctttattgatgttgaataaaatggattacattaaaatggagttttatttagggcataaagcccaacagccacttcgtgccgtgccattaccggagcagctccggtcttcttcaactgcaagaatagacgatgtcgacggcgccctcctaacttcgaaacccaaaaaaccagagacgaagggtcatcgatcctctctcatctctggtttgcgtctagacgtttcctccggcctccgtttggcgccttgcggtggttaccaccatgctcagggacctgcaaaaccccattttcaacgagccaaaggaattaattgtaggtgtttctgggtttgcttttttatttcctgtttattttttttaagacattggtttctggttttgttctcatctctaaatagagtttgggtataaatttgtaattttatttgatgtatattttactgtaaatgtgttaaagaatttatattttgatgtgtaaattattgttacaaagattatattgtataaaatagaatggatagtaaactattttggactgagatctgttgaaatttattaccttgtttatggtgtattatactgtataaggaaggttgtttgaactaattataaattttgtgtggttttttttgtttttattttaattttgaaaactaaacaaataaattgtttattaaactaaaaaattatttattatttaaaattatattatttatttgtttattgaaaaaattaatacaaatttctaaaaaaaaaaatcaatacaacttttagtgtttgttaaaaatggacaataatactaattagtctcggttttaaactgacaccaaaggaaataatatatatatactttaagtgtcggttttaaaacgatacttaaacttttttgtctcagtttataatcgacatttaaactctgactttttgtgactgtggaataggtgtcagttttatgaactgacactaaaagtataagtgtcagttataaactgacaccaaaaatgcaatttgtagtagtggtagggatgaatgagcaggcccctacaatatagatgaggatagggttgacaatggatttgactagtttgatgagtttgatggtaccttttacaacaatgatcctatagtagatttgaatgaggatggtgatgcggagttgcaagttgatgaagttatagaggtaccttctttgaggttagaactacctccaccacatccaagggagcagaggaaagagcaagaaagaagaaccactagtagtgaaaatcaccaaacactaggcaccagtaggagccggccaggtcctcctcgtagtactgtagcatctaattttgaagtttgcacaaaattcaaacctattgtgtggacaagggaagacatagaggaaaataatgtttatacaacttctcttactggtacacattcaggggaaatatatgttggcaagctgtata

SEQ ID NO: 125135 - DNA, 751 bp, Cannabis sativa
ttcaaatttacggtttgagttgttctggtttctcctgtaatttctgtttgctatgtggattttagttgcaatctaggttatccgttgctatgctatgtagaatttcgtaaaaatgcaaaaaaactattttgaaatataaataaaaaagccctaaaatttaattatctaattatatataattgaggaaaattttatttttattaattaaatttaagtttaacatatactataatttgaaatataagtattattaaaaatataaaagggaatgactttatataataatttttaatatttttttttgtttttacgatttgagttgttcggtatttattctggtagtttttatgtgagttgctatatgaattcggattgtaatttttttttaaaaaaaaccaatataaattacaatttaaattactctattagttactatgtagatttgtgtaaacaaaaacactactttaaaagtgaaaatggaaaaaaattcaaatatatatactaaatcagtattttattgataaaatcctaataattatctagccaaaaatttatattcactaatgatctatatacacacaaattagagacacttgcacactatgacactttatttaatatgagtcttaggcctcgtttgatatgttgtatattaagtcttattatattgtattgtattatattgaattaaattatatatcatatttttatataatactatgttaaactttaatttatactaaaatattat

SEQ ID NO: 125136 - DNA, 2674 bp, Cannabis sativa
tattgaaatagattttatttaagacacaaaacccaacaattagacagggaaaactaagaccttgtatggtaaatttatgtggcttcactggcgacagtgtcgtgagcttaggcataatcgagcttcccttgactacgggggagacagcgttgtctgcaacacaaatgcaagagtttttggttatcgacatcccctctgtatataacgtgttgatgggtcacccaacattaattggactggggggcagtgagctcgataaagaatttgtccttaagatttcctacgaactttggagtgggaacagttagagaagaccagttattggctcgagagtgttatagattggaacttaaaaatagaagagccagtcatcaactgatggtaattctgactgaagaaattgagaaggaaacaaaatatttggatcctgggatccaagataataacaaccaactcaagccaattgaagagttggaagaggtgtttttagatctgaacaatcccataaagtgtgttcatattgggaaaaatttgggggaagaactaaaataaccactaatcacttttttgaaggcaaaccaagatcagttcgcttggagccactcagacatggttagaataaactcgaatgtgattcgtcatcacctgaatatcgacccaattctctagcaaaatgtcagaagcaacgaccattggatcacgagacaaaatgcgcactcaaaaaagaggtttacaaattgttaactaatgacttcatacgagaagccttctatcccttgtgaatctctaatccaatcctcataccaaaactaaatggcacatgtagaacttgtataaatttcttaaatttgaataagacatgtcctaaagataactttccactaccaaggattgaccaattggtagatgcaataccggtgcatgaatggatgactttcatggatgcgtattctggatataactagattaaaatgcaaatcctagactaggagcatacaagctttgtgacaaatatggggctctactgttacgaagtcatgccatcgaattaaaaaattctagagcaacataccaacgtctcgtaaatggtatgtttgaaaaccagattggacgaaacatggaggtctatattgacaacatgttagtgaagtcactagaaagcgagaaccatacggaggaccttgcagggtgtttttctatacttagaaagtatgatatgaagtttaaccctaaaaaaatgttcttttggggtttcctcggtgaaatttttaagtttcattgtgaatgcaagaggaattgaagctaatgcagagaaaataaaagctttaatcgagatgccttcacctacaaagccaaaagaagttcaggatttaacaggaagaatggcagcactcaataaattcatctcaaagtcaactgataagtgtctcccatttttcaatattttacgaggtaataagatatttgagtggaatgaagagtacgaggaagcatttaaaggaataaagaagcatctttccacacctccatttttggctaaaccagtagctggtgaaacactatacctttatcttgttgtctcagaacatgccatcagtgcaacattagtgcgagaagagggtaaaaaccaacgatcaatttactatgttagtcaaagattactagaggcagaatcgagatacccacctctaaaaaaacttgcactatgcctgattcatgcatctcgcaaattgtggccatatttttaagcgcatcatatcaaggtcttaacgaatcaaccattgtggcaagtactatcaaaacctgatgcttcaggaagattaataaaatgttcaattgaattaggaaaatttgaagaaacttactacccgaggacttcaatcaaatggtaggctttggctgactttttgatagaatgagtaaactcaggagaagactttggaatagaaagtgaggcagaaacatggaaactgtttgttgatgggtcttcaaatgagaatggcttgggaacatgagtaataatgatgtttccaaaaaaaatcaagttccactacgagcttaggtttcaatttgaaacttcaaataatgaggcagagtacgaggccttgttagcaagattaagaatagtcgaggcactaaaagtcaaaagtattacgtgctttagtgactcgcatctaatagtgaattaagtcttaggagaataccaagcgaaaggcttgaaaatggccaaatacttagagaaagtttagaagaacttgaagaagtttgattattttaaaataaaataaattctaagagaacaaaactctaatccagatgccctagcaaaactggcatctcaatttaatctcaataagttaaacttggtaccagtggaggtattagacgagccaagcatatgtgaagaggaagatgtcgacatgatagatacttcaccaacatggatgacactaatcaccaagtatctgttaagtggagaacttcttacagataaaaccgaggcatgccaactcttatattcaattcctcgctacacgatagtcaaagggaaattatacataagaggttattctatgcctttattacgatgtctgtgttgggttttgtgccctaagtaaaacctatttcaatataatcagacttactaattaataaagatcagaaatcacatttt

SEQ ID NO: 125137 - DNA, 1596 bp, Cannabis sativa
  modified_base (1488)..(1494): a, c, t, g, unknown or other
  modified_base (1530)..(1536): a, c, t, g, unknown or other
tatatataattttttttctacatataatttaaagtaaaattaaatatttctttatacatacaatttttttttcttcttttgaatttgttattcgttagtttatttattttaatttgttgttgtggacgtaaaataactatcatttgttttattttgttgctagttatgtgaagaaaaaaaatcataaatattaaataatttaatattaaaaagtaaccaatccaaaataactgatccaatccgcacttctgggaattggatttgacctattgtgcagattgaattggatctaaaaaataaaatctgcacttagtgcggatcggatgaactatgagtaaaatggtacggattggattggatgaacaccctaacaacacctatagttgtcaaaatacacatatcatcttaaaatattatattttttttgagttttttacggctaaaccctctcaactatcatttcatttgcacttaactctcaaaactcaaattttggtagtaaaactctccaaattactgaactgttattaaatttaaggagacatttatttttcaaggttaactgccaacatgaactgcttatgtgtgtactttttagacgtggcacgtgtatattggtacacctaatattattatttaaaaattataaatatatattttaaaatttataatattttttatttttataattttatttaattttgaaataataatagtatgtataccaatataaatgtatcatgtgtacaatagtgtacacataagcagtccattatggcagttaacgggatgatagcttaaatttgttaacagtttagtaatttggaatgttttactgccgaaatttgagcttggagggttaagtacaagtgaaacgatacttaagaaggtttagctgccaaaaactctattttcgttttattttttctctcatccatataaaatttgtcatcttcgcttaataaaatactccaatagttgataattcataaaattgtccaccatattctcacatatcacattgaattaatgattttttaggtaagaaaataatttttttttaataaaaaaataaaagaataaaaaaaaaaatatatcatgtggccataacattaattttaaaaattgtaccacacattacatatgtggcaagactagtctaagtaacaatctcattgaatgctcttaaaatgttattgaaataaatacaaataatttgtttttttagtgttatatataattttttttagtctaatataattaaaatgattctttaatttttactacacagtccaattaattttttgtattacaaaatatcctaaatttctatatttaattttttcgttagttgcatatcttttttctaattttaaggtgaaggacacttctaattattgtaaccaaaatagtattctaattatttaagtttaaaagaaacatactagtttacaattatttacacgggtaaatactattttggacccnnnnnnntgtaaaagttacagattggaccttgtgttttgttannnnnnnaaatgaaccctgtattttctaaaatagtaaaaataggaccttaagcttaatttttgacaa

SEQ ID NO: 125138 - DNA, 860 bp, Cannabis sativa
  modified_base (732)..(732): a, c, t, g, unknown or other
  modified_base (807)..(808): a, c, t, g, unknown or other
gaatagatacaatataagggaagtaggtcattaccaatatttggagccaaatctctataaatctcatcatttattgctttcaattattactaattatcaaatatcactattgtggttttattgactccgcgtcgttgactaaaaacaaagtcaacatatataatttaatatttttttacaaaaacttattattttaattagatttatgctataattatttattattaaataatattttaaattttatttgtttttattatcttttaagaaaaaatagtccaatccattgtaaaacaattacatttcgatataatccaatctttctcagtttaatccaagggaaattatagcaaatgaccccaaattataggactatgttagtatatgtcctcatttcaaaaaaattatagcaaatggccctaaatcataagactatattagtaaatgtcctcatttcaaaacttaacctttttaaactatttattatttatattgtcttttgtcacataaaaaaaatcaataatttttttttttcattttttgttagaattagattcaaattcttaaaagattatggtatatttatattagttttgtttaaatcttttttatttaaaagttatatcgattttttatttaatttttttattagttgttgtggattgttggtatatataaattttgttgtacagtatatttctgttttgttgtatggtatattattattcttanatgatatttattttttattttgatacgtataataatggtatatatttttgttagcataataaaaatattttaatnnatgtatataattttattggcatactacatgtatttaattattatttttatat

SEQ ID NO: 125139 - DNA, 2846 bp, Cannabis sativa
  modified_base (2368)..(2371): a, c, t, g, unknown or other
atttgatccaatggtcaagaataaaatacccatacatgggtaataaccattaagagcatacccatacatatatattcacaagcaaccaagtgtttcttattttcgacaaccgtaaatgattcaaaatttcaaaaaaacaatcgtaatgcctaatacaagtttagtatacattatcgtacaaaaataattaaaacataatttttttaggtgccaaaaaagtttctacaataaaagcaaaaatgacatacttaaataattttttcttcttttttttaataattctaattattttttaataatatatatttataaatattaacatgcagtttaaaagattattaagaggttattttgaggaagctcgatggttgaatgaaggatacatcccaagtttggaggagcatttgaaagtttctttggttacttctggttatttcatgttgatggcttgctctttagttggaatcaaaagtaacaatattgtaaccaaacaagttttcgagtggctctccaaagaccccaagcttgctagggcaaccgctagtgtttctcggtacatggatgacgtggttggtcacaaggtacgtaataacaatatataaattattatttcatatatactactgtgagctgacgcctaattgcaaatagttaatgatataatatattattaaaattaattcatgtgggatcagtagtcctagatattaaaattaaattatataagactcgataattttactaattgcaatataatatcttaaaaggtgctacatcacaggtgccttttagcagttctcataatatatttacctattctagtctgggcagttgtccccctaaaatttaagatcttcttatatatatatatatatatatatatggataaagcttattaggttctattatttatgtttctccttaaaatttacacacttattttgtgagcttttgctttttacttttagcttctcaagaagctctttttttttaagaacttttaagatctaaaagctaaaactcactaagttcttttggagattcagaagcttaaaagtagcttttaaaaaccaaaccaaccaagacctaagtgttctcacacattatccatatgaaactttttaacaattgtatgtaccatattcttgtcctatacgtatataagtatgtacatatacatgtatgtgaaatgttttaagatttattaataaatttttggtacatatgcatacagaatgagcaagagagaattcatataccatctacaatagaatgttacatgaagcaatatggcgtatcagaagaagaagcatgtgatgaaatgaataggagagtaattattgcatggaaagaaataaacgaagagtttctgaaaccaactgaagcagcttcacctatattagttcgtgccctgaatcttgctagggttatagatcttctctacaaaaatggtgataactatacacaagttggaaaagtcactaaagatagcgttgctgtcttgctcattgatccaattccataataaattagtttttcatactttatatatatatataaatacatttatataatatgtactcgcaagcaagactcctaattatataataagcttgttaaataaattaataaataattaaagtacttattaataaagcaaaattacagcataagtttttaaaaacttgagtttgatatagattagtctccaatattcaaaattaccagtaataatagtttccaagatcatgctttttgtttgtctgttagtcattttattaacagatctgttagatactaataaaatgccacatgttaattttttattggttctaatcaaaattttagctaaaaataattttaaataaaaatctaaaaatactattttaaaattatagaaatattagttttttcttttctttttattcttctccgtcttattcataaagcaaaaaatattgacagttagaaaaggaaaatttgaatatctatgcattcattgggccaaaatttgtcccttaattactttcaaataggatcttagcggatctcgaatttcactctgttagtaattaattatagagtaaaccttcaaaataaatagtaagtaacaacaagaagttaagacctgagaataatctaaacctagactgagagagaatgactttgaaagctcagcactaacgatgaacttaaggcacctctgaaactgctcctttcggtaaaactcgaattggaaatcgaacccacaactcaagcaatcattgtcgtagctctgcctgcaaacacaacaacctaaaaaatattatggtatatatatagattagagataggagagagatcgagatatatatatatatagagagannnngagagagagagagagagactgagatagagatagaacttaccgaagctcggtcgttgattgtgtgctcgaccggagggcgaaggtgctgggtcagagatgagagggaggatcagagatgaaagggcggaggtcctgtgagtcccaaatggatggttttgtgttttatttctcactccaaacagtaaaaaaaattaggaacaaagatttcatgccagataaaggtataagtcattctagataattattgaattatttttaaaataaattttatctggaacgactttgataagccgcgcctgatattaccactatcaggaacaaaattttattgttcctgatagtgtcgcgtctgaaatccttatttgttgtagtgtaaacctaagatattcaatattagtagaataggtaattttttcctaaaactccattctaccccctcccatttgaacaattctctctcactctctctctctct

SEQ ID NO: 125140 - DNA, 1249 bp, Cannabis sativa
agcaaaatatacattaacaaacacccaagagcaacaggctactcaaaaccagctaaacaaaagctaattcaccatgatcctcttcaataaaagagcattttgagcacttcttttttcttagttacattcagcaatctaagttggataacatttttaattttatcaactatacacctggtcagctgacattttccttcaaaaacacaagtgtttttgttcacctaactgttgcatcagtatcaaccaagatggcctcaatctagcttgtcttcttcacatctaaccaatgcagccaacttgagaacttagttggccaagctgtgaaacctaacaaattaaagcatccgatagtaaccatttgagaaagagagcaatcacaaaacaaatgctcatgtgactcttggaccagctcacacacaagacaaaataatgaagagatattcaaattgatccgagctaataggtctcgggttaacaaatttgagttcactgactaccatagaataaatctatgcttaggaaggctgagcttgtgccatatattttgatagttcaagactttctcacaagctagtaagttgttataaagtctattggaattgaacttaccatgggtacctacaatcataatgtctccttttcgaaaacccttctcaagttgtaaagttttttccaataccagctcgagtcctactttaattgatcgtcccataaatctgtatctttcaagtagatcacattaacccatttaacccacaacacatcttgcttactagtgatagcccataagtatctagcaagattagccttattccaatcagatttattcctgaacccaatacctctaaaagctttaggaaggcacaccttatcccaactagctagatagaaattagatctatttcctgtggaaccccaaagaaagacccgacaaaagtgctcaacttcctttgagttgaatatttatagaagataaattaattaatttatttaattattaattgaattatttttaaattaataatggataaattttaaatttttttactgctatttgagttcacattatcacttttattgtttattatttgttttaaaaagaaaaaagacaaccacgattgttgctcctggtaagcaacaataattcatctaactaataccaaaaaatgagtgtacaaatgttcactcatcatttatttaaggctaattgggattttgccccctgaactttgacatgtaccaaaacatg

SEQ ID NO: 125141 - DNA, 1284 bp, Cannabis sativa
aaaaataaaacatatttacatgggtaatattttaaacttaagagaaaatactcattttaaaagataacaaagcatgataactctgggattaaaagcttcccgactagctagttgtcttgaaacaaaatgcaatattttccatgtttaaaggctacttggtcgaccatattgtattaaaagagggcccatgggccgaacttaaaaaaaatcaaatagttggagttcctggttctttgtacaggtcgaatgtgtcatcagcgattgggttttcattgccttagttggtcagagcattggtgttgactgcctagaattcttccttatctttttacgcttcacaaaaactaagatatacttctttgttttcatcgaggtaatgaaagttttcttctggttttgccttctaaaattcatataagacatccaaggcgggtgtctcttagctttccacctccttctggagcacctcccactcagtaccaattttttttttgcttagagttgagagtctccttaaaaaccttcttcttctcgatcaaattagaaaaaaaaaaaagtctgaaggccttcgctctcgtcctttagagagttaatatccttagttagagcctcattgtctacttcaagctgaggagtggatgacatattattgatctcctttctcaagtcctcaacaagcttgttggtagccaggagttgtttattaacctcgcctagttgagtacttttttgctcgtcctctttcttagcttcctccacctcctttttcaagttggtgctcggcctcttgctcggcctcttacccttctttctctcacaatgtttctctaagtttctacacaaaccaaccaaaccaaaccccttccaagttttagtgtctaaaactaataattgacatctttcaatgacttgcagttttgagaaagttagataaagaaaaaatgaccttaagagataaatgtccattgacaaagcttatttatagccacatatttatgataataaagagttatcaattcaaaagagaatgtagtgtagtgttcaaggtcttttactatttaatatataatttctttctattttaatttgcagggtatgagcaatccgtactaaaataatgacgagatgaatcttttgcgtgatcagtgaattgaatacgtccaagcacaggctgtgcgacaagggctcttatgatattatcaatttttgtttttgtttatgctttacattataatcagttactttcatataactaatgattaagtttgagtacgtagtttgtat

SEQ ID NO: 125142 - DNA, 561 bp, Cannabis sativa
tagtacattgggttttgataagtttagagtgtgcacttttgaaagtgaattcctatatatgaatcgaaaggctgattgttcaaaaaaaaagtagaaaagcacatatagagatgctgataacttttgggacactagaaagagagggtgtcatatagaggccatgccatattgcagccctgattgatgatattttctaattatttgatcgaagacaggaaatggtggacaagttaaattttgggaagacaaatgggtagggaatgtgctcaaggacttgttccctgccttggctcagatttctttggctaaatattaaagctaaaatagcttgtggttgtggctgctagtctagctccagttttggatggaatcctcattttggaagaaatttgacagataggggaaatgataaatttgatggaacttctacacattctggaacagtccccaatctttaatgttataagggcctgtttggcaggcagggtggctgtataatttgtccaatcctatgtttggacatgctagtggtctggataactaatctaattaattacatct

SEQ ID NO: 125143 - DNA, 1266 bp, Cannabis sativa
  modified_base (67)..(70): a, c, t, g, unknown or other
ttaattaagagactttgtaagatctaattaataaataagttgaatggaaattttatttgataattannnntaattattaaataaatagatttggcattttaaaaggtttgaaattaacatatggcatttgtgaaaggaaaagatgaattataaaataaaataacaaaattgtaactagtagggtccacactaagtggtcgaccacttaagatgattttaagccatttatttatctttttttaatccatataatttaaacctaaccctagaagaaatcctataaatagatagtgataggctcttaacttgaaaacaacataacataagctcctcagtttaatttgtgagataaaagaaagagtcttctctctccctctctctccctctctcttctctctattttgaattcatctccctctctctcttcattaatttcgaagcctatagtgatatagtacatgcccactcaaatatttagggatccctcttagacctatcaaatggagacttgaggattgcgactctatcatgaaaaaaaatgaaacaattaggcttcactcttgggctaataagcacttatcctatgctggccgaattcaattaatccaatccacattgattggattaaggaattattggatgagagtttttcttttaccccaaagtgtgataaaagagattgataagttatgttgaggttttctttggggtttgaaagagaattgcactagaattcattttaaaaattgggagagggtttgtcttcctaaagcttatggtggcctcgggtttaaggatggtacaaaatggaataaggcttctcttgctagattcatttgggacttaatgaataaaaaagacttgttgtgggttaagtggatcaattcggtctatcttaaagggagagatttatggtcttataacttgaagatggactcgagttggtattggggaaagctttgtcggttgcgtactgtctacaatcaagctgatttgattgctgctggtaatggaggagagtctaaagtcgttaaactttacaatgcttcgctacaatatattgtcgatcctgctgatggtgcaatctggtgtagcttaaacattccgaagcatgcttttctgctttggcaaactgctcattcaaggttactcacacgggacatgtgttgtgataaatccaacacgcaagtatacgtatcgttttaacaagtaatactcaggtaagtgagatcgttcccacgaggactgcagttaagtaccaatcaa

SEQ ID NO: 125144 - DNA, 1046 bp, Cannabis sativa
gcattacaatttagccctaataaacagaattggacataatacatacctatccaagcaacaccagccccaaaaagagctcccacagtgtaatccttaatagccttagacttacaattaagcaatgtattcctctcttgcaccgtcatattatacttcaaaaaaattcattaaagaaaaaaacaaatcaatcaatttcacacctttttttcttcgcaaaaaaatcgagtattgagctgaaattgattagggtttctttccgaacagggattgggaaattttgaaagtaccttcttggccctcagaacttggtccagctcgaataacacctcccccattgtcgtttcgagaaattgcagagagagatgtggcagaatcacagacgcgaagaagagtctcaactctcaaactcgggagttgaaactgtcattcctgggccaaatacagtcaatgggcctggtataagtttgggctattgatgggcctcatacaaaaatactagaaaatgaggaaaagtttacaaaaatactgggacagggaaatttttacacttttactgtaccaagtttacaaaaatactgtattaaaatttccaaattataaaaatactgtgtttcagtaaaataaaaaaacaactcaaaaacaaccttagaacaacttaacaaaaaatatgaaaacaactataaaataacaaaaagataactacaagtcaacataaaaaaatgataaaatattaacctaattacaataagcataataatatcaactcctcaatatatttttgtattagattttttgtacttacttttgacaatatgatttattttttgtgctattttcaaaatgttgagatagtgattgagatgggtgtcgatgagacgcatcataaatatgacgctcatgaccctactattttcaaaagccaacctaaaaaagtagtaaaacaattaaaataacaacatccttgtattagaaaatattttgtatagttttatatatttagagacaattagtgtaacctttttcttgttatcaaagttaaattttaa

SEQ ID NO: 125145 - DNA, 1043 bp, Cannabis sativa
aattagttatatcacacaaaaattatcaattcataacatacttaaactgagtattacagttataactttgatttcaatgatcttgatattgttagaaagcttcttaaattatctaaaaaaaatttgtgaaatagtaatatggccaattcggagatttttttagtcaaaatctaattttatttccgcacgtgtgatagttacgaaaattgtaaagtaaattcataagtctaagatgttgttatttaatgataagactgttaggtatatttttatgtattttttagagtctattttattgtttgttttagtatttttattactttattatttagattcatacttggtttttatttttgtttatttttcaagagaagtattatttggagatctccgtatttggtaattttggtttttttaagcctttttgagacatatataaatgagtaatagtaaggaagaaaagaaacttctataagtttggttgtatttctaattgcctcaaatgggtcaaagattgcattttcagctaaaaatttggtggtcaaaagtcaaggatgggcactttccaaaattaaagtgaaaaaatgaagaaaaagggaatctatagagcaaggccacgactttctaagaatttttgcggcattcctttgggtcctagaagaaagtagaaagtagaaaactaaagaaatcagcaaggaaattaattttgggaaactcgtttagaaacctgcaatagtctaagcaagactgcaactttgaaggaaaaggggaatcttgattttgtgcattataagaatagggttgatggcaaactttaagacccattcgaaaatttagaaaattctgagcatagaaggaaggctatgagcagaaggcactattggaggactccaaacagtattttgtctcctctatttctatctttaatgtttgtaattaaatttctaatgttttagaatgacttctagtagctaattttcttttaaggattattatgtgaaccacttaaatttattttatggattaatgtaattgtttaattt

SEQ ID NO: 125146 - DNA, 1744 bp, Cannabis sativa
  modified_base (1687)..(1715): a, c, t, g, unknown or other
aagaaaaaaatgtgcttttcatatgttaaaatgattgcattaaaaaagtagataatgatggtataattttttttagcttaaataattactagtgtgactaaaaaaaactttttatttttttttaaaaaagaaataaaaatagaagagagaaagtttttctaatattaaagaaaatcattaatattttaatatatgtgtttcatatttaacaaataaaaaaagatgaaaaaacaaaggaaagaaaagaacaaggaaacaattagtctatttgtgttgatgtgctgctcattttttcgagtgtatacacgtgtttttttaaaaaataaaatgcaaaggtattgtaattgaaataaaagaaatagtggtaatcatggtattaattttaaaattccgtctcccaccgtaaatttctctttatttaatggttaaattcctcttctttgggccttgtgtgagagttagagggccatagtagtgggtacgatatactaaacccaaccctccctcacacaaacgaccccaattttgaaggattatttaccttatttaaataattgtattaggctaattatattagtttaatctaattaaaatttaattagtaacataattaattttaaaatatataaaaaaaaaattcagtagattattttaaaactaattttagaaaaataatataaaaaacttggaggcgattagctgctgctctctctctctcttccatggtgaagaaaaagcgagttgggcgaaagcctgctgtgcgatcgattgatatggaaccccctttaatccaagattgtgcgagtactgagggttttggagagattgagaatgaaggactggacctaattgcagatctgatccagaacgaaggaagtgccgaaccaattgtgagtctgaatcttgaacagagccctggaggtggaagtggtaaccggtcgtgggcagaggaggttgaacaagcagaccttcgagcaagttcacagcaacaatggcaccaatctacttctggtaagattgcgtatcacactgctaaactttcgttcatggaacctctggttgaggatgggaaaaagattgctaaggtagatatagaggaagtgaaaattcaagcagagaattggagtactgctgttatttgtatggtgcttggtgcaaaccctccgttagctgtctttgagggatttatacggagagtgtggagtaaattggggatagttccggttgttcgaatgaatgcatgattcaccattgttaaattcaatgatgaggctacgagagatcttgttcttgaggaaggaatgattcaatttgatcgtaaaccgatcattataagaccctggtcccttgatattgatgctctgaagcttgtaaagtgagtgccattgtggatccgattatatgatttaggtctacaatattggggaaacaaatgcctttgtgctcttgtgagtactataggtaaacctataatgatagacaaggtaacaaaggagagatcaatggtgaagtttgctagaatcctcgtggaaatggatataacggatgatccacccaaaaccatagagttctttaatgaatatggaaggttagttaagcagaatgtcgaatacgagtggcttccgattaaatgcaagaagtgtggaggttatggacatgggatgatggtgttggaaattattttacnnnnnnnnnnnnnnnnnnnnnnnnnnnnnttattaacatcctaaataagaactttcta

SEQ ID NO: 125147 - DNA, 993 bp, Cannabis sativa
agggcataaaacccaacatttttatcatggatagtgtgaccgattaggcggtctttaatccatgctatcttttttatggccttgacaagtaagggtcaagttttactttgcgaagctaaagtatgcccgcacaacttagaggcatgtttagtagtttatattaagcgttaaaatttctttacttaagttctttgtgctagtttgatgtgttgcacaatatgggtgcctcgcaagtgaccatgcagaaaagtctcttgctcacttgcaattcaccatgttcacaaacattgcttgggttttatcatatgacggtaccatggtatgcatgtggaactaaaagaataactttaagaagttaatctatgagcaagtggttcatagacacaatatacaagtatataaatattgattattcattgattcgtatttgttgctgtgcaacttacataaattgagtctacaagcctacgttacacaaatttagcttctagatgtcaagtggctacccctgctcacctaataaagcagaggctaccattgaagaataggggagaccacgccaataaggtcgcgggtacactaatgcttttcatactctattgtgttgagtaagtagaattgctacttaggagtagacttctataagttggttactgaatgtatttgcaaagtttccctgcattccagtaccttggtaggagaataagctccatgttctcattgtaccttcccagattataggctcccttactagttatctttgtaacttgataagggccttcccaattaggtccaaacataggtgctgctaaatcttaagtgtcaagaacactctttggagcaccaagtctcctatgaagaattttctactcttgatatgtttgttttagtgccttgctaccttctactggtaggcctgcaactttaggttggctagttctcttctttcttctacttcgtcaagggactctaccagcagggtgttgtttgttt

SEQ ID NO: 125148 - DNA, 1513 bp, Cannabis sativa
tatgaaagcaaaataatatatataattatttaaattaacacaaaatattattattattaaaattttacataaaatatttttaattatattaattttttttctgacacatgttcttaaaaaatattctaatgaaacaaaaataaattatatgtaaatattataataaaaaaattaaaataataaattatatgaaattttattagaaaaaaattgaaaaatatatataaaaataaaattaaaataagtatttaaattaacacaaaatattgtgcgaaaaaaaattcttaaaaatattgagagtgatttttaaaaataattttcagcttatttttttaaaaaaaaatattgagtgtgtaatcattttgtgaggtacaaataaaactcttattttttcgggtgtaaatataataccctatgcatgatacattgtcttatgctatgaaagttaaaacatctttttattgagtagattttattttatttttttgttaattaaaaaaataaataaaaggtggaaaaggaagaatccaactcatttttgggattgtttttatgtttgaattacattaatgaagattgttttttatctctttcttttattctaattaatttttatttttaactagcaaaaataccatgaatcaatttgataaagaaggctctttggacttgagttgagaagaggaccacaaagcaatagcaaagccaggcaataaaggcatatctcagaaaaagaataaaatatttctttttttagaaaaatatttaaacaaaaaatttaaatagaattttcaaaattttgtatattcaataaagatgatcattctttctttctcctaattcttgtttctataattttctttacttcaattctccccctttttacacaataattacactcaattatttattatcctagggaagaaaaaaaaaacagagagaaagacaagaagaaaacaacaaagcaattttcccaactactcaaaaattaaatataattaattattgtgtcacacatgtgtaggcttataatttgtattaaatttctaattatataggtttttatgacaagggtagatttttttttttgataaattaagtttttgagttttagttttttaacaactttaagttttcactcttagataatagtagttttgttgacttttattttatattttatcttccttcattaattttaatattaatttcaacattgctttattttatatatttcattttttagtcaaatatttaaaatatattttatatattttttcaaatatgaaaaaacaaaatgatcttgagttaaaaaaaatcttaaaatataattacttaggtaagtaatatatatacttaaaagaaatattttgattatatttatttatttttaatattttttgttaaaatatataattggttattattcaattttttttgtttgacatattctaaaaacatatataaaaaaaaagaaattatctatatattatttttgaacttttttttaaaa

SEQ ID NO: 125149 - DNA, 2156 bp, Cannabis sativa
tgtgcttccacaaactcggtctaccagatccaggacataagtgcggccatgaccgcggtaagtttcaatttgttagtgtttttgggcttctcgtcttttggcacttggcatcacgcacttacacatttttcttgttttgccagattgctgtagagatcggccgtctttcaaagactctgattgaccatgggtacaccatgtccgcttttgggggcatggatgagaccatgaagagtcttccgaatttggaggcacagtagaaagctatcctggaggaggcccaacaaagggagggccttttggagcagagccatcaagaggcactaaaggcaaaggccgaggagctaaaggctaaggatgatgcgttgaaggccagggacgcggcggtggccactgcgaggcgagagctccaggaattgaccgccaagctaaagtctctagaagagttgcaccaagctcatttgcaatcgacatcaaacctaactgttgaagtgaaaggacttagtgaattcaaagagcagactcaaaaggaggtagctaaggcgaagagagatgccctcctggccccagttacttgccaacattgcaagaaacattttgacgatggagtcttcatggcttagcagaccaatggccagaatcttaagctcgacgtctaccccaagcctgaagaggtccttgttcgcttctgggaaaagaagaagaggctcgacgcagtgttggaggagcgcatgggccctcgtgttccaccccgtattgattaaaccagtcgttcaccaccattatcatcattatcttctctttttttgtcacatattcaatccttctcccttcttcaagataatttacattctttttcttaaggggagacacttatggcccgtccccaggcccttatttatctttttaaagcttttcttcgggatccaaacagtttatatctatgtttgaatatatatagcttttaactttattaaatttgatctgtttacatttgtccgtgtgatatgccttactaccccctgagtgacatgaaaatcaattgtttaggtcactcagttttacaaaaataagttagaggttgcatatatttgttcggtacaaattttctttacaaaagataaactttatttttcaactattggtaatactttcggaggtgatcgacattccaagccctaggcaccatggttccgtccattcttttttgcttgtaggtcctagagccaattttgtcctcaatttcgtacggtccttccaaatttagcccaagtacccccactccgggttcctgagtcgctgggaagacccttcttaggactagatcaccaatattgaatttcctatttttcacttttgtgttgaagtgtttagccaccttcttttaataagctgccattcgtatttgagactcatcccggagttcgtcgatttgatccagtgcttcttgtaataaagccttgtttgctgtcggatcgaaagttgtcctcctatgggttgggaacaatgtttccaccgggaccatggcttcacaaccgtatgccattgagaatggcgagtggccacttgtggttcttggggtggtccgctaggcccataacactcttggcaattctttaggccaagtatttttgcaggcaagtagcttcttctttagggtgacctttaggattttattgacggctttggcttgtccatttgtttgtgttcttgccaccgcggagaagcttttgatgactccgtgttggttgcagaagtcggtgaattcttcgcagtcaaacttcttcgtgttgtctgagactatcttatgaggaaagccatatcgacacagtatgtttttgataacaaaatctagtacttttttagcagttatatccttcattggctcggcctctgtccaatttgtgaagtagtctactgctactatggcatactttacccctccctttcctgttggtaatgacacaataagatctatcccccacaccgcgaagggccaggggctagtcatcagggtgatctcattggggagggggggctcttggtatgttcgcgaacctttgacacggatctcatttcaagacatagtctatacaatctttcttcattgttggccagaagtatccttgtctcaatattttctttgagagactcgg

SEQ ID NO: 125150 - DNA, 2436 bp, Cannabis sativa
aaagtacatcacgggacaaaatcatatcgctataattttataatatactttatatgaaagagctgcttttgtttttgtatattttggtttatattagtattacaccttaattaacaattttaaagataataatacgccttaaccatgctaattagggttggaaattgggtgtgggtaataaatccaaccctattcctgttttctattattatctttgtttaattcctatttatactcctattctcgcccatgccctacttaatcctcgatgggctcgagagaagagaattctcgaactcattggatgccattaaaattaaaataatataataataaaaaaacaatgtaatgtaattaaaaatgaaaataaaaaaacaagatattgacttcaaataaataaacattaatctacctattaaaaattacacaataaattaaaaaaaaatcgatagtcaactttgtaatataaccaataactttaatgtgtaataattagaaaactatatatctgtgttgaatatggggtgggtagtatcactcccgatcccaccccaaacctgcttcaagtatataaaattacacaccccactctcgccctattacccattaaggcgagtaattcgtgccccatttggagatcccttcgatcaggtcaaatttctatcactaatgctaactctattttttttttttaattatagtcaatgaccacttgatagcttttgattggtctatgtcattaaatttttattttttatttaaaaattatattatattcactaataaaaaaaacacgtagttaatgacttcacacttaaggattaggtacctagctacggaagtttcagaaatatgatttaggtattattaccataaaaaaattaaaattagatatttatctgcaagcaagagctaaacttaagtatttatgccgtaaattactctaaaatatactaccaaaacactttttttataagttgttctgtatatttttcctatagggatgtcttggtataccccttatttgtttaaatatttagaaaaaaaaatagtcttatttttttttcatgatcacgtacgttgtagctatttagaatcacctttaaattttttagaaaattctaaatagttaaccgtgccagatataaagttcaattggtatgtacttaccagttaccacgggtataaaaaaaacagtgacgcatacaacaaaatatttaaacctgatttttagcattgtaaatcattcaaaattttttaaaaccttacatataattataaataactataacctagtatatcataaaaaaaattaaacaaaaaaactcgactaaaaaatcttctaaatattcaaaatatctaccaaactcatatatatattttttttttaatagaaattcatatgtatttttttttatttttttggaaatgaaattcatatgtatttgaaataatgatagaatacgtatacgatttaatttgcatgtatctttgactagaaagacttatagtaaattgatttttcttttttattacaattattttattgtttgtatgtaagtcactgcaaaaggaacaattggaggctgacgacagccctcacttttccgacgtcatctctcatagtaactctttttttcttttttaccatctgccatacaaatttaccactcttaatttaagtgaaaaaaaaaaatatatgcaaattgtttttattttcttttatcaaaacaaaataccctcatctccattttccattttattacgaaattgccacatcatctatatctatgaaactatatgaattaatactttggctaattagtaatttttctccttaaactttgacatgtatcaaatcgtgcttctttaacttttttagccgttaaaaatttccctcgaactattgagattgttaaatttaaatatcaagtagtatttatatataaactaattgaggtcgacttgatatcaagtactaatatataatagtttacttttttcaaggtgtgttgttttgattattgatttgttgacatattcaagtgattagaattgcccttttatgttgagctttaatttgttgatgacgcctaacaaattctttcaatctcaagatctcttcagtaagtgatagtcttatttagcattgcattaagtggttacacggttaatagcgagtattagaatgctatatggttactaggtagaggtcaattgcttcctctaagggactctctaactagtggaataatctctaacgccaaaggtaaaggtttttgtttagaaagcttgtttagagattcccgttaaaagaaatctggtaaaacatggtgttcctactgctgtggtttttgtctagtgtgtttagagacgaatattagaatattttatttatggaaattattttctaattaaggaaatgattttctattt

SEQ ID NO: 125151 - DNA, 3067 bp, Cannabis sativa
ttttgaaattaccctacctatgagaattatattttagttatattattggttggaaataccaactataaatagtgtcgactgcactacaatattttcatctattgctattgggaaccagtggtgtccagtactctctatatgtggcactttacgattgattagcgatattctctaaagttattttcttaagttatatgaaaccggatacttaattacactaatagcagtagtatactaattaaggagtattaggcaccaatagtacattttaacaattctaatatatatttataattatatatatgcttcaaatgtattagccaaacaaaaaattgtatggcattattaagctcaacttaattatgttgtcagctcaacgatacaatttcataatagtatatttcaaaacaaaaggggtaatgtagggatattttgatatattagtggacatgagaactataccttagggggctaactaaaggagtctctattttgattagatattaacatttgtttaacatgtctttcaataattaaatagagcttatgaaaatatggaatctcgtaccatgttatttgtgtacaaaaatatttattctggtctgattttgtgttacaggtggactttcggcattccaagcagaagtgttagctttgttgatgggattaattgggttgcatgttaatgctattttttctaattttttaatgctggttaaggttttgcataatttcaatgtatttaataataagttaggagtgattttttctaagacattgccgtttgtttaaatttcatagaacatctctttctcatgttagtcgtaacttaaataagcagcttattgaatggctaagtatactttttggttagacgataagttttttcagttagaagaaactccttcttccatttgtaactcgctttaaagacatgtttaatgcaaatatcgtattttttacaaaaaaataaataaataaataaaaataatagcaatgttttcataaagttataagtacaccacattttaataatttttattttatatacaatatatctctttaaattttatattaattagtttttttaatttttttttcatccatctcatattcttaaaaatatacatataaaataaaaaatatatattttaattattaaaacaaaaaaattataagattttttattagaaaactatttatatgatttaaaactatttaagagaaataatttgaaaaagaaaatttaaaataatattagaagtgatttttaaacattaatttatgatttctttttaaataataggatgtccttatatggtgtatatataatattccccaaattaatattgtaaaataatatttaagttattattattaatgtgtagttaatagttatcttgtttgatttggcattatattgcatctaaggaatatattcacttaattatgcatagccggcgaggaactaagaaaacatctcaacttttgtgtttaacatacacagtttaatgtcttaattaatttgacttagactagactacttcaatagatatatcttaatctccatattatgtctctcatgttctttctataaaacccagctcgttttgcttctcaaatcccaactcaaaaacttaaacaatttagatctacatagttagttctctactctctgttaagtacttataaggtaaaaagactaattagtgcactaatgggctgtcgagtgttgctattattggtggcattatttgccatcgtttcttccattgccttggcatctgaccctagttctcttcaggatttctgtgttgcagcctccaactctccaggtatacatatataatttcaacagtttaagttctctacttattttgtagcacattagtatgttttactaaaattttccttatattatcttgtattgtaaacattggcagttctagtgaatgggtttgtatgtaaggatccaaagatggtgggagtccaagacttcttctttagtgggctacaaaaacttggaaacacatcaaacgcacttggttctagagtgactccagttggtgtaacccaaattccaggactcaacacactgggaatatccctagctagaattgactatgctccacggggaatcaacccaccacacacacatccaagggctagtgagattttgactgttattgaaggaagcctagaagtgggctttgtcacatccaaccctgacaaccgtcttattacaaaaattcttcacaagggtgatgtgtttgtgtttccagttgggctcattcattaccagagaaatgttgcttatggcaatacaatagctattgctgctttgagtagccaaaatgcaggagttattaccattgctaatgctgtgtttggatccaagcctgacatcccagttgatattctcgccaaagcttttcaattagacaagactgtggttgggaatcttctatctaagttttaaatagaacatgtacgtcacttttagattatattttaagagtgtttgaaatcagtacttagaaaaatgattgtgtgcatcagtttgaggtttaagagctttgagatgtgtgtgtttttttttacttagtttggcattaccaatatggttgtgtttccttgctaattcattaaattgtttggtttatttcatttgaaagatatggtgaattttaagttgtttctctattaaattgatttttactagtaagttacactaatcataaggttacaaaggtctgcctaggtgggctaagcccatggagaaaattacataaaatacccactttactttatctgatttcatttttaccttcattctcatattctttaaaatatacctacttttaaagataatatcttcattaagccccttaggttaatgcaaattatagtttaaaaaaatataatatgagggtatttttgattaatagaaacaaaaaagaagtatttttcaacttatcccgatacctagggctcccacttatcaagggcccattttttttttttaaaaaaaaaaaggaataattacataaggcaccattttttgtaa

SEQ ID NO: 125152 - DNA, 1053 bp, Cannabis sativa
cattactctgattgaagcgatcatggaggtttgtccacatttcgcgagcagtggttttgaacatgatgcttgcaccaatttcttgagacacggattgaaggatccatgattatggtgtaattgcatcgatcccaagcaaatagagaaggatcattgagtggtggacggggtaaggtgtcgtcaatgaaaggatttttattgagaggtttgctttgattcagtttgtcagacaagagagagagtctagattcatctgtagaatcaaaaatcgttaatattctatttatatggattcattaagtttatggttagagttaaatgggctaattagaaagatctaatagcttagaatcctcctcatggtcgaacccatttaaggcccacgagttagaatttttccattattttgtttccttaatgaaacaaaattatctttcttcaataatgttatttttttgctctagttatttaaatactaattctatctatttaataattatcaaataaaattactatttaaatatatttattaattagacccgttcaccttcaaaagtgatcaaccgataatggggccgtacagatctgatgctttccacgtttttgcacaaataagaatgaaaagcaataaacaacaagatttgttatagagttttgaccccattgtgatagcgggtaatgacctactccctttttagttgtatttatatcgagggaaataccccatccaggtcattatatgtggaatctgctatagcacccttaggattacaaggtatgaatcaaaactggcaaaactcgagtgttaagatgttactaaggtaggcatgtgagagagagggagtgaggaagagagagagtttatcaaacacttagagtatagaagcaggtttctaggttagaggcaacttaggttcctagcctaaggctaaggactttatataggagtcctcaaactcttggtttacaattaaaatcccttaatacttacttaatttgttagatatttacaaaagatcaaagttctcttgattatagatattattcaaccat

SEQ ID NO: 125153 - DNA, 864 bp, Cannabis sativa
ttaccaatagtaaataataattaatgaaaaattaatttttaaaaaaatataaaaatagacataaattaacagattgtctgaaccttatttctggcatgttaagttgttttgaatttattgaaaatttgtaagctgttttaaaaaaattacaatgtacactgtcataaaataattaagattaattaaaactatctaaatatcgaaaatacaaaagaagtgtttggtacacttaattttagagagcgaaacatagaatttccctaaattaattatagtactgttttattattatctatatttaatttctcataattatttgagttgtatgttaatttatttttttcataagttcattttttagttttaattataaatttaatagaatggaaatataatattatttttttttatttaagtaataattatttaccaatagtattattatagtagaaaagtaattacataataaacttattttatgttgttaaaaaaattaaatatgttttatgtattttttataaatagattatttagaaaaaattctttgatatataatatatatgtgatgagagagaaagacactaactttctcaaaatatttaaggaattttttgtaaattaataattggaggactaaagctgttgggacttttattatagttataaaaaaaattctttaatatataatacatatgtgacgagcagaaagacactaattctctcaaaatatttaagggaccattttgtaaattaatggttggaggactaaagcttttgacacttttattatagttatagatatatatatatatactaggcagaatttacgtgtctagccacgtatagttagttttattttaggtt

SEQ ID NO: 125154 - DNA, 1272 bp, Cannabis sativa
atttttgtaaaagttaactcaaatttcagtatttttgtaagtttcccaattaacataatatgttagggttaggctgtttagattttgtgcatttgagatgttattttgaacttacttaaaagttggattatgtaattgaatctctaactacaaaactagtgagttataaagaggttgataaatttattttcgaatatttggacctttattaccttgacctcatgatattgtggttatttttatgtcttaattatatattaggagcttacatggtggtaaagattatcattgaaatggtacggatgaagcttgagggatcagaagaaggtattggtagcctcataaaagatcttgaagaaccattggaatccattgagcttagaatgaacataatctcacaacctaaagatgcaaaggcaaaaggcattgaagccattgaaacattcagacaattcattgaggtaaattaataaataagtagtttataagagattttaaataattagtctcacaaaataaaaaaaacataaatgaccaatattatttgcactttgttctttaggaaggaaaacttgaagggtgggagttggacgcttgtggagattgttgggtgagtgaaggctgccttgtcgactcaaacgatgatccggctgccatcgacgctcatatgtatcggtacgttaaaactaaattaagagtattaattacaatctctattattttatttcaccacgaaaacatatgctatagtattcgttactgttataacattatttttgtgaatttttttaaaaaatccgaataaatttaattgtttaataaactagaatatcgagagttaaaattttaaaaatttacaataataatattataattataacaaacaccagcattaaaaaaaaaagtacttccacatatatttttaaacacaatgatgataaaagcacttctcatcacaattttaaatcttacataataacacctatagtattattataagaaatactaaaggttatttatagtacttaatattcttgtgatgtataatattattattggtacaatttaatattaagtttcatttattttattttaataaatattaaaaataattgttaactaattataaaataatacttgatataatagtgctaagcagcttggtttccatcagttattatagaaatgcaatagtactaataatacatagggatacgattttgtcccgtgatgtactttcacagaatgtattccgtggtacattagatgggt

SEQ ID NO: 125155 - DNA, 1022 bp, Cannabis sativa
tatggttattctttgaatcaacaaatatattatttagatttatgtttatatgcttataataatattgaatatgtttatctatagaattgaatcttgttattgcatattttatgagtgaaagaattctaacaagtgatttcaaaaccacatttaattgattatttgatggtttaagatttatattcaaaatatttgggaatttttttaatctgtaaaattttggggtgtgattctttgatacatatttatttagattttgattataaattcactaaagattattttggttcttcactattgagttcattatatatattttcatacttgtcttttgattgattctttgattttaccattataatatacgtatttgttgtgaatatttgattcaacactatttgataatttttacagaagatttattcactaaagtaattgagtttcgttattaataaagataatcactttctcatttaaatcgtttcctaatagtctcatacccacaaattaaaatcacttggttaataagggattatgaaattccaaaattaacaaatgaaattgaggattggggtatttgttgaagaagcaagaaatgagagaaggtgatgaggagtggttgtaattcttggaaggaatgctattaaaatgggtaatccaaacaaagtagacaacatcctttccaacaacacctattgaaaaacactcagcaacacctgctaaaccaacgtttgttcaacaaacaagagctggcggaactctaacaaaacatgcataattataagatctacacttgtcatattcaaactaaggccccaaatacctcttaccccattgccaattacctatcttacaacaagttatctctaaaattttgagcagtcatccttgcaactcaactaatagaaccaaaatcctatgcttaagtgtaaagaccacttagctttaatttaaaaattaacagataattagggtttaattatgaaaattatttattaattctaaattattaatttatagtg

SEQ ID NO: 125156 - DNA, 803 bp, Cannabis sativa
ctctatgagttataatggtctgttgaggctttataaagaggtctaaattattttccttgtaactttatttatgggacaatagtatgggaatttatccaacactatatgtaaaacattatccaaataaaatatcaataattattaatgagaaatgataacttttttttatcatgaaaaggaaatatcttattaatcacaaataattgttatgcaagcagaaaaacaaatcctaattacaacatcctaataaaatctaaaatagttaagtctcttcagatcaaattcataatagttcttttaatcaaatccaaaatgtgtttatattagaacattaaataatccaatatacaaaattgaatatattatctagaaaacaattattttttgcattatgtcaggtcatattattttattgagaaattctaaagagtattaatggtatttagtacttttttatgtgttaatatttttgttggttcaactatatctataacatttatagaagaattttcatatagaaaacttccaataatatgtacaatttcttctgttttttttttttaacaatttcttctgtttaatctatggattctcgtatcttattaatattggaccgaaccaaatatttgtgattaaacatatctcttataataaatagtatcagattttaaataaatatataaaatatgaatatgcatgtacaatctgatcaattattatatatattattgatctccaacatagttctctcaataattgtcactctcaataattgtcactatatataataaaataattatatt

SEQ ID NO: 125157 - DNA, 735 bp, Cannabis sativa
agacctcctcaaaggctacacaagaaagaacatattagctcactgcttgataaaagttgaccttagtaaagcatatgatacagtttattagctcttcatctcagacttactcgagggtctgtgcttcctagccaaatttattgactggatatcggtgtgtctgtgtggtacatcctacacccttatccttaatggtagatttcatggctttttccaagggagaaaagggctctaaaaggagatccaatacctcctctcctttttgtgctggtcatggaatacctcactcgacttctaagccatttctcaaatacaaaaggatttgactttcaccccttttgtaagtctcttaaacttatcaatctttgttttgctgatgacttggtcatcttttgtaagggaaatctatcctctcttcatattgttcaaaaggctttttctaatttttgtgatgctacaggtctagtagccaacatatctaaaccctccacctattttggtggtatctcagctgatctcgaaaagagtcttttggacattgtaaatatggaagaaggattatttcccttgaattatcttagagataaactgcatcctaataaatggaaatatactgtgttggtataattgaaaaaattcaaaaaagtcttcatggaaggagcagtaggcacctttcctttgctggtagagcttaattaatctattcagttcttttgggcattagaaattattgga

SEQ ID NO: 125158 - DNA, 625 bp, Cannabis sativa
cggcaggagtaagtcttagccttttgaaaaaaatattttctcttggcaaagcttataattattgaaggttgtatgactatctattttatgggaaatataaccatcaagttgagcaaacttcataccaaatttcaatttctgacaactaaaagttgaaccttacgcacagaagttgagccaaccaaatcctaggcggctttgatgtccaaaaggcccaggactaatgtgctgccaagctagcagttttggagaaagagatagactccaagtactggaaactgtacgagtcccacaaggctttagctgagaaagagattgaggagtctatgtgctcacttcaggagaaattaaacaagacctaggggaactttacctttcttaggaagaaaaggataaactcgaggtcggggcattgccaaaatacagctctgtccgcccaaacccaaagcgtcggcaccctctaagaggacatccgcataagggacctacttattgagggcttgcatagtgactttaccgaagaacgaaagtagaaagactcccgggtagtcaactatgatgatctcaacctacgctaccaagcaactgttggaatatattttaccaggacctagatttactaaca

SEQ ID NO: 125159 - DNA, 1293 bp, Cannabis sativa
tactcgatttatcactttattacttgttaacgattgcgtgcacttgcatatgtaattttttcacaacaagtttttcaaaataggagtcaagcttgaaatattattatatagaacatgtttggcttccattataaaaacgatgggtgagataggtcagtttgtacacataattttttatacaaaattatatgaaaaatcggtaagattaaatttaatacaatttattacttaattaatatcattaaataataattataatttaatttatctatataatttaaaaaaattttaatatccgccgcgaagcgcgggttgtttactattatagagaaacattttgtgctttatttataaaaattttaaattatatatatgaatattaattgtaaaataaaattatattaaataattttaaatttatttttatgtatattttttaaaaaatattaatgaaaaaaaatgataaatctatataaagaactctaaagaattgtaaaataaaaattcatcttgtaatatcttatataaaagagaaaacacgcaaaaaaatattttcaaatgtaagttatagtgaaaaaaaaaattaaaaactgaataatcctcacacaaaatagagatctaaaaaaactcattctataatgtcaaaaacaattgtcatcacagtatctcacatgtactcatcattatatttagaattgatgttatcacggtatctcatttgtaatcattattcatatcttttccaataatcttcaaatgtacgttatcctgagagaaaattataaaaaattaattaatttctaattgtttttttgagatgaattgaaatctaattgttaatataaaagtttgttacaatttaggaaagataaattagttatataaaaaaaatgatatagagaaaaaattgagtcctatattattatttaaaaaatcaaaattttactattgattttttttaaaaaaatgttattgagaattttttccatttatatacagatgcaagattttatagaattcaataatagttttttttcctccattttttaagtaaatcgcaaaacttcactttggtttcatggtattgatatactatttctatttttcgaatctctttcaattaggctgtttaagaatcttgcatctaaatcaatttgagactggtcaaacacacgtgcgccaactactttattatacatatcctgcagctggcatggcaaattagtgaatcatgttgggttttgtgccctaaataaaaccgattacaatctaatctgattagttatcaattta

SEQ ID NO: 125160 - DNA, 1118 bp, Cannabis sativa
  modified_base (83)..(92): a, c, t, g, unknown or other
ttttctaactttatatgtgtttatttttattgttttagaattcatattaggttgttattccaacatacttgttagtaaatctnnnnnnnnnnaaaataatttccaacatgatcttctctctccacatatacctcatcttctcttctttgaacatgccattgataagttcaaagctttttaagcttttagaaacttctttattcttatcttaaattttaattttttttttaggtatattgatccttatgatagtttttgaatgtatgatgcgtgacttcctcatggaaaagattcaattttggcttttgttgtgattcttaactctttgagttataaagaacacgaggtacatattcgagttttgaagaaaaaacacacatttggattcaaactaacctttgctggccttggaggtcttgcttgagacctgaccggtcctaggacttaatcatgggagttgactagccctagggtttcatcctataaagataacctgttcatgcttatgtttggtgaccctggccagttggctgagtcatgggaccctatccaaccctttcaaggcttgggaaccctggccggcctgggccttggtttgaagcaggtggccaactttctatcctcttttgacttcgacaagaatcctgtcatggccctataggcatatacaaccttagtctcatacgtggttcccttaaaaactatgtatgaaacttaatggtgagtcttttatagtctaatgctcaacttaagactcaacatttgtccaagttgttacacttgagacttttacttcgctgatactcaggcttgtacaatgacatggtctgggaagtacccatgggtatagttgtttaaagttttgtctatgtcttagaacctacaaggaactctgccttttggcttagaacctgccaggaactctgccttagccttagcccgatatgtggttcctataggaactctgcccggttcttctttagctatacagtccttgtaggatcttggccttatgcatgtgaattgattttttattcatattcagcctcaaggctttcatgttcttacatttggcctataggcactctattttcgaacactactattatttagcctta

SEQ ID NO: 125161 - DNA, 2028 bp, Cannabis sativa
gttttgaaaaaagagtcatatttttcatagtgtaaaatgtattggttcaaaaaaaattttttgaacatttttaagtatagaaaatcaaatttcccttttaaatttataatggagtcaagatgaattaataagttaggaaatttattcgctaaatttcaagatctgcttattaggagcaataaaacctattttgcaaccctggccgttgggccttatttctgtcaactgggatgtgttgtttcttctctgaaagtacttatttccccattttggatgaagacaaagaagatgaaaatattgaattgccgatataagacttggaagtcgcccagattgacaaattgtcaacctgggcgctgggtgcccgggcaccagctactcaaatatgaactttatttaaatctgattccgatgcctcaaatatgtctgtgatatgtctagttcatgttccaatgtaaagtttgacccatttgtactaagacggtatcaaaaattaacatcctagttagggatgtcaacttgggtgctgggtgaaaccctaggtgcccaagttgatttttttggggtgcatgtgttcatgtaatttcagctcctatggctttgatttgattgctccttgtctttaatggtacaaaatattaaaagatagtgagttgaaaacgagttatcaaagtttgaacttctatcctggagttcccaaagtcaacttaggcgtagaagcttagtcaacataactgttttggataaagacaaagaccgttatagtagttactcatttattatatatgttgtaaatatgaaacgtgagaattgtctaaattttataaataattataaagataagatcaaagtgaaacaattgtcaccccaaacacctataaatagtaaatgaattcccaaattcaggaaaaggccaaattgagaacccttagagaagatataaaatattgtattattaattctttgtaaactcatcatatcttgagaataaaatggactcgtgaactatgaaaattaacttcaatacgtaaaaaccttcttgtctattattattattattctgaattatttttatatagtttaagctcatttattaattaacgagaatctacattaataatttattttagtatttttttcatatctttcatatttgattatgtgtttacaatttttttgaatatatgtgattagaatatatattaaacatagcattaattgattattattattgattatgtagtattattttttttttatgttttgtctaacttagtaattatttttaatgggacacatccccaatatatgatcatttgttgcggtaaaattccctcaactattaatttacatgcaaataaccatccaacctcatattttggtagaaaaaccatccaaagtactgttcatgtcactaaaaaattatcctacgtggccatattttacaaaattaaaattaaaatgagtaattaaaataaaaataaaaattttaagagtaatttgtggcaaaaccacccaactatcaatttacttgcgaaaaaccattcaacattaaagttttttggatgattttttataagtaaattgatagtgtgggaaattttgccacaaattactctaaaatatatatacacacatgatatcttttaacgtttatagttgaagtttagtgatgctgaatattttatttttattattattattttgagaaatcaaaatcattgtattgcataaactcaaatttacaacttaactgcaccattacggcctttataatctatacaatttgtagaatctataaaattaattgtgttgtaaatttacgattgctcaaaccattctaagtctttttatttcatattttatgcaaaattaataaaattttaactttcacctcatatcgaatgtagaaaatagtaggggtatacaaaaattttcgtaaaccgtccaacccgaataacccgcccaaaccaaaccgataaaaccgttaaaaaatacaaaccgacataactcgacaaaattccaaac

SEQ ID NO: 125162 - DNA, 794 bp, Cannabis sativa
attacttttagtgaagaaatatcttccatcctttccttgatggaagatactagtgtgtcatctcttgctgttttgatatcaaccacatgctcttctatctatcaaataaaaaataataatcacaagaaaaataatatatataaattcttaattcatatccaataaaaacatatagcttgacaacatgactaccaatgattatgataatgcataaaaaattgaccctttttttcaatcatgaatctatagcaagcaatatagatagtaattttattaaaataataataataaatataaatatgaagaatgagttgatgaagagataatttaccatttttaagtggagtgggtgttcttgaactgagttttaatttgttgactgaaaaagacagaattggtgaagcaataatattataagcttttcaataatgtaataaaataaacataatattgtgaccattataaagccagtttctgtaactaaaacttgaacaagtagtgtagagtatatgggaatctgagataacttgacaagtttgataataaataatgataaaataatcaaaatatatagtaatggagaagaaggtattatagatatgatatatattgagtatcaaatgccataaataatcatctgaaaagaattttcagtaaaactggcagagacagacaaagagtaatgctttattcgaagtaaagttaaatgtgatgacttaaaagtgagttcaagtattaattaattaatttataacaaaaaaatcaggcacccctttttggtttcaacactcttc

SEQ ID NO: 125163 - DNA, 1434 bp, Cannabis sativa
ttctcccctagtggcatttatttatatttgtgtataatatcaagttattaattcttgtcaacaactagagtttcaaaattggtatattccaaattcttaatatgtactactattccttaataattcacaactttttgttcctttttttctatggttcctttctataaattctccactaagagcactcatatatagatgtggtaaaattaatataaatctactttttcaaattcaaattatattaaatgttaaaaaaatgaacttcattagatgaggtaaaatgaatatacttttgaaattttttaaaaatatgtgaagaaagctagcactccattactactatttgactttcaaatgatttttaataaatatttttctcctaatatctagctaactcatttctaattctctttatatctattatgtatatttgatataaatagaaaaaattatagtgaaatgtataaggtatatatagctaaaagtttgatgcatgcgaaataattaataatattaatataagttggggtttttttggaggaaaaaattaaacaatagtattaatttataaatcatatcaaactacaagaaaataaagcatataaatttaaaaacatacaaaataggaaaaatgctaaaaagtactcaataatgtgtcatatcgctaataaagcttaaacataccctataaggccaaattaatattttaaaattaaaaattattgttagctgagagaggaggcgagtaatactctaccgctaatgaattctaaatttaaatgggcaagaaatttaacagttttttctcgattattattagcggtggacattagcatggtgggtcccgtcgctaataacgaaaaatattattttttaaaattttgaactttattagcagtggactccgtttcctgtcgttaatgaccccattattagtggcggatgctaataccctttattgttgtagtgagagcttagagttaaagaaatagttgagaaggcaaataaacacacaattttacgtagttagaattttaacgagccttagtagttcactagacaatattatagaacttatagtaatagagttttacagatttttaaaatattctttgttttctagtgtgcgaaccttttgcatgcactactacaaaaatgagttttcccgacgttttaaaatagtcatttaaagtattcccgtccgtttttataaccgttgcctatgcgaccgtcgtaaaacgggcataataggcaacagttcaaaaccgtcgctaatgtgagtttcctgacggtttaaaactgtcgcctataacagggtataggtgacggttttaaaccgtgccctatactaaaaacaatacagatttttctgccattaatggtggaaaaatctatattttcccccattttttttcttccattagctttataatt

SEQ ID NO: 125164 - DNA, 1056 bp, Cannabis sativa
  modified_base (136)..(146): a, c, t, g, unknown or other
aaatcatccactatcaccaatatttaataatgggattataaagctcttctctagtaaaaatagaggctcacaacaacatcaagattaaacaatcttgggtcacgaatacaatcatcatcatcatctcaaaagatgnnnnnnnnnnnagaaaaagtttgggtctcaccaagtgggtattgtagaagagccccttagagaggacaatcgtcaaattagaatcattggatttgaagagaaccttgcaaggattcaccacccaaaatttgagctaaaatggatgagaattaactacttgatcttcaatgcaaaatggcaaaatctctttctctctctagctttctttctcttatttccctctctttttctttctttctcttggctgctggtttttcacgataccaccatcaactattacttttttttttgtttcttttaggtttcatttaaattgggccttaagtccttaattggtccaagctcactaacaagggacggacccaacaaatctctccctccgtctcagttggtgggcttctaagcccgctcgtcgcctacaagctttgagcttctctttagtcaaagtctttgccaacatatcagaatcattctcactggtatgcaccttttctaattaagttaaattctaaattaaactctaattatctgctaattctcatactaaaattaagcagacattccactcaaatgcattatcaactacatctttaaatttttcttctttttcagatataatctcagatgttcactatcttttatccatttcttcttagagttattttctcacatgttaagagacatgctaatcaagctgtacatggtttagcaaaatatgctttattgaatgagtaaattcttctatcctattttctttattgtttggataaataactcctaatttataataatagtgaaagctttcttctaatatatatttatatatagggcaagactatggtaggacctagtgatgagaacactaaggctaaagatacaagtaaagttctagttggcccggtgacaagggcgcaagccaag

SEQ ID NO: 125165 - DNA, 2280 bp, Cannabis sativa
  modified_base (710)..(711): a, c, t, g, unknown or other
  modified_base (1030)..(1030): a, c, t, g, unknown or other
tttccttgcccgcattcgacaacagcttaccagtccagctattaattctattcaaaactttgttcttgagaaagcctagaatagccttctttttcctcccaattatattagggaggcccaaggtggtaattatagagttcgtataaaccgtatagcttttggaccgtacatttttgcaaatgaagatggtgcaatgggactcgacgcaatcattgatacaggatcatcagcaaactacattgcccgagaattttgtgattaatctcaaaacatatgtgaaagaacagttgtatgaattaggtgtgcaagaacatgaaggtgctactggcaaattgttatgctttagaggtgatttgagggaggatcttaaagaatttccaaaagtttggattcagtttgaaggggaggcaagtatggaattggatcatcgtattttgtttaaacaacatacaaagagagcattttgttttatgataggcataacaatagttgattcgggaaagataatggtaattggagcgctgactcaacaaaattaccacatggcttacgatcttgactacaaaagattgtatatgaaaaaagttgattgtcaaaaatataaagattagtagtactatttctattaaatttgacttttattattattaattgtacattcctattataggaaaattattctatatgctatttttttaattttttttttnnaatttacggtttgagtttctcaagtagtttctctgatggtttctatgtgtgttgctatacaattttttggttgcaatttaggttgctcagctagttgcaatagaaatttctatataaaattccgtaaaaataaaaaaaaaaaaatttgaagtataaaaataaaaaaaatccctattttatttatatatatatatattaaaaatctagaaatcaattattattctcaacaatggtaaaccgaaataacataaatcaagataaattgttaatgtacatataaaaatggttcacactacaacaattttgataattaggggcngacctattaccggcggggaaggtccgcccctaataatgaagttattaccggcggatttagggggtccgccggtattagtatttattttaaaaaataaaattaaaaatataatttaaaaacaataatacgggcagattatcattattagcagcggacccccctacgccggtattaaatggatggaataaatgcgggaaaatacccgcttagttattcaaattagtattagcggcggatcaataccggcggagatcggccgataatactaattaaataataatattctcattattaccggtggaccctcgccggtaatgttcctctatttaaacccacgcacacccggtttccccatttcttctctttcaattttccccaatttttttttccattttttctctaaaaaatccgaaggaaaccgcctcccccaaaccgcctttgcctgatgcctgcgtctccgcctccggttgtgtctccgccaccgccgtcgtctccgtctccgcctccggtccatcactaagtaggtaagtgttttatgtatttatatataccaatatattttctacaatataatttttttttgttctgttttttaatgtaattttttgtgttatattttcagaaattgtagaagaggtttcaaatttttagcttggacaagagatcacaaattttcatttgtgtaaagtacgttttttatttctataaaatttgtagttaatatttcgattaatatttattataaatctgaaatgtattgtatatataaatattgtagttaatatgtgtaaaatattattagtttataaatttaaaatgtattattttattaaatctataaggttctcaaaaaaaaaaaaacaatctgtaatgtgttatatatatataaataattcatgaatttgtaagtagacttcaaataattcatttattgaaattataatttttacagaatttaacactgataacaatacagaaggagccggaaaaatatattataccaacttagagatacaaccatcttaggaaggataaaacttgggtcaatgatgctgctaaagagaaatggatgagttacactaatatttcatttcttttcttaaaattatcacataattgattatttaacaatttttatttatggttaggagcaactcactaaagaaatggacgaagagatggcgagaagtaggcttcaaagccaatctggcagtgattctggatcctcggaggtgccgtctgacatccaa

SEQ ID NO: 125166 - DNA, 1247 bp, Cannabis sativa
  modified_base (1195)..(1207): a, c, t, g, unknown or other
gatcctggtaaaataaatatccaatatggcttccatgaaggaaggctaaagtcgcactaaaattcaaacaatggcttatctttcaagactaaaggtgaaaaccgagttggatgttcaatattcaagaaattcctccttctgaaagggagggttgaagacgtattgaacctcaagcaatattttcaaccgaaatcttgaaaggtatctactagcaagataaaagcaataaggtaaaaataaatgtgcttgccagaaccatgttgaattatgtggcggactttggctcccatgaaggaaggttgaagtcgcactaaaattcaaatgattgtttcactttctagactaaaggtgaaaactgagttggacattgaatagatttcaacaattcttccttccaggagggatggttgaagaagtagtgaacctcaagcgatattttcaaccaaaagcttgaaaagtatctaccagcaagataaaaatagcaagccacgcattcgatttttttggggcatacacagctaagcatagtacctcccaagtgagatgagaagtctggacttctccaaattcttggtcactagtttaaaacattacttgtgctggcaacaaaaggtatgacctctttgggtgaacttctattgttttcagttcattgtacctaaaaactcccattaagggagaggacttaccaaaggtcacccacaaccataaggaatgttataatcttgacaccccagcttgttaatagcaccaaaaaatgtctatattctaggtgcaagggatctgtgatctgctcattctcctgaattagaattctttgtttcctgctttatgctacatttcgtggggaagactcttttctagacagaacttttgagtccaaatatatggattttcctttagaactaggatgctcgacaattttacgcccagcctatcaagttgggctgggtgcatcttcgactaaatggggtgaagagtgattcctcgttgagtcacaaatgtctcatctgtgcgactgaacaatggttccagttgggatgactgctttgagtcaattagtaatcgtttgtagtgtgtagtactctttgtagctttgtgggctcaacgacttcgtgaatgcccctctagcaaatgggttctaccagccagaagtttgaacttttgggttttgtaccctaaataaaactcattnnnnnnnnnnnnnatttactaataaagatcagaaatcgcattttatgttgcat

SEQ ID NO: 125167 - DNA, 1465 bp, Cannabis sativa
gattacattgaaatgaggttttatttagggcataaaacccaacagttataggggcacaaaggttcagttagaagctcatcacatctctgtaagaaagccacacaaaatttttttgtatgatctaacttcccacagaaaaacagaaatcaggcaggcgctcatacttaaaatcaatccacttaacaaactcatgccccatcctaataaatttaatgttcatacccctcctaacaggcaggttaacatccataagaactctcagacgcaaataaggaccagtgccctccttaatggtgtccttatcaacctcaataaggtcaccaatctccatagctataaatctagtaagatcataagacttacacataaaaggaatgtcatacacttgaatccaaaagggtacataatggagattatcaggggtaagagggaaggaactatctggtgcagcaaagatagtaagacactgggcaaaatgccacgattgaccctctaaaattctacccttatccccttcacagtcaaaggagacaagaaacatgccatcagcatgctcagacacagtaatagggaaacgacattgcgatgaccagatacccgagagagttttcatcagagaaggcctattgtaaggacgaatagtatgagtttaagaagaagactaatgggggcaggatcaaaactggaagaacccgtatcataggtgaaaacagtggactcatcagggggaagaacaagggcattagaaacattatttaaaaactcatccatgtcaacaaagagagacaacaaaattgtataagcaggaataaacaaggtgaaaggagggtgatgaagaaaatagtacctgagtttggaaatatatataaagaaccaaagggcacggatgatacaccagagaaccgccctagtcacgtctgaagtcgcatccattgaagccgtaatgatgagaggaacctgaaggactttgggaaaccagtcgtccgcctccaaattgcgatattcaagggggtttttctgggtatggatatgggagatcaggagtaaatggcgagaagacaaaatggaatgatgagaaaatttaattagagagggcagaaggaagggtttagagcaattaatgctctgatcaaatttaatgggatgtgaaataaaaccataataaccactagagcatttattacataggaaagatggggaagtatgcaaaaaaggatagttgcaataagtcaaaccaccactataccagtaagggtggacgagatcctccatgagaggaaccaaacacaaaaggaacgagaagatggaccgcatacctgctagaaggctccagagagaaaaagctttttttttttagaagaaaaattatgttatgataaatttaagaaatgtcattaatttacattagggctattttcaaaaatagaaaaattattaagattatgataaatatggcataaaaagt

SEQ ID NO: 125168 - DNA, 646 bp, Cannabis sativa
  modified_base (612)..(619): a, c, t, g, unknown or other
ttatgcgaatcggattggatccaaaatatgaaatccgcacttagtgcggattggatgttgtttgaccaaaaaaatgcggattggatcggatgaacacccctaaaattctagtaggttaagtcacgattgcgggtttttttaatcataaatttataggacagatatctgcaatttgtgtagtaaccttctcgaactacttaaatagcatgttttgtcaaatcatggactagtaagtaagcgagtaacataacacaaaactaatttagaaatttagacaataaaattataacatcctcaaataatacaccaaaataattagaacttcaacttataacatcgaaaactacacgccaactcataacacatatcaaaatactctacaaaatatctacaaaacaaaataaagataaaaaaaaaaaaaaattgagttactcctaatgatgatattaactaataaaagaaaaatctcaacagtaaaaagatgacaactctcaaataaattatacttaaaataaacttatcgataaaatttctgtaacagtgggccctccacaaaaatcaacctacaaaataacaaggctaattagtaattttccccccgaactttgacannnnnnnnatcgtgccccctgaacttttttggtcg

SEQ ID NO: 125169 - DNA, 1337 bp, Cannabis sativa
  modified_base (1200)..(1205): a, c, t, g, unknown or other
  modified_base (1280)..(1297): a, c, t, g, unknown or other
taaaattctcaaaaaccaagaatttcagttatataggtatactttatatagaatagatatatataataaggaattaaatattgcataaacttgcagagtatagaataactcaataacttttcaatcagccaattacagtggctttttgtaagtataccacttggccaccaaaagaaacacaagaaaattaagcaaactcaacagagccaaaagccagaagaaataatcaacatgaccatagttcaagttgtctggtatccatccaagcttcccatttctagtactcaagtcagttactacagtgactagaaaagtactcaaatagcttcccaaggcattggttgtgagtgcaagagctgaacaaagactcctcatagtgtctggagcttgctcatagaagaactccagctgcccaatgatggtaaagacctcagcacaacctaaaatgaaatactgaggaacttgccaaaaaattgacatgggaatgtgttttagctcatagtaattgtgttttttcacctcccttagtctcacaaactctagtgtccctacagccacagattaaaattcaccactcaaaatttacttacattggaagaaatatgtaatttggggacagaattttctactatttccttacctgcaacaaacatggaaaatgtggagatcacaaggccaatcgccattcgttgtagctgagtgaagccattgttgtgaccggtgaattttctagcgaatggcacgattaaacggtcgtaaactgggacccaaaagatgacacttatggtgtcaaagagggagagagaggctgatgaaatttggaaggagttggtcacatgaaggtccatggtgtttccttgtagaacaactaaggttcccatttggctataggcagcatagaaaattatacttgttgcccatatggggagcaaccttagtatggacttgagctcctcaacttgtgttacagtgcataatctccatgtgttcattgctgactcttttttcacatctgatgcagtctccactgctgccttgtcaaaaaaactaacaataatagtgtcactactaaagttcatttctttatagttactaggctaattaggatttcccacctccctcaaactttgacatgtactaaatcagctccctgaacttttaaggttgttaaaaataccccatgaactattgagattgttnnnnnnaaggacttttgtccaatttttgtaaaaaaaaagtctaacatgggaaagttcagagagcatgatttagtacatgtnnnnnnnnnnnnnnnnnnatttggtagatatcaaaatctagggagcatggtttagtac

SEQ ID NO: 125170 - DNA, 2131 bp, Cannabis sativa
gacttgccattgcctatttatacgctaatggattgtcatcaataccgtcaccaataaccatattgatttcaccatccaagccatagcgagatgggttcataggagccctcccactacgacgaggaaccatgatcttgtgagcaggaacattagtaatagtctcctctattgtgtcaatttgcattggttcaaccaagagagtgggatcaccttctgtttgagtagaagatgatggaacattagttagagttaattctaaaagcatctctttcaatgctactttactttgtggctagaaatctttgatatagtcattttctagaaaagtggcatttgtgaaaaaaaataccttattatctttgtgactataaaatagtctacccctagtctctttagagtttctgacaaacatgcaaacttcaattcgcttttctagcttgccatctttctttcttaagacatgagtggggcacccctagattctgtaatggtgtaagttaagtataggaccattccataattctagaggtgtcttgggaactgatttagatggaacaacttttataatgtcattttccatctgaataccatatccctagtaggacactgacagagttgaatagctaagcatagaccttacaatttctaaaagcgtatgatttattctttctgcgacaccattttattagggagtaccaggggcagtaagttgagattcaattccaatttcaatttaatgatctttgaactacatatccatatattctccactcctatcagttcataagatctttaatattttacctaattggctttgagtcatagcatggaattcttaaaacttctcaaatgttttagatttcttttgataaagtcaacacaggtaattctcctagggtgacatctttcaatgtaccacccttggtaagtttgtataatctatcatagctaatatgataaagtcataagtgccatagatatgtttcttgatctttttcgatcttttgtcttttatggttataggtttagcaatgctaaaaagtttgttattaaacgctattggttcatcaggtcgcaaaatataaagcctgttttccaataaaacatcacatatgtaaaatcaaattttcaatttataatgttgtgattgtaaattagaaacaaaaattaaatttctactaaaatttagaataaataaaacgttgtgtaataacaaatatttattcttgaatttgagacgagtttttcctctagtatagactgacaccaattgaccattaccaactttaagtttcaacttgccgagattcaaatactcccaagtctcaagcagctacaatgaagagcaaacatgagaattcttccccgccgagtatttccgacccatccatgctttaatttaaacgaggattaggacaaatatgaaggtgaatttaagaaacgggtatgtgagcatgggggagaaatctccaccccgccccgccccgtttacatcctagatttttttgttacgtacttctaagacttcaaaaaatgctagaatttttagctgtgttgatgttactttccaaggaaagaaaaaaattttattgtggttcccatctatttttgttagtaattaaacacaatgttccttaaaaaaaacaataatttaagcattctgcttaatttgcacacaaattacataagatcaaatggaaagaaagttcaaagtgtgagaattaatatggaagttagataattcttattattttgactaggggtgttcactaagtatccgatccaatccaattcgcacgatccaatccaatccaatccacaaaatgtggatatctgcacttgcgcggattggattggattgaaaaatataaaatccgcatttctgcggattggatgttgtttgacctcaaaaaagtaaccgatcaaatccaatccgcacttaattatatatatttttaaaattataatatataatatatattaattttctagtaatattaaaaaaaagacacaaacttctaatttcttaaatttttttttagtaatatgttgagttggtgtatcttatttgttttataataaaaaacacaaaaaaaaattatttttattcacatagacacatacacataaa

SEQ ID NO: 125171 - DNA, 2057 bp, Cannabis sativa
atataaaatgcattctgaattcatttaatattaataaataattttcataattaaaccctaattatgtactaatttccaaatttaaacttagcggtctttacatacgaaacccgataggtcgcattgctgcattcagcagatttatctgtaagtctacagagaaatgtgtacccttcttcaacattcttagagggaaaaaaaaattgagtgggtagaggaatgtgaaaacgcattctaggagctaaaaaaataatttgctcaactcatgtgttgtctaaacccctagaaaatgaagagctaggcgtgtacatagcagtcaaatagtatgatgtgagtgttgtcctcacatgagaagaagacgatacacaacaccactacatcaacaaaaggcttatcgatgtcgaatgtcggtatccactcatttagaggctaacttacagtctactcttggtttctaaaaagctaaggccctacttccaagcacaccccataaaggtgtacaccgatcaaccattatgtgatgttttacgaaaaccaaaagcatcaggctggttactcaaatgggccattgaaattggccatttggagatcacataccaaccaagaaaagccataaagggtcgggcccttgcatgcttcgtggctgagtgcaccaactaaactcttgagatctcttaagactcaagagaaaattaagagccagagaagaagcgagagcaatagatgcagcaaaaacttgaggaactaacatggaaactacgtgttggcggaagctgcacttactagttgtttgttgcaggcattgcccttataacacttgcgcgacagcaactgcacggagcaataaaattcagcttcaaagccttaaataatgtggtcgaatatgaagcctaatatccagcctaaagttggcatatgaagtacgggctgaccacctgaacataattatcgattctcaactagttgtgaataaatttgtagttgaatacataactcgatgtgaaaaaatggtggcctacttgagaaaaatcaaagacttactaagtcagctcaaaggctacacaatcaggtagatcccaaagagcagagcactacaacagatgcacttgcccatctagcaagtagcaccattatcgacaaggcggattttgtgctaatattgttcccagaggaatccagcattaccatcccagaagaagtcaacatgttggatgatgctccaacatatatgacacttattgcatcctacctcaaaactggagcctttctagaaggcaacaataaagtaaacaagctaagaagaaaagttgctaggtatctaatcctaaataggtaatgtacatgaagtgtgtcaccaaatccgaacttgaacgcctaatgatagaagtgcatgaaggcttctgtggcgaccatgctaggggcaaagcctatccaagaagatactccgacagtggtacttccagccaacaatgatagaggactcaatggactgtgtcaaaaaatgtgaaaaatgttagagattctaaaaaattctaagagctccacctaacgagctcacgatgatccagtctccttggaacttcgtattataggggatagacctgagtggtcaactcccaaacgaaaaaaggaggggtacaatttgctgtagtcgcagtagactgcttcaccaagtggacagaagctaaacccctggcaacaatcacctctaaaagagtccttgactttgttttcaagaacaacatatgtctattcggatttccttagagattgtatcagacaacaaaaaatattttgatagtgacatgttcaatgatttctacaataggcatggcatcatcaaaaccttttctgtcgtggcccatcctcaagcaaatgggcaggtagaagctatcaacaaaaccctcaatgacaccctaaaaaagcaccttgaggaagcaaaagggaactggcctgaattgctcctaggggtcctttggtcgcataggactatcgagaagacagccactgggcaaactccattcgctctagcttatggctaaaaggtgatgttgctt

SEQ ID NO: 125172 - DNA, 1081 bp, Cannabis sativa
  modified_base (203)..(204): a, c, t, g, unknown or other
tttggacatccacataattaataatatttataacaattttcatattgtattaccattattagatgggctttcatgcaccgttcttaaaaaatcctaaatatgcacaaaaaaataataataataataaataaatgaaatataaaaaaaaataattaccatttttattaaggaattatttaacaaatatacaaaaataataaaannaaattacaaaaatacgattttacggaattttaaatatttttacgattttatttataaaaaatacggtcttcttatgttgtactcttgttaatttgttgttgagttttgttatctgtatgttattttttgttgttgttttgatgttatttcatgttacttgtatgtagttcttttattgttttcgtgttgtttctatggaaaaccgtaaaaatataaaaaaaaattctataaacataaaaatataaattttttttataaaaatagtgtcttgtgtaattatcctttttactaatatgtgttttttttttaatgggtttctctttttacaaaaatagtgcgttgttttaaaaaaaaatatattattttaacgttgatgttacaagaaaaattatttgataaatattaaaaaaatgaaatatgaaaaaaaaaataccaatttttttctactgatttttctttttacaaaaagtgtgtttttaaaaaaaaaaatattgcttttaagttgttgttatgggaaaataacatgttcatttttataacattatgatgttatttttttgttgtttcaaaataatattgttttgatgttgttattaaataacaagaaaacaatgtgaaagcaatatttttctaagtgaaaatttgtaaaaagaaaaaatagtaaaaatgtaaataaaaaaaataggtctgtaaaaatgtaaaataaatgtttttaggaaaaattgcagtctatacctctttcttttaccgattttaatttttacccttttttcctatataaccacttttacatgtcatgttcccactatacccttagggcccgtttggtacgcaggactggattggattagacaggctaatttgtcaaatccagtgt

SEQ ID NO: 125173 - DNA, 1035 bp, Cannabis sativa
  modified_base (982)..(986): a, c, t, g, unknown or other
ttctctctctctacatctatgaaacataacatggtatcagagctatgaatcgctcaacaatggaagcttcagcaaccggtaatggaggagcatcaagatcgaaccatgactacctccgtcgttccaatcctgtttcgttctcacattctttgtcaatcaaacttgacgaacacaattacttaccgcggaaacatcaagttctcgcatcaattaaaggaagtcgtttgcaaatgttcttggacgccacaagaatcccccccgaatttctcagtacggatgatgaaatcaacactgtcaactccgcttacgaagactgggagcaacaagataacttactggtttcttggttactctcttctatgtcggagaagacaaccaatcgtatgattggttgtgagactactgcgcaaatctaggaagccctgagtgagtattacactgccttgaattctgctaatattggtctttacaagactcaactcaggaataccaagatgaccggttctttaaatgattatctgttgaagatcaaaggcataattgatcttcttgccaccatcggtcataaacaatcttcccaagatcacatcgaagctatctttaatggtttacccccagaatacgatgtgtttgctacctctgtaacaacaagaaaggagtcctactcagttgctgaaatagaggctctactaatggtacaatcggttcgcatagagaagaacaccaaagccctggatatcaacaagagtgaagccaatttagcccacacaaaatcagctcaagggaattttgccaacagaaactatctttccaactctcagatgccatctggttacagtcgtggaacaccttacaggtataatgaaccacctcctcatatgcaatctatgcctaaaaataattataataatggttgttgctgaaaattattaattactacgcaagtgcacgcaatcaagtagtatactcacgcaagtgaggnnnnnccacagggaattggattaattactgctaaactatacttataattctatt

SEQ ID NO: 125174 - DNA, 704 bp, Cannabis sativa
  modified_base (671)..(678): a, c, t, g, unknown or other
gagaaatctcactataacaatcacttttaaaagcaaagcaaacattgtaatggataatttgattccattaccattcccattacaacaaaccaaacacgccatgatgagttaataaaatattaagctgaaagattaaatattttactatacaaatgttggatgttttgctcttctaagtttcatatatatatatatataatgttatagtataaattttttgcctaaaaatacgagtacaacttcgtaaataattgacatgtggactcgattctagatgaaaaataatgatgtgttaataaataattctagtagagctaacctggatgacgtaaacttgcgagaaagtacgaatgagatagggtctagtcgtacactatgtctagcatagttgaaagataagcaagaccaataaaaattagtacaaattgtgcatatattgattatatgcgacgagtaagtatatctctcatgtgacacgtaaagaccgcttctttacataggtttggtctgaaagactaatgtgttcgatgacccgacaagaacttgtaagttttaagttgtcaacacaggaatttctgaatatgcaatttagatgtgaactcgtagacattcattacttaaccaagttggcctgaaagcccgttatgtgaatagtgttgggttttatgccnnnnnnnnaactccatttcaatgtaatctatttt

SEQ ID NO: 125175 - DNA, 621 bp, Cannabis sativa
tagattatggtgcctccaaaagttgtcttaaaaaaggttaactcaatctgtcatgttttttttatggaaaggcattgcataaatgacttgtcctgaacatgtggcatggaatcaactttgtaaaaagaaattggaaggtgggcttggtttaaaaatacaatcctttggaatatagcattcattgggaagtatatctgggatatagcgtcaaagaaagataatctttaggtaaggtggatacatagtgtctatttgaagaatgaaaactggtgggactataattcctcaaccttaagtagctagtattagaaacagatagtcaatatcaacgaaaaagacaaaaatgttcctgaattccagttacttatggactgggattatagcatcgatatgcgctacaacactcttttagaggattctagtaagatggtttggtgtagagagatctggagcatatataattttccaaagcacagtttcattgcttggctagctattcagaatcgtctccaaacaaagagtaggttgatgaattttaaaatttgtaatgaggatgtttgtctttgtgtgatgctagatcagaaatggtggaccacctattctttgagtgtgaatttagca

SEQ ID NO: 125176 - DNA, 1344 bp, Cannabis sativa
  modified_base (823)..(826): a, c, t, g, unknown or other
atccaatccgcacttttgcggattggattggatccaaaaaatgaaattcgcacttagtgcggattggatcggatgaacatccctaatgccagtgtttttattataattatttaagatatttgtaaaattttaagaaaattaaaattatttagggtgtccaaagttcaaaaaacttattgtaaaaatgtataaaataggtgttcacacatgcatgtttgaattatacaattttaaatttttaaaatttgcataataacctaaataactacaatcaacactgttctacgaaaacatgaagttataatctctccactaatcaaaatggaagaaactcccttcatatacttaggttttttcaacaaaaaaaaaataaaaatacatatattttttaaaaaatagagtatgcccacacctgaaaaggcataaaaatatttacccatcttagttatatactatattttgtaaatatttaaaaaaatttaagtaatttatagtgttgaaaattaagatttaaatattttgtcacaagtaaatctcttttattttttaagcatgcaatacaaattatttaaaccttaattttgtataatgacctattctaaatttctaaaaaatttgtaaaatactttaaataattacaatgtaaactattgtataaagtaatcggattataattatgtagatattcaaaatatgtagatgatcattcaaaatttataaaaaatgtgactaatatataaaacaaataatgtgcttctatatttatatatatatatatatatcaatagataaaatacattaatataaataataataataatannnntaataataataataaaaataaatcttgttcaattctattatatattctttttaaatatgtaaaatttagaattacatttaacttcaaatattaactttgttatatttaaatttaaattctattatattttgttaatttaaatattgtttttaactatataaaatttaaaattacatttaaattcaaattttaacttgtactatatttaaatttaaattctattatattttgaaaatttaaattttttataacaatgttaattttaacgattaactttaattttgattgaaagtaataatttctattagatagccacaatttatatataaatatatcaaaatattatttaaatgatgctagtttttttttcttttttgtgctttaataggaatttatatatatatatatgggtgactaattaattgttacatttttattgtaattatcatgattacatatttcttttacctataatagcaagttaccaataggtaaaacttctttttttaaaaaaaaaa

SEQ ID NO: 125177 - DNA, 3137 bp, Cannabis sativa
  modified_base (483)..(486): a, c, t, g, unknown or other
atttctggttagcgttccatcaagttcacatatatcagagtgtatcaaatctaaaggttcagtttctttagtaattgatttatgtggtgtcttagttatttttgtttgactatgaaaaacacatttttcaaaatccttttctaacatttacaaaattaagcaaatattactcatgttcttaatgatacgcttattaatatgaaaaagtctagaatgccaaacattaaaatcacacaacatgtaagcaaaagaagatactttattaaattcaacatttaatttaaacattccatcagtagcataattcttccccacaaaagtatcattcttagtgatggcgtacaaatcaaacccaattattcccggccttgttaagcaaaaaactagaagccaattctttctcatctcgggagtatgcattacatctttcagcaataatatctttctcgagataaactttagctccacgtttccagttccagnnnnaatagtggtgtgggagtctcccaaaaacactttcttgtcataagtaccagtgtatgtcttaaacatagcacgatcatagcagacatggcgaaaggtgccagtgtctacccaccacccttctgatccaccaatcaggttaatctcaaaaaacatagttgtaaaagcttcttcagtcaagttaacctgcggagcagtactaggcttattcttacacttttgtgctatatgacccgacttgttacagttgtaacacagaagctgtgtagggtcattctatttatttggaggtggatgccttccaagttggttcctattatggttccaactctagttattgttataaggagggttgttgcgattagaattggaattcaagttgtggttcttattcttaaaatttttgccattaggcttcagaaccgcttgtatggacttcttagtgttgttgtttgaaacaataagtacttcatctttctggtcttgttttctcgcttcctcctctatacgaaggcaggtgattaaattttctcaggaaaattccttaatcttatgcctgagagtacttttaaaatccttccaagaatggggtaacttatcaattagtacaacaacttgaaactgttcatctaaattcataccttctaagataatctaatgtacaattttctgaagcttgtgagattgggcttccatagatttgtcgtccaccatttgatacttgaggtagcgacagatagcatactttttagttatagcttcttcagtatcatatttcttttacagagcatccaagattttgtttgccgatttatctgagttataatagtcatacagatcgtcagataaaccgttaagaataaagttcttacagagaaagtcgttttcgacccaggagttcaaatctttttattgcatctcacgttcaacctcattgtccttgtcagtagaagcttcagagacgacaggcttcatagcagtgagaacgaaagtaacaatcttcatcgtcaggtagaacatcatcttctatttctatcgcttaaagtgtaaccccttaaaacagaaaggcttgttaatattgttagaagtagaacaaaaaaattcatcggtagcagccatagcagaatagaatgtcttaaaattgttaaaccaaacttaaaaataataaaatcggaacaaattttcgaaagaaaattctagctgagtcgcggaaaatgtcgctttccttaagacgtttcacgactctacccgaagtgtgcacgacagtctagaaacgacgcgttcccaagataaaatagtcgttgtatgcgatatgttctacaccgaacgatatcgttcgattacaccctaaattattgctctgagaaaaattgtaaggaagaagagaattcttttttgttgttgaaaagatgtattctttcgttgttctgatacgacttatatagagaagtcaatccaagattaaaaagtaagaaaatggtaatataatcgtggaggagttggatcaaggcagaaaaaagcggatcattgactgatcgctttttactactccatttaacgttaaaagtaattaattaacaaataaataaaaaaaaataattatctggttaaatacttttttttttttaaaaaataagtgacacctcacctgtcggcctagctcggacgggcgacgacagcgcgtgtggtggtccactgtgtgagtcctcacccatgcgtacaaaactgggtatccctcggggtccaaacccaaatctcaaacttgcatattatatacacttctaatgaagtgtttctatcacatgagggactccactcactcacacatgtcacttttcattttttttttttataaaatttcacaaagtttcaacacatatattacctggtttatgatagattaagtattactatgcaaccttgataaaaattcaaatattaaaataatcaaatagttttgcatgagtgttttgtttgttttttttttttttttgtttgttttactcacaagtggaagtcattctcccaaaaatacatgggggatggaatccttggcattcttaaaaaaaaaactatgttgtatatataataactatataactatggaggagattctaatggttacattaaatatgtaactatcatggttacatttttttagccattagattattattgaatggttgtgattaatttgaaaattaaataaaaataaataatacttaacttataacctaatagtcacctgataatatattttcttataaaactttaattaagattaattatattttaaaattaaattaattatagaaatttttacaccaaaaatccaaaatgataaatttattacataaatacctacacacggttaaaccaacttttttactcatcttctatattttattactattttaccacatgcacacacaattcaacatttttgacacgtcagtgattgatgtaatacatcatttctctcattattctctgctttttccttttattttccatttcttttcagtttttttttttttgcaaacatagtaacctctatagctgaacacttccctctccacaatcccaactctattttctctcttctttttgttcttcaaattttttttcaactcccattaacagttttccctctt

SEQ ID NO: 125178 - DNA, 663 bp, Cannabis sativa
gagattgggagaatgaccaacatgagtaagctagttttatacaattttagcattcgtgatttggacatctcaagagaactataggtttagtccccagaactatgggtttcaagatatgtctacttgttatgtcatttctcaaagaagaaaattatctaccctctatattttccacacaataagcaattaagatataaaggcatttgaaaaacaccccatctgattaaggggaaatcttattcttaatgagttcctatgcttttatctcatgtctacaactcacttcatgtgattattaatttattcaattgatcgataatccataatataccatctatgatcagggaaatttgagaaatcaagttcaatgatcatgggtgacacaataatatggaaatcctatatacacctcaagcaaagttctacctgatccaaagagggcgtaaaatccagaagtcacatctatctctgattgctcctccctgaataattaagcaaacagaaaagagggaaaaagtaaaagcatcacatcaacactcaaacactcgtgtagaaagaaaaaataactaacaaaattctcagtgaagttaatgctcaaatactctatgaaacagaaaagaacactaatataaatgcaaacacattcaagcctcgtaatcaaat

SEQ ID NO: 125179 - DNA, 1682 bp, Cannabis sativa
  modified_base (1645)..(1652): a, c, t, g, unknown or other
ggtcagacaaacatgtcaaattgtgtaattacctccaattacacacaaatccaattacattgtggctttccaaacgcaccttaaatttaaaattttatgtatttaaaattaaggctctttttattagtaattttaaaaaaaaaaaatacacaaataaaacacaaaatattatctttcttatattaaactagaaaataagttgtgctttacttacggttatattttatttagtgataattatgtcataaaattatattatattttaaattttttcgtattttttatatatatttattttgttagtataagtaactatttgactaatttttcaaattgattagagatcctcatacaaaatagaagttttttttaattgataaatccatataaaaaataattatcatatgatttcaaaagtgttgtcatcaccaacttacttatatatgtcattacattcaaagtcgttattaccaccgtatctctcttgtaatcaccactacattcagaataattgttaatgtttttattgaatagttgaataattgttaattggtagttatttgtagagattttttgaaaatgaattatttaatataagaactaaggaaaacagtcaaaagaatcaaatcagaatagcactcagagtttttacgtagttggggcgttaaacagccttttattatttgttaggctagaaaagctaagggattacaatgagtatattctctctattcccttcttaagcttgagagttaagatgtgacagtcaatagttcaataatctgtaaggagaaataccagttaagctgtgaaatctcacaccgcctggggaaggtcaagtgcgacgattttgagactttgtaggtatgaaactacacagttgaagatggcgtaaatgagttgattggtactatctatatcaacaaggtgcatcttgttttctagtagcccatcttgaaagaactccatagttaagcatgcttgacctacagtaattttaggatgggtgacctcctggtaaattttctcaagaagcatgccaattaggacaaagcacactggaaacactcgtgttggtctgtagggctagtcgttagtccatgaagcagccaaaagtgacgtacctatatataaaggtcattagtttgtaggggaaggccaaatggaggcttaaagcggagacgttacaaatggtatcaaagccttgacctagccggaagtgtggatgatgaggacgtcgaaccccgtaagggggtgattgtgacagtcaatagtccagtgatccaaaagttggaaatactgggtaagctgtgcaatcccacaccgctttgggaatgtcaagtgtgatgattctaagactttgtaggtataggactacacagttgaaaatgacgtaaatggattgattggtactacctatatcaacaaggtgcatcttattttatggtagcccatctcaaaagaactccacagttaagcatgcttgacctaggtaatttcaatatgggtgatctcttggcaagttttcacaagaagcgtgctagtgaggacaaaacacactgaaaacacttctgtccgtttgtaaggctagtcttgttgggattttatgccctaaataaaatctatttcaatataatctgatttnnnnnnnntagaagattagaagtcatttatatttacat

SEQ ID NO: 125180 - DNA, 750 bp, Cannabis sativa
acgacctttatatggagactgtggggcggatgtctggtgtaggtccatcctctgcgtcaggtggtgtccaaccgtaatatttcggccagcctgttccaaaagttttttgttgttttttttttgttttgtatatatatcccggtttttaactacacttttcaagccgcagagacacttaactttgccctagccgcgaggggctgtttagtagttgaataggttattttttactgttccttttttagagacttgttgtgctagactgtttaggggctggtttcattttcgaaacatctggttccaacggccagtgtttcaacctttttccctttagtcttgtttgcctcttggtcaatccaggaacagtttttttattcaacctgcctttctcagaaccgcgatgcgtttttggcccgtttctcgaaaagttatctgtttagacctggctaggaggtggcccttctctgtgaaatagggtcttctactgtcctctttcggttttggatttttcataaggtcaagtcccgggagcattatttgcggtttctttagacttagccatcttccttagttcggccctcgacattttttcattttagccttttatgtaacttgttgggctaaactcttcacaaagttcacggagatgtataagaagggattcaggtgcatctttccagtttttcaagaaattttagccgaacgtgcttcttaaccctataaaatttgacataagtaattttatttagg

SEQ ID NO: 125181 - DNA, 1265 bp, Cannabis sativa
aaaaataatagttgaaacttgaaagtgaattgaataaattgatcgagagttttttcttttctttgctaaaaaaaagggaatttttttttgtttaaaaaaataatttatttatttatttacaactattttatctaaaataatataacaagtctttaagtaataatgcttattgatggcataattaaaaatcttctttctctagaactttctagtgggttgtatcccgttacagttcttctggttcccttccagcttgatctctccctcgtggtgttttcctgttttagattaatcttttctcttttgtaattgttttctcttccttcatttattgtgatttaacttcttctttaagtgtttttgtccattagccctctaattaattactctgcagtcctcctttcacatcccttcttctctcttctttactttccaatgaaaatcttcagggaatcatactccaggggtttctcttcttggattttctactctctctctctctcttcgcatatcccatctccattaatagaagccgtcattttggctctttcaaggaggagcacgatgattgcacctaaggatcttggatttggtctaggatttctgtaggataggatgattatcactgaagttttcttctcctctaagacttcaacatgcaggtatttctctcattctagctatttaagggtgtgggttctttggcgttctttacttctttgcttgcttttgttttctttctctgaatattattgggaactttgcttgtctttcttctgctgggaaatggagcgtattgctgataatatggctcatgtgttatctcttactgaaaaagaagcagtagttcatgaacatctagatgatgttggaggggatatacagattgggaaaactttctgtcttgtctttcgagtctttactacccgaaccattaaaattgagtggtttgaagaggctatgagaaatgcctggatccatcgtgctcccattactttctctgaatatggtaatgggatgtttatggttgagtttggttgtgaaggtgacatgaggagagtgattgaaggccaaccgtagcattttgaccattgtctggtcactagtgctaaccctgctggccttgacactcttctccctaaccagcttagatactctcctttttggattcaagttcactccattccttttggcatgaagtcttataagcttgccaaaatgattggggatgaagttggggatttccttgaggttgataaaatcac

SEQ ID NO: 125182 - DNA, 815 bp, Cannabis sativa
taagttggttgtatcaaaaaaaaaagttgtcaaaaattaagctcaggttcctatttttaccattttagaaaatacaatgtttattttgtcatttaacaaattagaaagtccaatcgataatttttacaaaacatagggtccaaaatagtatttactcaaaaaagtactaattaattaaaaagattaatgcaaattaaaaattttattaatgtgttgaattaaagcaataactcaacaccaaggacatctataaaataaaccaacattttaaagtaaactaatatattctctggttgtttacgtttggtgaactttttttaaacgagaggaataattgatattcttcacgcttggaagtctttctcatatttctatttctcattataatcgagctagtaatacttttatttattctctagttaaatttgctcttttattagaaatttattgagtttggttgccaattcttccgcccaatttactttagatagtttatgcttatattgatatcaggatctctttagcttcgtgctatttttattggaattattcttttttctcaaaaaaatatatattaaattgagtaaatatcattttgagttctatttttaacaaacttattgatggactcttttattttattaaatgataattcaaattttatattttataaatttgaacataatagactttattttgtgttaaaattttttaggatttaagattagattagaaatcaaaccacaatgattacttcaagatcgtttgataaaaatctagtttagagaattattatttaaaaaatacataatcaa

SEQ ID NO: 125183 - DNA, 2064 bp, Cannabis sativa
  modified_base (2003)..(2030): a, c, t, g, unknown or other
tcatgatgacagacaagggggaaggaaattagtgctttggagctagaggattcaaagaacttgatagctaattccagtgttgggcctatgaatcgtacgggatcgaatttcacctggacaaacaaacaagacaataggattttctctcgcatagaccatgtgttccacaatgaggattgggtagataattttccaaatacgcctgctcacttctcttgggacacttgctcggatcactgtttttgtgtggttcactctactgctacggaaaaccttggcaccaagccgttttgttgttacaagttttgggcagaacatctggattataaaaagactgttttggatagttgggggaagtctctaagatgctgtggcttgaaggggatttatctcaaaactatgcgtctcaagcagaaattaaaaagattcaacagaaatgtgattggaagcattggagaggcctttgagaaggccaaagagtcttacattgaggctcagttccaatgccaagctaatcctaataacatttatttccttggtttggagcatgaggcggaaaatcagtttcacactcaggaaaaaatgtaccagagtttccttcatcaaagaagcaatgtcaactggattcaaaaaggggatagtaacactacttactttcatgcgttattgaagaagaggaaggaagaaaacaggattgtttcgtttgtgactgaacaaggggacttaaatgatcacttcccatatgttgttcaacatttcattagtcactttcaaggcataatggggaaagtcaaaccaactagtatggagattcaaccggactgcatagctttggggcccaagcttaatcttgatcaacaggttcatctcctgaaacccttctctctcaaagaagttagagctgctatgtttagtattcttattactaaatctcctggtcctgatggattcggatcggggttcttttggtctgtttggcctgaggtggggaaagatagacatgctgcaatagctctatttttcgacaccaaccaattcccgacagagttacataacacaactccctctcttatccctaagactgagagtccatctaaagctatagactaccagccatttgcttgctgtacaaccttgtataaatgtgtttctaagttgatttgttctaggcttgctaatgttcttcccaacttagtgagccggaaccaagggcatttgttaaaggctgttccattgcgtataatattcttattcttcaggatctcttgaaaactatagaataaagaactgctccccaaggtgcacaataaaaattgacataagaaaagcttatgatacagtcaactgggattttcttgagaagcttttagttgcctactgttaagtggatcatgaactgtgtgagaaacacgtcgtactctttactcatgaatggaagagtttaggggactttcaaaggagaacaagggcttagacaaggggaccctatctcaccccgcctctttgtccttgttatggattacctgactcgaagcatacaaaaagccgccagggataagaattttaggtaccattccttgtgcaaaaaattgaaactcactaatcattattttgcggatgatttagtgatcttttgtaaagggaatgagggttcactcactgccattaaaaatctgcttgaagaatttagcaagacctcgggcctttccattaattttgctaaatctcaggtttattttaggggtgttgctcaaccgacactgcttgctcagaaaataaatctctctttaggagagttccctctcaagtaccttgggatccctcttagaccaactaaatggaggcttgaggattgtgggccgatattaaagaagatgaaactcaagcttcactcttggggaaataaactgttgggttttatgccctaaataaaattcatttcaatatacttagatttacttatcaatataaatcagaaaaaacatttaatgttgcatggttcnnnnnnnnnnnnnnnnnnnnnnnnnnnnataatgtataaattcatctgaagatcggaagagc

SEQ ID NO: 125184 - DNA, 913 bp, Cannabis sativa
tttttacaattttagaaaatacaaggttcattttgtcatttaacaaaatagatgatccaattggtaatttttacaaaacacaatgttcaaaataatatttgccctatatctttaatgaaaaaaatataaaatatgtatatatatataaagtatttatcataatttattaatgaatgtggtactgaattggtagaacaagttcgataaattatcatgtttgaaagaatattctaaataagactattatccaaaataattatatatatatatatttttattaaaaaaatcactattttgtcaagctcccattttaaacgagtttaaagatatatacatatattcctcctaaataattatatagaaattcttatataatatacaaaaaattttaaaaaaaaattacaaatatacgttaatatagagaaattttttatttttatggtttatttttttattatgtacaaaaatatagaattcaataaactctttgatatgcttttttggtatcttatagtttatttatagcttatttatagttattttgttgtttttttttttaaataaaaagttattaatttgttgttttagtttatttataattaatttagagttgttatcatattattttttattgttttcttatttttttctatgaaaattgtactttgtaattttgaaattttaaaatcgtatttttataaataagaacttcaaacaggaaaattataaataaaatataaacaattatatattattgaagaaaaaaccctatcatgttgataattaattaaatattaggtaatttagcttaacaacactatttattaggcactaaagatataatgtggttttataatgtaccatcttaaaagaaatatactgatgcattatttacctattttgatatctagaa

SEQ ID NO: 125185 - DNA, 972 bp, Cannabis sativa
ctataaaggtccattaaaaaattgtattttattgaaaaacttcgcctattttgtttactacaattttaaaccgtcgggaatactaaatttttcccaatggttttaaataattacttaacttttttagcgacggttcccgaaaaaattatttttaagaccgtcgcgaattctgatatttgtagtagtgaaccctcaatcgatcagcactttcatcttcctcattttttcatcacaaagagcaaaaccacaaaaatgcttgctgtttaacaccttaacaatcccatttcctcattttcccaccatttttacttattttctttttaaaatctttcatttttcatacctaaaaacaaatttcgggtatttgatcgtactttttttttagtgtaaatcgagtttagaggtagtggttgtagctctagtcgtcaatttcggtgtagaaatcatcgaatctcaacgtccatcaaggtataaatataatctctaataattttattaaggtacattgctttatttttcatttttcaaaattttaggattttttagcgtgttaagattttgttcttggagttgtgcagtggtggctatgaaattttcttgtctttcatgaatgataaggagggaaaaaattaagtcaaaagaaaatgccattttggagttttatcaacaatttacctgtgtatgcgaatatatggtattttttgaatccttaataaagtaaaaatctaaatttaatagttttgttatattttttttataggaataatttgttacaattataattcaattattatatatatatttaaattatatttattttattctttattatatatgtgtataaataaacgtatctctccaattataaatgtactagtgggagacacacgtgctccgcacgtgtatcaaattaaatgtaaatttatatataaattttaataattttaaagatttataagtctggtttttttt

SEQ ID NO: 125186 - DNA, 798 bp, Cannabis sativa
aatgagctaggtgtgctacttgagaatgtcatagctttattgtctaaactttcgggggcagttttgtcccatgcatgtggctcgggatgcgaattctgcagtacatggtttggcaaagcatgcccttcggttacgataagctatcttggttcgtggaggtgccaccgccgattgtggattgctgctttgttaatcatgtgtgagtttaataatcaccgcgtcaaaaaaaagtatgtcattttctctcatgcattttgaaatctggctgctgcagagttcataatgttaagattgttttggcaaaattcattgggtctataaatgtgtcgctacacccaagaatagtagactgttatagcttttggtttatgtttaatggtgttgattatgttttcctcttgataacataaatgaattcttttgatttatgcaaaagaaaaaaaatgtttctttgtttgtgtttatctatccgccatggaattcttgtaaaagcttgaaattctttctaataatatgaaatttggttaggtaaaagcttagacttcattttggatttgaggttgtactgccactacatcaccagagctttaaaaaatggtgttttctacagaatattattattaattttattttctgaagtgatgtgaatttttcttttaagtggtataagattttaatattataaattttatctaatagacaagcacatattagataaggtggacattcaaaagtcatcaatattaatgattaaaaaaagctaattaggatttttaccccctgaactttgacatgtac

SEQ ID NO: 125187 - DNA, 1629 bp, Cannabis sativa
acatagactagaaaaatgatgagagatgaacccgatccatgaacaaatagagaagtatcagacttagaagctttgaatcctttctgtaataagttgatcctaagtgtgtcattccaagctcgaggagcttgtttgaggccataaagtgccttgtgtaggaggcagacatgatcgggtttatcttggtcaataaagtcttgtggttgagtcatgaagacagtctcagttagcactccattaaggaatggattgctgacatctagctgagttacaacccagttggaagtcacagccaaggataaaatagtacgaactgtaactggcttcacaacaggagagaaggtctcctcataatcaatccctggagcttgtagataccctctggcaactaattgggatttgaatctacccaatgaaccattagcattcaatttgattctatgtacccacttgttatcaataatgtgcatatctgatgttctaagaactaaggtccatgtacctgcctttttgagtgcatgaaactcagtttgtatggagtgtagccatctgggatctttgagagcagcctgtaaagatttaggttcagatggcagcaatgattcaggcagaggatgtttggtggccaagtatgcttttggtttaacaataccactcttggaccttgtaaccatgggatgagtgtttggagcattcttggtggctgaggcaatggtagaggataaggttggtggtgctatgtcagtatagatttttgtcatgacagtaggaagaatagggattgtgtttggttcagcaacataggtgttattttctggtatactgggcagagtgggggctgagttttctggtatactgggcagactggttggtgaattttctggtatactgggcaaggtgtgtagtgtagtttcttgtatgtggggaaaaggttgtgtttggccagtagaaggtgccatagcctcaggaacaatgttgggaaacacagcagaaccatcattagagcaaggtttagtaaaaaaaacttgcagtaggagtaacaggagtaaaggttgcaggagttacctctgtgatgttgctgatgtgagacatgccacggtatagaagttcattaaagattacatttctggctatgaatattctcccattcttgttttcacacaagtatcctttatgaattggagagtaccccaggaataaacattgctcagacctgaaatctagcttatgagaattgtaaggtcttaaatgaggccaacaagcacaaccaaagggttttaggatagagtagtcaggtttggtgttaaacaagcattcatatggacttaaattgtcaagaacatgtgtgggtaacctgtttatggtgaatgtggcacattggaaggcatgccaccaatatgggagatctaagttggcttgtgcaagcaaggtaagtcctgtttcagtaatgtgtcgatgctttcgttcagcacgaacattctgttggtgtgtatgaggacaaggatgggaaaataaaatgccttgatcagctaggaatctagcaaagggcttgtacttgttgctataattttaaacactacgcaagtatacgcaatcaagaagtaaatctcacacaggtgaggtcgatcc

SEQ ID NO: 125188 - DNA, 1470 bp, Cannabis sativa
tggatgtatgtaacattagctaatgctcatcttttctattcatttaaactaacaaggttgatttgggttgctttaatatagccttttagccattaggggaaaaaggtaccggtcatgtgctctaataagttaccaaaacttgataactgtattcaaatgtttttttttctaacagagacggcgtctaataacgcatgcaaatgcaaagagcaaaagtgaaaagtttcctcctcctcaccaagatggaacactcggctatccattgggttcatcgcatcacattgatcctgtttttgatccccctgatgtcccattcagctccaccaacttctcttattcaaaagcacccatccaaacttggtctggaccgttggtcgactctgctccaaggagaaagaaacactcaactggtgattcacattcacactcaaaatcatcaaaaagagactcaagaagataagaacactgcttgggccgaagaaaggtaaataaattcagcgatttctcaatactattcatgggctgcaaatgctgctcgttgttaagtggtcttaaatcggatccgggaaaaccagttaaagtatcatggagaggtaatatatcttgtatttcagtattctcatttctccttctactatttttgtatcgtgagaattttcttttacatatgtatattttttctttagttctctatctgtgttaaagaacactctttatctagattagttgaattttcatcatatttgttttgagaactcaattgttcagtgtcatatctaaattcttttatggttcaatattaatatttagccatatactttgggggctcaataaagtactgttgaattcttctccttttcatctaacatgaaattgttttttaatttaattacttatttcatagtctctaagaacaccatgcttgagtagccaaacacattagctcattcatgactattcatttcgtgcccataatcactgctgtttatttacattggctaagataaaagttacagacaaggcaatgtaaactctaggaaaagtggagattctatggtaataaagtttgacacaaaatgggaaaaattgactagataaagccaaacttggaaggtcacaacattaaaaggtgtaattgatttgattatggtacgatttgacatttcgttcactaattacattaaaacctttttttttttggaggatatacctttacttttgcatcttcacattcctgtttcggtcggctacgtaaaaaatgtaaagtagggttattgttgtttttcactataaaaaataggcattttgagttctgattacgacatagtaaattatgtagattatttgtagatgacttattagtttatgactacaataaacattacattagaaaaggaaaaaaaaaaaaaagaaggcataatcccaatatttatttttagtggcataagtactcaaagttttaagtttgta

SEQ ID NO: 125189 - DNA, 682 bp, Cannabis sativa
tacaaaataaagtaccgcttgtttagtcaagctatgtcccctagtgtcaaagacagggacataactttgtgagtgtgactcattatattagattccatgacttgacttagtaacaccaccttaaagatggatatcgcactaaaatacatcactttgtcctatcctcaaaagaaaatcagccttgacaatgtatggttcaacactttccttaggagaacaaaaataaagttgtctcgaggccctccccataccttcggtgttcgactaataatggagaccatagatttcataacagatgacaaccctctctcactattttaaaacgtgtttatcattattaagactatttcaaaaaaaaaaatagattttaatatttaaaattaaccacttgtaatacattaattaaattactatattataagtctgaaaataatctaattaattccatacacatagattttcaaaaaaataccatttttgaaaaacattagttaattctgtaactaacttttagagaaagtcaattagtgtgaattaccaagttaaactatttgactcaacctagtattttatgttattgatttctctaaatgcaatacacataaaatatataggacaatcctaaataataatgtttctaatatgagatgcatgattagccaatttaatagttctagcttgt

SEQ ID NO: 125190 - DNA, 2170 bp, Cannabis sativa
  modified_base (1426)..(1431): a, c, t, g, unknown or other
tattgtgtcatttaacaaaacagaagatctaattagtaacttttgcaaaacacaatatccaaaataatatttacctttctttttaaaattataagttaattcattattttatttttataataatataactgaatattgtgttcacatttacaaaaataaaattattaccaaaagtaaaaacaaaaaatattctcttcttcaattaaatatgacatcctcttccattaatttcatcaaaattgaaaatcacgctttattagtgaaaaatgaaagttttaatcaatttttttttaaaaaaaaatgccttgtctttcagaaataattagcatttttaattttatttttgtaaaaattaatttatatcttaaaatcatattcattcttatttatcttttgtaagattgtttatttggtaaattaacacttatcaagaattaaaaaaaaaaaacaagaattgaagtgttcgaatggctgaatcaaacaataaacataaatcagaaaacaattgtgaaataaactaaatgaaatagagataagatatccatcaccctttttgtggtgactaattcactctttgaaaattttatttaagcttcaataatgaaggaatacagagttattctcatcaacaatatagtgtcttgcgccttacaaattaactcatgtgagacagatgtgatcaaacacacacatcttctttaacaatcctcctcactcattacaaacataattatcatttaaattcttctctaagtcgtcattaaaaaagtaatacatagccttatatataagcaactcaatataagagttaactgaaatttaagtaataagctgactcgacaaacctactccatctgaggtcaaaaaataaactcttaaatctaacccaaataaagttcaatatttttcaaacaaagtacattgttaggtcttctcaaatgggttaagaactgcaaacattcgagactttgaagataagtatacaaagttggactcaatgttactaagtatatatttgatttggaatgcttgaaataaagttttgtggagtcaaaaagtttatcctataaatacaattgtatataacattaaaagagaaattagtgaaagattttcttagatatatagtgagaaaattagttgtatatagatagaaattggctccaccatttagttactatggccactgttgcctaattcgatgtattgatgccaaattggcttgtgtattagaatcttattttatagggataatacaaaaaaacattattccaactatgaatttacttgaaaaaaaccatctaacttcatattttacggtaaaaccccctaactatcaatagacttgcaaaaaaccatccaacctcatattttggtgagaaaaccctccaaagtactatttcatttacatttttaaggtgtcgtnnnnnnagcctcgttaagtcctaattttgtccacgtggcaatgacaggtcactaaaaaattatcctgcgttgccatattttacaaaataaaaattaaaatgagtaattaaaataaaaataaaaaactgtaagagtaatttgcggcaaatcccccccaactatctttttacttgcaaaaaaccatccaatattaaagttttttagatggtttttagcaagtaaattgatagttgagggaattttgctgtaaattactctaaaatatatacacgcatcatgtcttttaatgtttatagttgaagtttagtgcagtgctgaatattttttttttttttttgagaaatcaatatcattgtattgcataaattcaaatttacaacttaacagcaccattacgacttttataatctatacaacttgtagaatctgaaaaaattaattgtgttgtaaatttacaattgctcaaaccattccaagtctttttaatttcatttttttaggcaaaattgataaaattctaactttcacctcatctcgaatgcagagcattaatatgggtaacgataggggtgttcgaggattggtttggtctcgacttttatagtttttgaaccaaaccagtataacggttttttgaatattaaaaaccaagcaaaccaataaaattctcaaaccaaactaaaccattaagaacggtttggtttggttcgaaaccatggtttaagtagaatttataattattcat

SEQ ID NO: 125191 - DNA, 1375 bp, Cannabis sativa
tatgtgtttagttcatcgttttagaagttcaatattaagttgttaaatcaacatacttgtatgtagatctaagatcctggataaatataataccaacagttgtaaccacaatggtggcctagctgctccttcttcgtctcaaggagattgctctaatcagaatgtttccacacttatgatggattgtgatgattcttctgatgatccagcggaggttgtgttgcaaccctgcacttcgccatgaaaatcattagttggaacgctagggggctggggaatcccaatgcgttcaaacacttgaggcttcttattcgtcagcagtcaccccgggttctttttctcatggaaactcgtcttggtagtaattcaatcgctcgttttagacaatctttagattttagccatggtctcgaatctccacgggtgggattaagtggtggattaatgttgctctggaaagataatattaatgtttcactcaatatttatgggtctacatactttgattgttgtttatctgttgatgatggccctcttttccatctaactgccttctatggtgctcctgcaacttctagcagagctctttcttagactcttcttaccagattacatgatattgcaccttctttaccatggattctcgttggtgatttcaatgaagtcttatctcaaagtgataagtcgggtggccctttacgtaatgaggcacaattgattgctttccgttcaaccttggatcgttgtttgctcaaagaattaccatatagtggggattgattcacatggatcaaaaacataaatgcaatcaaaactataaaggaaagattagattgggtgttcactaaccattcatgggattctttttctaaaagtcctgctgtaacacacttggattttttctcattagatcaccgtgccatctctgctactgttacactcttaaactctactgctacatcgacacaaaagcgttctcggtttcgctttgaaaaattgtggttggctgatccagagagtaaggatatcatctctagttgctggtctattgcctcaaacaatgatcccattacaaatatcatccaaaaaatttattgttgtgctaaatcactacaacagcggcacattcgtaagtatgggaatatgaaaaaaaaaaggatttctgatgcccaagcttcggttactgctctcaataatgtcaacttttcttcacctgaatttgctgcctctctaaagcaatcggagtccgttcttgatgatctcttagaataagaacaaatgtgaaattccgtattttaatattcccagtttgattatttaattaagtgattaattaaatgcggaataatgtaactggtactgaaaaacagttttt

SEQ ID NO: 125192 - DNA, 893 bp, Cannabis sativa
tatacagaaacgaaaaataattacaacaacactacttgttcaatgtgttcacatgcttggggatgctctctttggttgtaaattttctaagggtgtatggaaggcttcatgctttaagatggactgtggaagagcacaatcaatgaatctcagtgattacttagttcacttatcaaagatgcattctacaccagatttggaagccatcataagcatgatgtgggctatttgatctgaacggagaaatgtagtgcatggaggttctcatagggacgcttcttccttggcacaatatgcttgcaattacctagacagctactatagagtaagtgcacgaatgagaggactgatattagaaccaacctactcgatttacatcaaattccaactgttgatattccatggcagccactaatgggtaatgactttaagctaaacattgatgcatgcacccacaaaggtgttaagagttggaacagtcatttgagatgacaatgaaaaagtcatcactccaagtcggcgcaaggatgtttttaagctcatgagattgaagcaaaggcgacgttttatagtctgaattgggtatctcaactacaaataccagtgacttatattgaaacggatgccttacgacttgctattgccttgcacaccccaacctctgaattatcctgttttcatgatttaattttagatgcaacaaagctgctcatgattgtttatgatttggcaaaacatactctaggattagacagtgatatgatttggttaaaaggatatttcctctctaattttatttgttgttataaataaactacgaaacggctcgcgcttcacgtgggattatttataatttttttaaatgggaaatttgacattatatacttaaaaaa

SEQ ID NO: 125193 - DNA, 628 bp, Cannabis sativa
  modified_base (588)..(593): a, c, t, g, unknown or other
gaccataatgtcagcctatactcaatatgttggtcatactccagccatactaatgtgacagcatcaatcagtatctgagccaaacatacatctatcggtattcaatatatctctacgtatactgatatattgtatttattcaaaagagatcttgtggcttgtttaaatcaaagatgatcaatctcgttcctgacaatcaccttagaatattaagttactcttatctagtcatattataatatttgtgtgtctatagttgattgtactcattgtctcgatctatgtgtgccaatttttgcacctatttacaccattgattatataattaactaaaaggaatactatgttatgaatatgtgttttgagaagtagattaatacaacctcttggactaaaaaataaataaatgttaagttactattacctagtaatattactatatatgttagtttatacttgttgctcccatttatttgtgcaaattcttgcattgctttacaacatggttcattgtagcacaaaagatgagtgatcaagatcaggagattttaattcaaagtaagatatctgttggaaatattttaccannnnnnagatttactaccaagtatatttcattaacatccta

SEQ ID NO: 125194 - DNA, 1756 bp, Cannabis sativa
tgagacgccaaggaggcagccccaaattatatgtattcttatttgctaattactctattcaaattcatctatttgcaatcgctttaattgactcagtgtcgttggctattttagtgctctcgttgagagcgagaagaacactcttgatttgactttcaccaaatcgatcaaagaaggttgtaaccacaaggaggaatcaaactacagatttgttgacccaacagttacaaatccaagtgtgtggactcctacaaaccaaagggatcctatggtgaccaatcccatgccttcacatgttcctccaacgtcaagactaggagtaacaacccatagaactagtactactccaagcacacaaaacattggaaccaccagcaccaactatgctggagaaactgactcgagtatcagagagcttcaatttcaatgtaatcttatttattatcgataatgattagaaatcatatcttaaccttatcatgtactttattcatatatttattttatgattatacatttaatatataaattctattaaatcctaaacatataattattcattatttaaatcatgcatcttaaataatttctaaagtacatttatgttgacattaaaatattaaaaaaaaattatatctaatttatattgttcaaagaatatgccctaattgctctagactttatattgttcatgtttttattaaaactttccttattttattggcttttttagcaatttatacattttaaacaaaataagattttaattatatgcctagtatatatatatatatagatatattgaacaagcatatgtatttattcatgtgaaggtatacaatatgtttccacattataataacatggttagacatatatcactacaaaaaatctaatgtttagtcacaacaaaatttgagactaaaagtgaaaaaattgtgattaattataaattattatttttattatgttgtgactaaaaagtttgtagctaaaggtattagtcgcaaaaattacattatgttctaactaaatgtattttagtcacaatatataatgaccaaaacaaaattagtgatgacttgtaactaaatactatgttttagtcacaagtaatattaatttgttatatttaatcagaaaaaaattatgttgtgactaaaaaattatcactaaaagtaacagttttttgtagtgtatcctaattataaaagtactaaagaggtacttttttattacaattgaaaaacaaacaacacacatacatattacacatacaaatataataatttatcatcaagacctagtgacaatattgatgataatggtgtagaagtagtagttatagaagttgttttagggctcaaatattttgaacccatagtagtaccactgcaacaatttgggtaacaacaaggttcgaaaagggcacattatcaccaacatttgggcgaaagctttcatctttcacacatttgttgttgacactcagaaatcccacacagataagcccttcgttactctaatcccatagcaccaccccatattattatccattgtcatcatcaccaccacaaatactacctttaacatcttcttcatcatcataataattcatagatcaaaatgttaattaattagcgatggagacacctacctacatacttatcatgttcatgtaatttcccccctcactctttcccattctcttatctcttatggaccatacaatataaaaaagtgaaaattacatgaa

SEQ ID NO: 125195 - DNA, 1632 bp, Cannabis sativa
acataatattgtgattattacatgcatataattcccaattatattatatatgtaataatatatataacatatcacaattttaatcttaaacattatatcatataataaataatataacacatagtctcaatttgttgtatctcatgtatgtttggtttaattgttaatgattattattgcattaaatgtcttcaaggttaattcatacataatataggtatcctatcgatatgatattatgtacgatttaattggttaattatgtgtgatagacaatattatagtggttgattatattgtccaagtgggagaatgttagaattattattgtagactaatataattataagaataatttcataaccatgcaatcactaactatttgtcaataatcataatgagatgctttacactaactaattgtattacagacatataagagcacccttgtgactataattagcccattaatttatagtctagcattaattaaaccatataaatcctattagccaataacctcttaaggttagaggggtgtgatatgtatttgatagaagatgatttaattaatgctattaagaatgaataaggaggattgctctacattggcctctcttcaagattcaccattgaacttctgtgcattcatcacattggaagattagaagtattaaatgactcaaatagataacatgagtttaagaggtatgtttttattgcccattaatttcctaaataaaatattggatctttgttgaagacgatgagtattgatgagttatatatatgtaaatgtatatgtgtgctaaatattgataatgcctgctttgtgtgtaccgtgtcttttcaacaaatttaagtgagtttattttatttctacaagtagtaatcaagttttcattagcttaagtgtgattcattcaaaatgatacgtacactcatcgttgcacattatatttaaactcttccttttctttgcttttgttcgtttaggaaagtgcttaattggctttttataagttgaatttaatatttcatgtatttcagcactgttctgaactagtgacttgacttatgtgtagttctttttatttttattttatctaaagtgtgtttgttagcatactattaagatagaaataaaattccagagcacaattggcctcacattttcatagaattcttaataggagagaaaacagagaaaattgattttatattgattgattgaataaaggcattacatagaatatttatagtgtcataagtcggttaagactaactacaacaacaataactaacttccctaatatgtggcaactaacataacacatcctaaccaattaatctaataggccccctcaagatggatggtagagattgttgacattcatcttggataaaatgttgcggaagtgagcggggaggagtggcttggtgaggatgtatgcaatgttggacttggaagtgacatggttcaattttatgatgcctttgttgactttttctcggataagatgactgtcgatctccacatgtttggtgcgctcgtggtagacaggattttcagaaatgtgtatggttgcattgttgtcacaaaaaagtatggatggaagtttatgttgaatg

SEQ ID NO: 125196 - DNA, 2922 bp, Cannabis sativa
  modified_base (2851)..(2852): a, c, t, g, unknown or other
cgctcttccgatctttctgatctttattaataagtaaatctgattatattgaaacgggttttatttagggcacaaaacccaacagggacaacaatagggtaatgggagaaacttacttcaatctatttgaagaagtctttggccaacaatatctatttgaagaagaagctataaaccttgaagatggatgatacagagaatctcagaagccatcttgatgaattcaatagaatcatccttgatctcagcaacatacgtgctaagattaaggatgaggattaagggattctattgttaacatttctaccaaaatgttatgagtattttgtggacaccatggtatatgggaaagaaaccttgacaatgtcagaggttaaagctactttgaattcaaaagaagcaagaggaaagactggacagcaatggtgtgggaatgtttgcaagaaaaaaattagaatcaagagatactaagaatggagatcacaagtcaaacaacaaaaggtaaccattccaagggcagtaccaatggtcaaagaccaagattgagttctagcacaaattcaaaggtaggaaaataatgttattattctaagaaggatggtcattttagagatgagtagagctctcaaagtaaagtttggtaaagaaaagagggattttagagatgcaggttgtgttcttgatggatatgagtctgctaatgccctggttgcatcaagtcaagccactggtgatgagtgaattttggactcagattgttcttttcatatgactcctaactaacatttttttgcagctttcaggaacaagatagtgactcggtcttgttaggtgataacaaatcctgcaagattgcaggaattagtttagtactaatcaaaatgcacaatgaatcagaaagaaccattagagatgtgaggtatgtccctgatctcaaaagaaatttgttatctattggtgctgtaacacttaaaggctgcaacatcaagattgatagttaacttagagttctgaaagactctacagctgtgatgaaaggaaatctcaaaaatggaattaactacgtagttggtagaacaataattggtaaggctgaaacagcagtaaaaaatgaaggaatggatcagataaagctttggcatatgaggcttggacatgtcagtaagagaggtctacatgagcttgagaaacaaggcatacgtaaaggtaaacttggtaagaaagtagacttttgtgaaaactgtgtttatggtaaaagctacaggttgaaatttacgaaagttacgcacacaacaaaaagaaaaattagactaccttcattctcatctttggggtgcatccagaacaaaaataattggtggagcaagctattttctaagtatagttgatgactatacaagaaaggtttaggttttcttacttagtagaaaaaatgactcatttaacacctttgtcaattggaaaactttgatagaaaaccagacaaacaagaaaattaaaatattgagaactgataatggcttggggttttgttcttatgagttcaacaagtactgtcaacaaactggaataagaaggcacaaaattgttatcaagacacctcaacagaactgaatagctgagagaatgaatagaaccttgattgaaagagtgagatgtatggagacagctactggttttggaaaatagttttagggagaagccttgaaaactgcttgctatctcatcaacaggtgtccctctacatcaatgaatttcaaacaccacaagaacagtggacaggccatgcgccaggagttgatcactttagagtttttgggtgcactgcatatgcacacattagacaagataagctagagccatgggctctaaaatattacttcattggatatctagagggggtaaaagggtacaagctatggtgtttagaagatggtttccaaaaccgaattataagcatggatgtgatttttaatgagaataaaatgcctatgaaagaaacaaacatagaaagaaagactcagaccaaagtcacagaaagtgtgcaggttaaacttgaagagactcaagatgatgacaggcatggtgaaacagattaggaacaggttgaaagtgatgaaaaagatcgaagaggatctcaagggtatcaacttgtcagagacaaagaaaggagggtgataaaacctctaaacagatttagttttatagattgtactgcatttgctcttgcttctgcaaaggaagtagaatgctcagttccaagcacctactatgaagctgtcaactacaagagtatgaccaaatggctttctgctattgatgaagaaatgacatcactcaagaaaaataagatctgaaagactattacaaggccaacaagacagaaactaattgactgcaaatagattttcaaggaaaaggaaggactgtcagatgaagagatcatgtacaaagcaaggttagtagtaaaagattttagtcaaagagaaggtatagatttcaatgacatattctctccaatggtaaaatagacctccattagaatcatgatggtaaaagtagcaaaatttgatctagaaatatatcaaatggatgtaaaaacaactttcttgtatggaaagcttgaagaagaaatctacatggctgaaccaaatggttataagaataacaagccaaaccaagtatgcattctcacgaagtctatatacgggcttaagcaagcaccttgataatggaatctaagattccatgaattcatgatagaaactgattactcaagaagcaactatgatccttgtgtgtattataacagcacaccaaactggttactactgtaacgccctaaataatnnggcacgctacccaaaatacttatgaaaccctaatcccctaactgggattactaattaaaatagcgcagaa

SEQ ID NO: 125197 - DNA, 1187 bp, Cannabis sativa
  modified_base (27)..(75): a, c, t, g, unknown or other
aacaatactaataataataataataannnnnnnnnnnnnnnnnnnnnnnnnnnnnnnnnnnnnnnnnnnnnnnnnaataataataataataactgcttaaaaatcaaataactgttaacagttttaaacgatatatataaataatgatattagtaatttaaatttaatttctaaataaagaaaagaaaacaatataacataaaaaaaaatataaaaaacggacatcttcaaaactaccaaaataattgctatcccaatatcccacaattaacccctaagaacggcccttagaatgcatggccatggctaccgctgatcatagaaaacataaaaattcttgaaaccaaagaaaattttaaatataatgaacaaagagatttaaatacaattcacaatttattaacagacatatatgttcattcaaatcctaaaccatataaaaaaatcaacacagcataaataaaatgagaaaacttatcaatagtgaaacttatcatcctgaagctttctcagaaaccaaaagcacatcattgattccacttctagagaattgccggccagagagagatcaattttctgtcacgcaaacagacaaatattactaaaaccaaatcaattcaaatcaaggtaatattagtcaataaaaaatagagagacttatctgataaataagttcggtgaaacaaacataacagatatattaggaaaccatcgcaccacccgaccatcgcaagcacccatgggctttgaacgataagagaagtcttagcaccatgattagcaagaacaagagaaatctccataccagaattaatcattgaaaatgtcaatagtatcaccatgggagacgtggtgccaccgaaaggacttccatgacagtttgcttgtaaatgaaaaagtaaccatctgagggaagagcaaaatgaacccctctctgtctaatcttgtccaactccttcctcagttccaccacatcatcacatgggctcatcttcacgataagcttcctactctctgtgttcatttttttatacacaataatatatactcgttagaaaaaaaaatatattaactatatattagaaattgatacacatttctacaatactaaattaagtctagaattttctacacatttgtagaaaaacatactctaaacttttagataattgtagaataatttagaa

SEQ ID NO: 125198 - DNA, 514 bp, Cannabis sativa
aaaatagaatagtttgggtcacaaaataaaaaacataataataatgataatatataattttaaagatgcaacaacacgttaacttcatataaattataagttatgagattattatgtttcttgattgtggaaagttttctttgattaatcttatacatgcatgcatcaatcaagtagaatccagtaggggagctttggtgggagagaaattgaagggctgattgatgggtggcagtctccacgcgctggagcagaggacaggaaatgggagcagctgcagccaatagatggatgccatgtggcgcacgtgtggagctgaagggaaggaaggggaagcggttgaccaatcagaatccgccaagtgtcgcatgtgctgaagaagaaacaagcgccaagtgggcgctgactgcgctggaaaaccaattgaatagcgccaactagcgctgatgaggcaggcggggtccaaaagagaactaggcctattgggctgggcttctctttttctttctcttaa

SEQ ID NO: 125199 - DNA, 1177 bp, Cannabis sativa
  modified_base (27)..(28): a, c, t, g, unknown or other
actaatcagattgtaaagagttttatnnagggcataaaacccaacaattatgccttcacatcagttattacaacatatggcgtcggttattaagatataaccgacaccatagagtatatatgacgtcaattattatgaaataactgacgccatatgtacactatagcgtcgattatgttctaccctgaagcataacttggatcatcgtcggtagcgaatttcactaaaactaacgctgaaaggccttaaaaactgcctctaaagctcagatttatagtagtgccctgatcgagaaacgttatcagagccaccaccataacgaacctttcgtcctcctccctccaccattggtccaccaccatcgcctctcactctgtcgaagatttgtgaaattctttcttttctttttcaacttatctttttcgtctcatatatttttttgttcgtgaatttttttcttcaagtttttctttttggctttttgtatgtattgttttgaatttggatcgtatttgtgaaatttatgttagggtttttgttaactttggttactactttaggttttgaatcacactgattggtgttgaatttggattgaaatcttcgaatttatggtttaatcttaaaatttgagaacttaataatttaaaaatggttatagtgtaacagattgtgcaaaattttgttggcaattcttcttactattgtcgatggttttccaatgtgagtaaaacgttctaccgatgattttgcaccaatgcatattataccgagttttgtaatggtcgaataggcgtggatcttttatttcaagattaatagttctcggattgcaatattaatccataaatttgattatactatatgcgactgtacgattttcaaattagatttcaatctaagaactgtcaaaatttctttatataaacatatcattttcatatgatttgataaaatcaattaattgtgttgtattactgatcatcatacatatattttatgatgaaatacgtattgatcatcatatatacatataaatagatgcagttatgtatggatgactggtcctgtattctttttattttttttttctatttaagtgatgagagattaagctaaatataatattttttgtgcccaacttaatagttacttttctttaagatgaattagttat

SEQ ID NO: 125200 - DNA, 783 bp, Cannabis sativa
  modified_base (757)..(757): a, c, t, g, unknown or other
tctctctctctctctctcatgtggatctatccacattagtgcatgagaaacacgacactgcacgaccatgacatactccacaccgtcccacacagactaagccacaattttttttgttcttcttcaacaacaaaggacgggtaagcatctcctcctctctatctctctccgtcgatctctctcttcttctctctaattttttaatttttttagatacaccatggttatgggttttgttgcttgctctcggtggcttatggagtttcagagatcaatagatgtttcacttttattttaattgtttgcatattttatttttgtgtatacgtaatctagtttatgtaattatgatttttgtgtatgtatattgatttcacattattgaattttgtgtatatagatatatatattagtttgtagttctgatttttattcaattttatagtttatgtacttcaattcgtgtttggtaattcgaaaagagatctaggctcgggattgttcgagttcccaaatctttatttttatttttgtttctgtagtgtcggttttgaaccgacatatattgtataatttatttatattacgtctatttaaagttgctggtactatttaatacgtttagttacaaaacaacataatagagtaaatatttgtgtcccccatatatacgtcagttacacaaactaacacagctattatatacgtcatttaaaaaagagtaatttgcggtaaaaccccccaactatcaatttanttgcaaaaaaccatccaacctcatat

SEQ ID NO: 125201 - DNA, 808 bp, Cannabis sativa
tagtatatataaaaaaaggctaattacgttaaaaaaaaaggctaattagttttttgctccctaactatggcatataccaaatcatgcccccaaacttttgagaccgttaaaaatttccctccaactattgaggatgttgaattcaaggacttccgtccaattttattgatggaagtctgacatggaagttcaagtggcatgatttgatatatgtcaaagtttcgaggacatgatttgatacatattaaagttcggggagcatgatttgatacatatcaaagttcaggggtacgatttggtataagacaataatcattttagtaaaaataaatgaaattgaacagaaatccttgaatctaacaatctcaatagttcgaaggaaattttaacggtctaaaaagttcaagaaacatgatttgatatatgtcaaaatttagagtgtcaaattcctaattagccaaaaaataattggttaactatgttttccaaatttatatgtttataatgaaataagttattatttgtaatgaaagatgttacatttatttgaaccacttgaggcaagctcaagtggtcataagtgggtgtgtaagtgttggaggtcctgagttcgagtttataatatataaacgcttaaatcaaaaaaaaaaaaagttacatttatttgtttatttgtaagtgtgctaattttaatactatgtaatttctctttatttaatttgttattttttttttctttgttgatgtttattatgctttccagcgggaattaaaactacaaagcataataagtttttttttttttttt

SEQ ID NO: 125202 - DNA, 2973 bp, Cannabis sativa
agtttcggagcaacctcacagtgaggagccctatccattgcttgaaccagataagctgatttagacaagaaacagcccttactttcgaatatccgataccgtttctcggtcaaaggtatctcgaagtttttgagtgtcccactgcccattacttaacaaaaggtcagccacacacttaatgttggatgagtcacccccactcggtttcggacagaagcctttacgatgcggaatccagggatcctcccagatcttagtattctcaccattgactaccaacttgcaagccccttttctcaatatggaattttccttcacgacacttttccagaaccaagaatctgaatctttatacctgcaactaagaaagtctttccctttgagatatttggacataagaactctacagcacagagattggcttccattgaggatactccatccccatttagccataaaggcctgattcatctcttttattttccggaatccaagaccacccagagatttaggaagacaaagtttatcccaagcctttagatggatcccatgatttcctctctcgaatccccaccaaaaatctttaaccaaaccatcaatcttatttaccattcggattgagagtttcgtggtttgcatagcatacataggcatagacaagcccactgactttatgagagtagctcgaccagctttggataaagtttttgctttccatccctgaagctttgtcgtgaggttgtcaagaatgaaattgaaatcagcatctttctgcctacatctaaacaggggcaaccccaaatatttaatacaaccttcagggtaatcaattcccaaagcctccttaatttccccccgtaagcttaacggggtgtttttactaaagaaaatagacgttttgagcttattcaccttttggccagaccacgctcaaaaattctctaaacatgtccagaaaccattcacctctaataaatttgctcgccccaccagaattagatcgtctgcaaagaaaatatgggagagaaccggacctcctctactaagtttaattccctgaatgaccccctgatcaagggcatcatgaaataatcttaaaagcacttcagctgcccaaataacaagataaggggagagggagtcgccttgccgaagcccacaagaaggattaactctcccaacttgccccccattgaggcagatatttagcgtggtagtggatatacactgcgagatccaaaggcggaattttagggggattccatagcaatccaaagcatgatcaataaatctccagctcaacttatcataagctttgaccaggtcaatttttattgcgaaaaaaccctccttgcctctctttctgttgaatgagtggataatttcctggacaatgacattattatcatggatattcctaccaggttcaaatgcatcttgagttggacatatgagagaaggaagtaaaggttttatcctattcgcaataattttggagattactttgtacaccacattgcgcagagagaagggtctaaagtggttggttcgagtcggattttggaccttagggataagaacaacattcgtggcatttatacctctatgcatatttccagaaacaaaaaaatcagagaccgcatcacagaagttagctccaacagactcccagtagtgtttatagaatagcacagacataccatcagggcccggggccttatggttagacattgcaaaaagagctcttttaatttcattagtactaggacagttaacaaggacatccgagtcttcctgagagattttctgttgaaataagtgagcacagttgtactccacaccaagatcagatccagcaaagatacccttaaagtactcagtgaattcctggccaataggccctcgtccagaaatccagacattatctttgttcaagatactctctatggcatttcttctacctttaatagcagccaagaggaagaaaaacttagagcacttatctccatctttgaggcaagacactctggctctttgcttccaatagatcgcttttctttcccaagattcgttcaaagcacgacggatgtcacgttcttgattccaatcccgggatccagccgggaggctctgaatacaattgagcttctgttcaagctcttttatgatcacatccaacttttcgaactgggaacggttccaattaagaagagccaccctggtagcaccaatcttcttgaaaatacgagcaggggcccaaacatggcttaccgatttccaagcatgagctactactagattacttcgagcatcacgggtccaaccttcttcaaatttaaaacatctcttgaatttgggatccaaacccccggagaggagacaaagcggcctatggtccgagttgctggtttggtcagagcagagaatagctcagggaaataaattaatccaagcccccactaatcctctatccagcgctgatttcacatggtgcctcccagggcgatggttatcccaagtcagtttgtccccttggataggcatattgataaggcctctactctcaataagattagaaatgatcggaatgaagggatccaggccagaagagccctctctttcagagtcactaaggacaaaattggtatcacccaaaataagccaaggcccgccaaatcggtcgcctattttcaaaaactcagaccacaactttttctttccatgcagataggggggccataaaacacacaaaagatgccacgggaacgagggaggatccgagtaaacaagccccgaaatatgattactcgagcaagaaatacattcaaaactaaagcccgacttccaagccaaaataataccacccgccgtaccaataggaggaacacaaatgttaaagtaaaagtgtaaagattttaggatacgtaccagaggattagcatccactttgagctcggttagaaaaacaaaatc

SEQ ID NO: 125203 - DNA, 693 bp, Cannabis sativa
atatatatatgtagtaacaaagctaattaagcttggaaaacaaagaaaattgaagtacatatcaacgaggtattattctctccctagtcttcataatataattgaagtaatatatgtatttattttccaatttaagtcataatccatttttttattttcctatttattggttattttcaatcatagtttttactttaataaagagtttccatttttttctatcttctttttcctttctctttttgaatttttttgaatgtcttaatagttaaaatgcattttatttacatgtatttttttagaagatgacatagaacaaaaaaattaatataaattaaaaatattattatatgttaattatttttctttcataagtttttagggtatctattaaattttgggatgttaataatggggcgcgattatatataaatatattttttatgtattatatgatttatatttatatacacgtgaataatttttgatcaatttaattgttttaatacgatgtgttgttattgttattaattaatgtatagttataataataaatttcagttttcaaaaaattctaaataatttaagtaactaatgacacatttactatacagtattcagaatcggaataaattaaaggagaaatgtaacggaataaatgaaaaataatcggaatcaatatttgtaatatgt

SEQ ID NO: 125204 - DNA, 2558 bp, Cannabis sativa
agatcctggtaaaataacttccaacagatttcatatcttgatacatcttagttgttttcgagtgtgatgaatatggcgtggtatgagactcatctagaatctcaagtttgatactatcatcagctggaacacaaaccctacctttatatctcaataaccaatctgatgaaattgaaaaatcctttattgatccagcttcaaccttttctttatactcttgtaatactagataactttgttgggttgtcttgattctctctaaaaaatcagattgtaatgtaatgttagctaattttcccaattacaaactcaattcttgctctagtcatatcctcagccaattccggtgagatcttcttcatttcatatacttgccccagacttttttgacttagagcatccgctaccacatttgctttcccaggatggtagaggatctcacagtcatagtctttaaccaattccaactatcatcgctgcctcatattcaaatctttttgagtgaaaaattatttgaggattttgtgatccgtgtagatttcacacttttcgctatacaggtaatgacaccaaactttcaaagttaaaaccactgctgccaattcaatatcgtgtgtgggataccgctactcatacgccttcaattatctaaacgcataagcaataactttaccagaatgccttaaaatgcaacctaacccttgtttcgaagcatcacagcaaatcatgaatttctcatcactgattgtcaaggttagtactggtgcagtaattagccttagcttcaactcttggaagctattttcacacttgtcagtccaaacaaatttacagtttatttgagttaattacgttaagggggcaaaaatcttggcaaacccttcaatgaatcttttgtagtatcttgctaatcccataaaacttctaacttcagtagcaaacttgggttgaggccaatcctgaactgcttcaattttcaccgggtccaccagaatgtcattcttgttcacaacatgccctaagaaacttacttagtgcggccaaaactcacatttcttaaactttttaatttttgggtggattttacacttagtttggtgcttcatgtgtttttagagcataatttagagttttggatgtgatttggagctttgaaattttgctagatttttaattgaattttactgcagcgaaattgggcatgaacaaaagacttttgttgttgatttgaagaagttcgtctgtcgcagtaattttctagcaaaagtggtacaagttaaaggagcaatcaacaatatttttgttgaatttttgtgaaaatattgctacaataggcgtaagttgggattctttgcaagctgtgaaggaatttttagacaagaaaataaaaaaaaagcaaaaccaaatcataatttctcaaataatatcctaacccaaacaatctcaaatacctcaaatttccttttctcataataccctattttcctatcttcttccttttccgtcctaaccaccatagccacctcgtctctaccttctcctcgcatgaaccacgactactatgaccaccatatacccttctccacctccatttgccaaaaaccccattatcagaccccaatcacatttttcctctcttctttccccaccatcaccaaacccagaaatcaactagcctagaaaaccctccgcccactttactctcatctcatcatcattttcaacttctcttcacccgaaccacaacctcatcaccatcttcgcctgaaccaagctgcaccagtctcaatccacctcgttcatcatcaccatctcattaaagttggcaaaaaataataataacatcgtgtatcattttagagaaacaaaaaaaattaaatcatggctagaaaatagaggagttaaaaataaataaataataattctatatgcgctacttaatgttaaccaaataaactacaacaaatcattaccatcagattaaaaatcaaaggtttaaaaaatatttttactggtgagaactctaagaaaaatcctatatatatgtatgatatttttttaaagtacgatttgagatatttttaggatataaaaatgaatttttaatcttagtttttgattaaaaattgagaaaagagataaataggttttggtgtatatattttcttaattaattattcaattaataattataaacctaataaaatatttataaaatgagagatttaagaagaaagcatataaaagtattttaaattattttagactactatatcattattttatacattaactttatatataaatataaaaataaaataatatatattgtaacacatttatataatcaatcttcttatattatttttacaattgaattcaattatttaatttatcttccctaataaaatctctgacaataaatatggtgtaaaattatttcggaagggaaaatagtattaattaattataattattttttcaaaattaaatgtcaatgcttaaatttttttttttttgaataatagttaaatttcattaaactaaatcatccaaaa

SEQ ID NO: 125205 - DNA, 2462 bp, Cannabis sativa
agggcacaaaacccaacacatggtaatgacagctggactaacagtaatgattcttttttagaaaaacttgaaggtcaaatcagtatacaccattcaaaagtttctaaataaagctcacgattttatcaagctcgaagaagtcgtcaagaaggtcaagggagttgctcaaccaaaagaaacttattacactgcttatttattttctgagtctcgaacagacattgagtaggaaattgaaaaagaatcaactactaatgcctccactgaaatagactcctcttttgtttccatagatgaactcgagcatggagatagtgatggcgattcccctgctatttctcaataagatctcaagcaagaaagtagtgatgaagaatctccctctgcttcctaagacaactcaggagagggagcagtgacgaagattctctctctgtttccaacaattatcaagaataggggagcaacagtgaatatgtgtcctatgagtttttcaaagatagtgaccaagaaagcgacactaaaaactcccaatgagagagggagggacatttatatcatcacataagtgtttgaacctgggacaaatgggttagagtttgctatgactgccacttgaatttagtatcggtaccaaggtgctagaatggggagcatctgagacgaatggggagcatctgggacgataacaaagcaactgttctctaaacatttcgcttcacagtgagattcactttatcttgtgcaagtgaaacaatcgcctctcgaactaacaagatgcgacaaagtcatcttttgattacgaggtccaatactaaggtacgacccctacactattattcgaacatggaattagtgttgtggggatcgcttcagctaagctttgatgaaaaacaaagatctacaactactgcttccttttctttcaacttagctcacagtgatgtaattgactttaatatctaatgaataaaagcgttaagtaaagcttgttggtacttcattattattaatcaagtgtcagcctgggcgttgggtcctcattctagcctccaggttgatctgtttttccctcaaaagtacttgtttcctcgttttgtatgaagacaaagaaatttctcgggatagttatttattttgatgattggaagcgccctaggttgacaaattgtcaacctaggcgctgggtgcctggggtacctggtgctcaaaattgaaagtactccaaatatgattctaatgcctcaaatatattcgtgacatatctaattcatgtataagtgcaaattttgggtcattttcactaagacaatcccgaaaactaaaaccctagccaatttgttaacctaggcgctaggtgaaacactaagcacctgggttggcttctgggagtctatttcgactcctttcaatttttaggcttcaaacttggattgttcttgacttcattactcataatactaaagaatagtgacttaaaaataatttggcgggatccaaatacccattgtggagcctcgaagtgaacctaggcgaagggaaagggacccttccctaagttaactgctatgactcgagttccttcactatgggaatgcaatccttcttaccacatgttaaacattgatgttcatgttattggggctacttttcgtgtaaacacatatattaatccaataatgaacaacattgtgggtgagggatagaaaattcatatttctaattgggtgaattgtattaagggttagaatttcaaatagaataatttgttaaaattaaacaataaaaaaaaaaacaacactgttaaatcgagaatgacatcccacctatccatctctctctctccaaaaaaaatatttaatatcttagggctcgttaggtacaccgtataagagttgtattgtattaaataataaataacactatatttggataaagcaatgtattgtattaattattacgaccaaaaattttaatacaatgtgtgttgtattatttaatacataacaaatggttcgtattagcttgtatgataatatttacaaaggattcgaggtcaacaccaatctccgatctggacttgggacccggactcggacccgaaccccagacctggaccccgatcctagacctggactcagacccagaccttgacatggactcggacccggacctgaacctgaacccggaatccgacccggaccctgacccggacccggacctgtgatctcgatcccagaccctaacctggaccacgacccctacccgaacccagacccaaacccagacctggactcgggacccggacccagaattcgacccgaactcgaacccagacctagacccgaaccctgagccgaactcaaacctcgacccaggacccagacccgggaccaggaaccagattaagtaatactaatacaatacaatacaatgttggaaattattttaccagaatctta

SEQ ID NO: 125206 - DNA, 3415 bp, Cannabis sativa
ataagaattccgtaaaaaaaaaaaaaaatgtttgaagtgtaaaaatgaaaaaaaaaaaaccccttttgtttaatagaaaataataactattatgatagtttcattatcacagttccatatatgcaggttttatgtaatttttttagaaattaacacaaattactgttcaaataatttgttgtaggattatatataggaatgtattcaacacttttcatttttttttcagtaaaagttgtctcagttccgatcgtgccttaccagagcatcaatatttcgtcaaattctcattgtaaacagttttgtatatatgtagtgaaagtttatgttcttatatttcttgtcaagcaaaaactaatggagggtttttctctctctgaacatggcgattggaaactcccctatgctctctttggaagagcctattcaacagaggtgctatgaaagcatggctcaaatggaggatctgctatcccgaacaagcaaactaaccgtcacagatgaggaaggatgggaaatcaatgaggatggggctgaggatataggaaagttgtgtctcattgggcgactatgtactaggaaaccattcacccgttctttactaaagaacatactctgtcggctatgcaatttgggggaacttgactgggatctgaaaatcaagaaaataacagacaaagctctgttcttgatcctctctttcaaacagaacaatacgttagaaaggatcttgggaagaactccttgggttttgaatgctgggttcctgatattagaaagaatgaatggaatacccccggattgggagacgacattgacttcttccaccatctctgggctagtgttgaacttaccaatcaaagcaatcacgaacactaatatgcttcgatttgctggtatggcaggagaagtgatggacatacaagaatcggatatcaatcgtatcacaattaatggattctttaaattcatagtaaagaactccattcaatccaaaatgttcccgggatatttgtttcctcatgaaggacggcgtagatggcttcaattccaatatgatcggttaccctatatgtgcttcaattgtgggaagattgggcatgaattgcaccaatgctcagaaatttgagctactttgacgaaggaaaatggagaagtggctccggcttatggtgcgtggctcaaagtagacatgatggggagaatagaatcaaataacaaaagggagacacatcagacgaaccaaaccaatggccaaggaataaaaaacataccaccatctcgggtgatagaacaaaattccaaagagggagaggatacaattcaacaagcaaaccaaatgaaaggtagcccccttcatactccttacattaataattatcaacaatctattacacacaaagatgaaactattctaaccatcaactctactcctccttataatactcgagatgcggattacatccaaggaactatgaatatcaaccaggaacagaccgaaatgaccatcaggaaaagaatgagagcagccatggggaatgatgcaacaatgagtccaaacataaatagatcttgcaaggccagaatcagtgagaccgaaagtgtggagttgggatcgagcggaatcctctttgatgtccccgtgacctttgatgctgggaaaaacattcagcgggaaaggcagcgggaaaagcgaagaaaatttgtgccaaaattggggaatccttccaagattcaagcaactgagactaaagaatggggtaccagatttgatgctataacaggggaagtttctatgccaaatgattcaacctctgagcagattaatgaagcggcgaactctgcggagcagggtcgctgaggacaatgaattcaattatttggaatgtccaagggcttggcaacccttggacagtgaatgctcttgccacacatgtgaaagactttaatcctggtattgttgtcctctccgaaacgcgttcgaaaagccattaaatggaatcgatccgtattcggttggggtttgaggggtgcttttgtgtagatgccaaaggaaaaagtggggggctggccctcctttggaaggctcctttctcggttcaattaaggtccttcaatgactaccatattgatgcttggatcaatacggaggaggatcttaattggcactttacgggattctatggggatcttgatccttctcaaaggagacactcatggactcttctgaaaaggcttgcaagaaacaactttgggtcgtggatgtgtgggggtgacttcaacgaaatcagaggcattaatgagaaacttggaggaggagggaaaccggggtacctaatgaagaattttaatacaaccattgacaattgtgctcttcgagaactagatgtggaaggcagtaatttcatttggtgtaatggaagggcaacgaatatggtgtttgagcgtcttgatagagtcatggtagataacaattggtggaagatatatgcagtagccaaagtgaaacatttaagtagatggtgttctgatcattgcccgctattggtcacctttaattccatgtcgaatgaggaggagactaaacaaagatggggctcacagttccactacgaaaagtcctgggctgacatggatgaatgtaaacaaatcatcacagaaaattggcaaaatggatgtactagggggtcggctaaagagtttggagagagaatccagctatgtggcaacttactggaacaatggaatcataagcagaggagggacaatcaagccaaaataaaagaattgaaaaaaaatatagaaaagttatcccgagaccaaactcctcatggcttttcttgtctcaaggcaaaagaaagagatatcaatgggtacctggcaaaggaggaaatattttggaaacaacgaagcagagaattatggttggcccatggagatagaaacaccaaatacttccaccaaaaagcatccccgaggcgaaaaaagaatagaatccgtgggatatttgataaatatctgaagtggataagcacaaaggaagaggtagagatgaccatttatgaccactttcaagagcctttttcagccaaagactataagggagatatgattgcctatctccaacgattcgtaccacttaaagttagtagaaatcaaaatgatttcctactttctaagtttactgagttggatataaaaagtgctttgtcccaaattaatgccatgaaggctcctggaattgacggaatgcctagacttttttatgaacaccattggggtgtggtggggaaggatattactaggctatgtctgaatgttctcaataaccacatcgattgcaggcacatcaacaaaacacttctatgtctaattccaaaagtaaagagcccaaaacaagttgctgattttcggc

SEQ ID NO: 125207 - DNA, 2130 bp, Cannabis sativa
  modified_base (1852)..(1855): a, c, t, g, unknown or other
ttgtcaaaaattaagcccagaatcctatttttactattttaaaagatacatgatccattttatcatttaataaaacagagggttaaatcgataacttttgcaaaatatattgtccaaaataatatttacccaataatttattttggtttattattttgttcatagtggtaaaggtaagtagttagcaacacatcaccaaaagtaaaataaaattaaggatttttacacaaagtatcatttttgacccaatcttaatatttattcattcaaaatatatataaatatacatttttataatttttattttcgattttacagtttattttttttcaattacaattttaggaaattcctttaaaataacatagaaacaagtaaataatgacaagtaaattaaaaaaaaaaaggatgaagaagaatatgatggtagaaaccaaataatttggtggagaagctatacttagtagtaattgagtaccttaacagacagaagataaagataaaaaaaaaaaaaaaataataatagtaataatatgtacacaaattacacacaaacttaatataaatttatgtggtaagtaaaaaaaatatcagaactaactgcaattttaataaatcaaatatgttctgtaaagaaaatgtaaacaattaaagtatgccatatctaccttacaaaaaaaaatgccgtatctacaaaaaaactatcataaatatataacaaatatgtaagtggtagttttctcatttcacatctaagggctgaataaaaggcccaattatcaattatatgtactgatctttgcccaaacaatttctgtatttaatttttctttttaaactaaaattttaggtagccagagcatctaacaatataattatttattagaaaaaacactatagttattgggttagattttcatgttgtggatatggagtcttcaacgtatttaacatcaacaattttaaggccggaatatataggaggactaaaaagcagttttttaatttaagaaaaaaaaagaagttttttagaaaaatttaccaaaaatttgaaaaaaaggttacaaaaataattcagcacagaaaaatttcatttttattcaaatctttagtaaaaacaataaaccgttttttttggttgtttcataatttttttttaataagtattttatagtttatttatagttgtattatagttgtcatgaagttattttcctggttgttttatagtttatttatagttgttgtgatgttgatttctaattttttagttattttttttttaatttttgctgaacaaaatgtctttttgtaattttaaaattttgaaagtgtaattttataaataaaaaatttaagtcgtaaaattttaaataaaacataaaaaatagtatttttaaaaatttcccataatatttatattgagaatgttaatggttacatcaaatatattttattcattgaatcactattaaattattgtaattaatttataaattaaataaaaataaattataaatgagttataatacgatactttatattttattttcttataaaatcttaattaagtttaatttgattttacgtcaaaaaaagtttaattttattttaaaaataaattaattataattattaattacttttttataatttattactaaactatatcttttagcaattattttttgacaattaaattattaaatttgcttataacacatataatcttataatttaaaattattacacttaataaccaaagagaaacgattaagtgagcttaggccatctgtacattatcaaagtgtaagctgtgtattttaattaagtatttatatatatatatatnnnnactagtaaaaaattacgtgcgaagcacgtatattaaattttatgctatgtataatctattttatttaaaaatgatataattaataattgaagaaaaatattattagttattaagtgattattattatgtatatctaaatagcaattaaaatcaaataatgagaaacaaaacaaaacaaagcaatagtatattttcaaagcaacagtacaataaagtgttggttatgaaatcctaggccatataccttttcaaaaatagataaataattaaaaaaa

SEQ ID NO: 125208 - DNA, 2297 bp, Cannabis sativa
  modified_base (949)..(952): a, c, t, g, unknown or other
catcatcatcatcattatatattaaaaacctaaacttaaaaatgaacaaatacacacacacacttatctcaaaaaacagtagctaaaagagtaggcatatatatatggaattaaattaattaagatcccaaagtttggaaaaaagaaaagaaaaaacgaggtgttctgtttggctttatggagaagctagctagaatgatataaaaaaaaatggcagtgtgacagtttggtataaaattgggcgagaaactaagtaaagtgtaattgtgattattattattgataataataataataataattaagtgggtgtgttagagaagagagttgttagttggttaaactgtgcaactcaaaaacctgcaacttttgttgattgaattttttttgttgcattagttttttgctattgtgcccacggaccaaactttaataccatattaaagtggtactgtttctttcttttttgttaattaaaaagagtggtactgtttatgattattattattcattgtggtggggttcatagctttaattcgcaatggccctttctctcttccacaataagtcaagaattgttaaaatatcgtatacatttattgttggaaaatgttgttgcaacatatatatataagaaaatatttaaataaaaaaagttatctatttttttttaaaccactataatatgccacatatatagagtcttctaacaatgatatgtctttcctcttcaagtaacattttattgactttagtaataagaagaaattttagtttgcgttaataaacaaaatttaatacctaaagacaaatcctagagttgaattctcttccaaacctatatgcatagacttatatattgtttttggttgacattattacagttatgtctgtgtttttaattttgaataaatatttaacaccaaatgattattattattattattannnntattattattattattatttcaatgattgagtaaatcacaagtgattggggtatcaaaattaaacattggcgtttgagtgttttgtccagctcaaggtaagaactgggattggatgatttttgtgatcagtatttaattattaatttaaatcttaaattaataccctttaaattattactatcattttaatacatatatattggcctaaattatcttcatttattgtgcagcggattcatatgtaagtaatttaaactctaattataatttagctggagctacctttaagggtacttaaaatattttatccaattcctttgtctcgttattccatttctatatatttaagtttactataagtacaatatacttagatatgaatccgaatggaaatgttacttaaaaaaaaaaaaacttacaaagatttttttttttctattaaaatagaaaagcatattaaaacctatgaattttcctaaaataattctcttttacatttacaactagacaatttactccctattcgcgaaacaatttttttagtattataataaaaaataataatttactaatataatatatccataagtttatagaagagaaacgtggtacaactagaaagtaatcaccattccaaaatgggcccaagcaagattcggaacggacccatgcccaccaaagactcaaggctttgacttcgagacataacactctttcgaaatccggaagcccgctccctagtcttttgggacatggaaggaatgaagatctcttaatgaagataagggcaggtctcacaggatgacacccaaaagcctaccacagattgggagtcggatgtctaccgcgggctggataccagatgtctaccgtagaatgacgtttccacctctctgacacaagattagattctatctcctgcaccagactattgtagttcacgcaccaccatataccccttttgtgtgacggctcccctaatacctttgtctgccacgcataacctttgtgcaacacgtgccttataccaaacaatctcctcatcagtacggaaccgttgtcccacgggttgaatattcttagtgggcctcatagtcatgtatgttttgtatttaccctagtagtgggctcacttttacaaaaaaacaacttaaatgggtcaggtatgcctagacccaaattctagcctatataaacctcactatcccttcatgcaagggggacgagacttaagttaaagctcttctggttttattctaagctctcttcttctacaagaaaggtgttgggttttatgccctaaataaaactctttttcaatgtaatctttatcttttaaatatc

SEQ ID NO: 125209 - DNA, 2437 bp, Cannabis sativa
gaatggttcaaggtgagatatataatgtgcaatatatatatggtgactcatagcaataataataatttcttgaaaataaattattattttttgaattaaatatgtgtcaattatgtttatcaaaatgaaacagaaaaaaattattagtgtgggttcataaaatttttatttttaaatttttaatttttttcattttaaaaatcaaaacatattttgttattattatttttttcaattttagaaacgaaaaatgaaaaagtgcttggtaatttttatattttttgtttttcttttaagtgatgagagaaaatgagaaaaatacatgataaataacattataaaataggcaacgattaaaaaattgcttaaatatattttaaaaataatttattattattttaataataaaaaaataaggaaaagtagttttacttaatatattttctaaaaatattttttactttagaaaataaaacaaaatagtactgtttaaataattgttacagaaggcaatgatccattttttaaacatgtagtaaactagatagcaatattactatatatatattactatttttcttttttaaaagagtaccttaattaggtaccaatatcaaataacaactattattaattggggaataattaattaaggattttttgtctttttattttaacaaataaataaatatagatatatatatatatatcttctttgtcacatgcaggaagtgaaaaaggttgtagaaccatattatatagagaaaaaaaattcagaaggattaacagcacaagacttgttcaataaaactcacaaaacattgtttggagatgtagaagattggacaaaaagtacaagctcattgtgtatgaccctttcaacaattattattattgggatttttattgtctcttttaataataacaatgggccaataattagtggaagagtctcctctcctcttctcatctcttcattgcttgcctctacaatctctctaataacatttgcttgcactctcatcactatttcttggtatggaaacaatatggatacccttattttatttttcattgttggaatcgcgacgctcttcgtttcggttatgacaatggtggtgtcttgtgtgagaaagtttgctcaagtttaaatgtttgtagaaattaagaaatctttcatgtagaacatctaataatatatgcatgttgtattataaagtttttttttacaccatctaatttgttgaatgtatgttgggtcttacgtttttgtgtgaaccatgtaatatataaagaataaacagaatttttcattagaaattaatcttctcgtacttttattaatctattagtttttttgaaataatatgttgatgtggttatgagctgtaaattcacacactatgagggtgatctattcaacaaaattaaatttccaaaatttgtttgtgctagattacactacaacaaaatatacttttcatcttttcttttagtgtctcacacaattggtgtaagacattaaaacttagacaaaattttaaatatctaaattttagagacattaaaagtttttcataattatgactagacataataaatatagtggagacatgtatatagtaaagcaatggaagatcaacaatgtttaatatataaaaactcatatataaatataaaaatatttaaaaacttacaatatttctagctgcaatttgatgtttaatcaatcagtcaagttcactaaaaggtgtaccacgatatagatgattagcaagggtgggaagaccattttctataaaataagtaagagcgtctctaggacgacctgctctgaaaggattagcaagggcacggttaaatctaatgtcttgatgcctataatgattaataataggctgtagggaatatctaagattatttaaatactacaatattggcttttagaggctgttttttcacccccatttataaaaaagcaagctaaagggtgtgaaaatacccgctttgttcgaaattgacttttagatgcgattttttgataaaaaaacgtaggtataaaattactttataccatttaaaggcagttgagaaatatctcctagggctactacctgaacagtccagcaagtatgaaaattatcaaactaatttcatatgggacccaaatcaacagaagatgacaaattcaatctataataacttctttggcctgtaaaacaaaaacaactaaaatgttagacctgttaaatataaaacaaaaaaaaattaaatttttttagattcttacaaaatcagagaaattaaacactaaaatttggatacatataaattacaattgatgggtggttactgtccacgtttcacatatatataacagaatatttggatacatataaataactgctttatatttaaaatataaaaaaaaaaaaaa

SEQ ID NO: 125210 - DNA, 1214 bp, Cannabis sativa
ctatctcttggagaatcaaaatccttccccaaattacgaacaacagaagcagaatgaagaacagggggaattgtattcataccttgggcaagaccactgttacattgctcattggcatggatgaacatctgaaagtcttgtcgtgcactcttcattcttttaggcacctataaagacgatctagaagacagcggaggcttgaaaaaatcctgcatcgaagcactccttctccctgttaggtcgtcattgtcatttccctcctcctctgaaaactccagtggatcgattccaatggcttcttcaatggattcagttcatctcgcttcagttacaagtgaaattcatttcttcttcctagtcaaaatagccttcccacgcctccttcccctcgattttgccatggcaccagtaagagctgcaagcggacgagagagagagagagagagaaaagcctaattttttttaattttaattaatttaattaataatttataataggtgtatattaaagctataatcttattaaatatatatatttattatttatatatattgtcaactttcatttattgtcttttgttaaattttaattaatatttttggcgaataatttaaacaactcaatttactataaaattacaacctggaagctaattcctcataattttagaattgatatggtaattaactactgattaggttggggtaagttgaaaaatgtctcttttatgatttaattaaccaaatttatctctaattttttaattgaaacataccactatttatatgtattgtacctaaaatatcctgacataagagggtcacatcactactacaatttagacctttagtgacattatttagtgacacgcagaaaagtgtgggtcactaaagatttagaaataatttttagtgacatgcacaattagactctaaatgtttggtattagtatcatacaatgtgtgtcactaaaaatataaagtgtcactaaagggtaattccataatttatataatttttttttaaaaaaaaattgttgacctacagtgacacgctagttgcgactgggtaaatgtatcccaacatgtctggcgcatcactaaaagttatttttaaaattattttttaaaaaataattactacttggaaaatgttcccaaacttaattaataataaataataataaatggcctttttttaaacaaaaaaaaaa

SEQ ID NO: 125211 - DNA, 3183 bp, Cannabis sativa
ccccccaaaaaaaaaaaaaaaagcacttacatagtacatttgggaccctttcttcacttactccacctacacgacaaagaaacaattaaagcaattatttttctacagcaaataagatcggacagtcaaggcaaggtatttcaaaaggctaaaaatgcagcaactcttattcagcaaatgctatagtcgtcccgatcgcaccaatatagctggtaagtccctatccatacaaacatctgcatagagacttggggggcaaatgttatcttgattttttctcacctgacgtggcagtgcttatgtggacaaaattagtctcatgtggcagtaagctcaccaacaagaagaccaagtcaatacctaagcaaatgaggacactgacactcaaatgggcatcaaatggcagactagcttccccataaaagctcgttggccacccctggccagccaccctctggacagcaccatggctagccagcctgctccatgcaggtgtctaactggccaagagaagacctacaggggtttcatgtgtaatttcacacgtggacacatgatttgggttgcgaaagtggccctaaaagcccaatagaatagctaaataatatctatgttcaagggcattttggtcttttgtaattaactaatttaatattaaaatatcctagggttttaactgtaaattagagttgtaggcttcctatataaaggtctttactctaacctagaaaggctaagtctctgagcctaatactagcctccaagtgacaaagttctaagtctgataactctctccctcactctctctcacacgcgcatataagctgttatccgcattttggttgtcatgacacgtggatttttaaccaaggaaggctaagaagtcatcaactgtcccacttcctcaattgatgctctgggaagataaaggcaccaatttcgcaggtagagcctctataaagaagagttccctgactggtagctacacggagggtatctgtgagtcaaggtctccctccgttctaggaactaaaggcatctgctcttgagaagaatatggattttcttggaaggcctaaggcattcgaagacacactaaactaggcaatgcctttagcccacggaagcctcacctaaacgtgtcagactatggacctagtgaccatgctttttttgggtacaatgttagaggttgtctcccatgacacgctatcgtaaagagaatgtgtgtcattgtgtacctaagaaaatgatccaacggctagggataaagggaaattcaaaaaggagaagtcttgaggtgacacgcgtccgaggtccagctcgtacaatttgacgcccttaaatgccatatgggaaatcttccacctaccaatccaatggtcgaatttcgccctaacgataatccatccaaggcagcacatgcaaagaagttggactataaataccccataaaaatcaaaagaggagccttttttggggaggcgaaagatcgattcttcataattctaagcaaacacatttttgtaaccctactatcaacttcagaatattcttactaagcttcctcttcttcaagaggaacacagggaaaaggagttctagtccattgtatttctatttgataagcaataacaagttgatgagcaaccacgtaaaaatctcttaattattatcttgctatttatcctatctttaccttcccaagctctaaaaatatttagttgtcgaaaaactcaataaacattttggtgctttcattgagagttgaagaaagagatatgcacggcgatcactgacgcaagtctgccagaaagacaacccatgtaagaaaagaaggaaaatctcttgatctcttgccgaggtccggtcgaaggtcgaaaatgtgcaggtcgggggtgttgcccagactaagggtcgatgccttcgtccgcataagaaaaatactaaaggcgaatgcatgtggtcttaaaacatttgtcgtacctgtattcgtcttaaaaatctcaaatctagccagccaactctctggggggatgactggccattggcatccttaggctcaagttccccgtcctccactacggcataactacgcacgcactatggggtgcaagaggcgttggggctaggcaaagaagctatgacctaaggcggttacaaagactaactcacaaagattgtcaattataacgactctatccaaatcgaaacttcggcgttggtgctgacgtgagggcaagatccattgccaacggctacttcccttgccttttagctgagttgtgaagttgatcagaaattgatcctataatggcagcgtctgagaggagaccatcagtactgtcagcgtctgctgggccttcagtcaggcctgattatggtactgttggttaaggcaggcaatttttggcaaagtttgctcagaaggtttctgtggcatggcgtaactacaaccctagagttacatcagagaaagcaactcgagacattataaacctgttactgttaggatatctctgctggagtgttgttcatcctactgggggtctgagtctttgccccagtagtcatgaaatgccctgcactctactggaagaaacgaactgcctaggagttccaagggcacgtgcacgcatctcttggagcaacttggagcttggaaaatgcatgcgcatcgcttttcttgtgtgaaaggtcactggggatatggcacgtcttcaaccctccttcctagaatggaaggactggttaaagcttgtcttactccctgtggtgctttctccttttgatcttttcaagcgaagtcaaagcttgaatttttatacaccttcaaccttcctttgcacaagatgaagcttgcttcataaaaattcaacatgactcttgcatgcgcgatgtgtttcgtgcaagaaagatcattatgggtatgacatatcttcaaccctccttcttggaatggaaggactgcttgaagtctattttactcccggtggtgctttctccatttgatcttttcaagcgaagtcaaaacttgaatttttatgcaacttctgccttcctttgtggaagccgaagcttgctctataaaaattcaacatgactcttgcatgtgtgatgtgtttcgtgcaagaaagtgttgggtttcatgccctaaataaaactctttacaatctgattagt

SEQ ID NO: 125212 - DNA, 1382 bp, Cannabis sativa
caagtttaaaaaaatcacgtaataggcctatgttagttagggtgttacaattaacttttaaagttaaaacaaaagttcattaataatgtatacatacacgccacatattaaatttagcaactctcttttcttgtttttttttttttaattcttttaagggtaaatatcatttttgaccctgtattttacaaaagttactaattggaccttctgttttgttaaattataaaatggaccctatattgttaaattataaaattgaccatgtattttctaaaatggtacaaataggaccttgaattgaatttttgtcaaaataaaatttaattataatccgatcaaaaagtgttctgacaaaactgtttatattttttgtatctattcgtattaggtattatcttcaagttggttatattaaaaaaaaaagttgacaaaaattaagcttagggtcctattttaattattttggaaaatacagggtccattttatcatttaacaaaacacatggtccaatcaattacttttgcaaaatacaaggtgccaaatggtattcactttttttaaaaaagaaatcactttttttaacaaaaaaaaaaaaaaattataattacatgtgtaggtaaaatcatataacctttatttaactttaattttattataaaaaaaaaataaactactcatatcacgaggtacaaagtaaaggtactataatagaatattctaaatataatattatattaattttctttgacttaaagtttagatgacgattacacataataatatagatatatatatagtttgctgaaagaatatatatctcaacaacttgaattagcattaaagtttattccgtttttactactttttataatgtttttgtgtttgttttacgtggagaaaagtcgtgaacatgtttcttcatgggtaaagtaaattatatctcaatcagaaagtggcaacacacctaattcctctgacttgcgactcttggaaatgtcttaaaggttggactactacaaccataagaatattaattatgtggtgaaaagccaatgtgaatccaaaatctaaagaatatataccctatatgtatatatgaatgatatgtgtataaatttatgcaacaaagtaaaatatattaatatatggcgttattgttttgtaaaacattaattagatatctttcataaaaaacgtttttttttttacatttgaaaatatttgttttatatatttttatgataatttacataaaaattcacataataataaattaagaaatttaaattataatcaacatctacataacaattcacataaaaactacaagaataaactccaaaacaatccaaactgtaaatttttttttttttaaaaa

SEQ ID NO: 125213 - DNA, 3020 bp, Cannabis sativa
  modified_base (2951)..(2954): a, c, t, g, unknown or other
ctaattctacaaattgggattgttgtttaattaattgattaatatcttaaacactttttttttttttttttccatttatgtcttttagattcaggtttgtagtaatcacatgaacatacaagacgaggtgaaccaagttgtgatacatgagctaattcatgcttacgatgattgtcgtggggcaaacttggactgggctaattgtgctcatcatgcttgtagtgaggtgtgcattactcactgtattgaattttagacctatttttttttcctctctttctctctcagatatagatttagatacaatgtttttactgttcccctgagcagatacgcgccggccatctcagcggcgattgtcactacaaacgggaacttctgcggggttttgtaaagatacgaggtcatgaacaagtgagtggattatacctctttggattaaaaactagaactgaaatcttgtgtttattctggggtaaaagaaaaattctctgtttagttttctgtctatctagatatttgtgttcctctgcttcctaagaagtgtggagaaattgaaggatgaaaggcaagaaaaaattggataaacggaatgcttaggataaaaacatgtactggatgacagaaaacacacccatgtttttgcatcccgccatttttatgagttttaagattataaacttatatgcaaacagggacccaaaaaaagccaaaaagatcacgtattgaatttctcatgtttacctgtttgaattaattttgtattatttatcaaaaaaaaaattgtaatagctttagactagtttaatttgttcaatggtcatctttacatttttgggtcatcttttgcatgtcattatggaggggtatagtagtagctggttcatgaaattgtcatctatgttactctactctgaattgtgaagtgtttcttttataccttcatcttatttccttttgtggatgttgcattccttacttgcgtaattaatttatttctttgtccattttctcacatgaagcttgtatgagttagtttcttacatcgttttgttgtttgcaattcaatcttaaactggattctcattgcaatgtttgaaggagtgtgtaagacgaagggttatgaagtcagtaattgcaaatccttactgctcagaagcagctgcaaaggatgccatggaggcagtctgggatatttgttataatgacacaaaaccctttgacagagctccataagcataaaagataaaccaaatcagtggcagctagacattttagattcttcccttgataaattggaagttagaaagtgtaaaacttttgcttcatatcttcagaatccttccaacaagaaattttgccattctttcaaccataatactaattgtatgctggtcattaatattctttttccaaggttattgttagagaatttaagatttctctcttgttgatcataataagaattattttcttttgttggttttatgcccccaactccttgcagctaaatgaatttctggcttgccagcaatgctgttattatctaagtggtgtgtgatgattgattacatagtttatgattccatctatgtttatacaaaatgtgttggttgaaaaatttgtgaaacaatgaaagtattaactgaactatattcattattctcaaaaagaaacaatattcattattcattaccaagaatacatttcacaagattgaatcgtgatgtgaacttggtatttgaacgttggaccagtgtagtggtctgaagtcttacgtatggtgaggaacgaatagtataatatacaataaaacatactatatttttcttgatactatgtcatttcttattagtgaaacatcaaattttaaattaaatcaagtatgagggtctccatattaagatggaggatatataagtgtggagggcattacataaaaggaggtgattctggacatgtttttatcaagcatttatgtgtcttggttgtaatcttttgaaattagatacccgtaagctgtagaaagtaacaaaaagacaccctagtttataaaatatctaatctaatataatttacacaattttaatttataaagtgtggatattcatacttacccagatttaattaaatttaattcaatataatctacataatctaatctaatttgtaaaatgtggatattcatacttatgcagaatggattagattgaaaaatttaaaatttatatatttgtacggattgaatattgattgacatgttaaagtaactgatcaaattcaattcacacatatttatatttgttaaaaaagaaaattatatgtacaattattattttaatgtaaaaaaataataatttaaaaatctaatgcatatgatacaaaaatattttaaaacttaattgatcaaatacatatttcattcttatatataagaaaaatataattttaaaaaattaaacatttctttctacatacaatttttcttttcttcttttaaattttttgaattttgttcatttattttaatttattgctggagacataaaacaacaataatttgttttattttgttgttagttatgtgattttattttttttaataaatattaaatactttatattaaaaagaccaatctaaaataactgatccaatctgcacttttgtagattggattggattgaatttgagctactgtacgaattggattggattcaaaatgttgacttcagatttggtcaactgacagcggaaccttatttatgatcaaaatcatcacgtgttaataattaaagcaagtaaagaaatggacacggaaatttgtagaggttcgcccccttggttaatgagtgatgatctactccccttttagttctattgatttgagagataataccactcagattacacactttttgtaaagtctttttttgtaaagaccgcttagttnnnntttggaaattagcagataattaagatttaattatgaaattatttatggatatttaaataattattt

SEQ ID NO: 125214 - DNA, 1609 bp, Cannabis sativa
  modified_base (1401)..(1402): a, c, t, g, unknown or other
  modified_base (1567)..(1569): a, c, t, g, unknown or other
ggctgccgcagcggcggcgaagaaatcatcgcctcccccggcaccggttgtttatcaggaatcggaaatttgtttgaaagcagagatcagttcctcatcgccggcgccgaccgagagtgatgggtcagctggatcttctcctttatcggatttgacgttcccagatcagatggagtcgccatgggagtacagtgttccggagaatcatatgctggagaaatatccttcagagattgattgggcatctatttatcttgattcttaaaaatagtatttttatgtgtctttctttgatgtaatctcttttagtatttagtttcagggtagatttctttcttttttcttttagggttgggagtcaaatggctactgcaatgaatttttgaacagttgcagagccatatttcaattgggtttcttcttcttcttcttcttattattatattattgtcaatagtgatgtaaatctccaccatggttagctggtttttttctcttgttattccatggtagacttaattaagaagcttttgtctattattattattatcatctactctgtactctactattgtactgtaactttgtttgtgttcatatataattataataattattagttttagttctcattcataatctcaacattttactatcctacaacataaaatcaaaacagagttaaataaactaaaagaataaaagttttgattggatcaattttagtgacatgacagtacatgtgctacacttgattcttcacaagctttagatatcagtttccaacactcaccataacttgttgttttgtttagttaattttttttaatactttacacttgtagtaatatacataattacaatattttgtaataatacaacctaactccaatccagctaggtaaccgaaaacggcaaatatttgttttgtattattcaagacaaccaaggaatatagatcaatttttttcattattatttatctttgtaaagattttttaattttgtaactaaagatgtattgggagagaaaaataaacaggaggcaatagaaatatatcttaaatcaaaatataatttaatcttcatactaacaaattatatacctttacatggaagacaatattccttacaaaaaaatatggagtagagtaaaaatataaaatgtattctttttgtttctttttttgttatgtttctaatatgaggaaattgcacttagtatgggattttaaaagttcaaatgataaatatgacacatttaagtttgaccaatttatatggttttttttgtttttaggttttttatggtatttgatatgtcatatatatgtaattaggtttctaaatcccatatttaatgtttttatttgttgaggaagttttatttgtcattgacgnnggaaaagtcaccggagtttgctgtcggtgccggaaaagtcaccggagtagcggtcggtgatggaaaagtcgtcggagttgctgccggcgccagaaatttgtcggaattcgcattgtcgccggaaaaatcactgaaaaatcaccaagaaactggtttctggtttcnnnatgaagaaaccagttttttggtaatttttctgacgacaat

SEQ ID NO: 125215 - DNA, 862 bp, Cannabis sativa
ggaaagcttaattaactaaagtgatgtgttaaaatgtattaatagtgtttagtattttttaatgtgttaatattgttattggtttaattaaatatcatatttatataatttaataaaataattgttaaagaatattcaatctaagatgacatatctaaaagtgttatgtattattggtgtctaatatcaatgctcttaattaaactttctattaatatttattaagtgtaaatagcatcacaaatacttaaagtttaacgtttgtaaataatttaaattcaatatttatttttagcgggtactaatatttgtaaattgtaatttttattcaatttcatcagtataaatttcgatttgaatttattaaaaaatactttgaagtaattaatattatatatatttttttagatccaataatttaaaatttaaattttttatgtgttatatttaaaacaataacataatttatgatgataaattaaaaaaaaatacaattttataaatattaattatttatattgctaaaaaaataaatatataaactatatttattaattcacatcaatgtcaatctcattctatctcttagcacgaggcaacggattttgtccataactattattattcctagccgttggttttgatgtattctatgctatggtcatttcattcattaaaccatctttataaaaaaaatttaatagataaaaaagtgaaaaaaaaaaaaaaattctgaactattgagattatttaatttaagaatttttgttcaactaatttagtaaaaaaattttaacatgaatgaaagttcagagggtatgatttagtacatatcaaagtttgaggggcatgatttggtaga

SEQ ID NO: 125216 - DNA, 1816 bp, Cannabis sativa
  modified_base (510)..(512): a, c, t, g, unknown or other
ttctattgataacaaatcagattgtattgaaataggttttatttagggcataaaatcccaacaccaggtatgtaccattggtggagttggagaatagacaactttgacaacgattggctgaatctaactgatgaaacgatgagttggagagagagtctgcaatagccagggcggcgccgggaacagttcatcagaaccaacctaatcctacggtaaaaagaccgcaaggaagacctcgaggcttgagaacaaggagacaggaaacaaactaggggaatacccaaaatgcccaagaagaacaacttggggatacaagagatgtcccaatgaataatcaaacaaatcctaataatacaaggaatcaataacaacggtgagatgttcctcaaaattcttatggatttgcaaaccaaggaaatgaatgaactgacatgccaaaggcatatcacaggaatgaagaggtgaggtagcctcgaccaaggaagtagggaatccctcgcaataatgagnnnaaccctagaaatcaaccaaggtcaagtgagctacctccaagacatcctcaatgtcctcaacgtctctatacatgtacttaaatagaggaaatgtatctaatctctttcgtgggagaaggccagtacaagatgaagcaagttcaacctcgagacgttcaaggtctgagagtttagtcgatcgagttggcaaacgcgagaaggaagtagatcttgacgttattatgctgaccaagaaagcatgagcaattcgtgaagttattaatccgagagttactctaaaagatatgtatgtaattatgagagaaggcagcctcatcttcgcgagaacttaaatcgaagacaacctgatcttcacgagcgtctgaaataaaatacactcatcaacttaatcaaaatgaaaatcaacagcaagtggaccccatccaactacagataattgaactagatgataaattcataaaatatcaagatggaaaacttggtaaattaccaggctacgacttgaatgaagaaactgagcaattccatccaaatatcttacattttaagtttcctcagggatttaagaacccacatgtttctcagtacgatgggaccaaagacccagtcgctcacttaaacaactttaacacaactatgcgagctagcaatgtctcgaataatttgcgttgcattttatttccaaactccttaacacgagatgcgagcagctggttcgataaatttacccatcattccataacatcctgggaacaattgtttagggactttaagaaaaattcaagccgtaagagagtgacgacctaaagtatcgtccttaaccaatataaagcaacaacctggcgagtctcttaaggcttatttaagtcacttcagcacaaccgctgcaaaagtcagaaacctgaatgatagtattcaatgaacgacacttcaagtaggactcacaactgacttatccatggctggaggtgaattatgggatgaccttaaaggtcgccctgtgaggaacattactgaattcaatgaagagcgcaagtctttgtgcgtaaagaggaagcaagaaatgaaatgaagttgtttaaaacaggcttgggaagaaaacacaccaccagtatggcaacagcgagcacagtctcaactaaagtggataatcctagtggttcaaacacgaaaagaaaagatgactcgaaagaatcatcaaagaataaaaagaaacagaataagcatgacaagtatgtatcgatttatttggtatatactgagttgaatgaaactcgcgagaacatattcctcgctaatgaaaa

SEQ ID NO: 125217 - DNA, 747 bp, Cannabis sativa
aaaataatttgattaataaaaagtatttttcaacttatcccattaaattaattttatgtatagttttatttttgttgacatgtaatataaagttaacaaataaattttttttagaattaaattataaattaattataatttataattaactacttattacttattttttttaaaaaaataaattttaaatttaaatatttaataagactcttcttaccaattaatattaataaattttactatcatatttaaatttttattgtaattttttaaattgtttaactattagttataatatatacgataaaactctattattttatgaaaaataaactttcaccccttctaaaataaatgtttagataattaattactaagttcaagaatagtacgaaatattagaatatgagaatttatggtttatacatcacatctaaattctcatttcatctgtatatcttcaaattacatgttttagaaacaacttgaaagtaaccaacaatttcatatatgtatattgtattagtaacacatatttgagatcaatataaccaataaataatgtactaactttgttaacgatacatagtaaaatcaataaccaataataatcaataacatcgattgcgaacacatgttcaaaatccataagcaatacaattaataacttttaatttttcaataaaacatatccaagatcaataaccaataacaattattaactttcaaatttttttaataatacgt

SEQ ID NO: 125218 - DNA, 1792 bp, Cannabis sativa
  modified_base (1679)..(1700): a, c, t, g, unknown or other
  modified_base (1745)..(1767): a, c, t, g, unknown or other
gaatgaaaagaatactcagcacacgagaaactttgggggctggccacactttataaatgaaaaggttacagagatattttagaatattcagaggtataataacctcataatttacaacggtacaaaggaataaaatgataacagaatgatattgcaatcattgtatagctgggaccaacatagtgacaattgtgatacctgtacacatcaagaaaaacaagagtaaacactaattaaccttcttaattcatttcttaacaacccttctcaaactaggtggggtctcaaccacaccaagtttgtcaattaagaaatgaaaccgatggctagtcaagctcttagttaggcaatctgcagcttgatcatgtgagcaaatgtatctaatgtcgagtgtcttgtctagaaccttatctcttacaaagtggacatcgagttctttgttttttgttctggcatggtaaacaggattggtagccagagcacttgctcccatgttgtcacaccatgtaataggagtagactaaagtggaatgttaatctctttcaacaaggcttgtatccaagagatttcagcagtgacttgggcaaaagccctatattcagactcagtacttgagtgagagacaacaacctacttcttggttgaccaagaaaccaaggtatctttgagataaactcaataaccagccacatttctcctatcatctgggcaacatgcccaatcagcgtcaaaaaatcctataattgccaatctatttgagtacttgatgtggagtccaagatgaatagtcccttttaagtaccttagaactcttttagctgcagtacaatgtgctgttgtgggtggttgtaggaattgactcagtttgctaacggcaaacgcaaggtctggtcttgtctgtgttagatattttaggcctcctattatactcctatattccgtagggttagtgagaagattcccatcagttttggaaaaaggctttcccacagtcattggtgtagagcagggtttcaagtgagtcattcctgttctggccagcagctcacatatgtatttgctctgatttagataaaggccagtatcatttcgatgtgcctcaattccaaggaaggaatgcaagggtccgagatccttcagagcaaaaatttcattgagtttggtggtaaacattctcaaattttctcgtttcttaccagtcacaatgatgtcatccacgtagattaaaatcatgatgatagtgttggtgtttttcgtagaaaaatctgaaggaatctgccttagagttcttgaacccccaactaatgagagtttccttcaatttgtcatactaggccctaggcgccaggtttaaaccatatagtgacttagtaaatttgcaaacatactccggatgttgcttgtccttaaaacaaagcggatgttccatataaacggtttcttgaagttgtccattttgaaacacatgatttatgtcgagctgccttatttcccatgattttgccactacaattgagagaataatctggattgtggaagcctttataaccggactataggtctctccaaagtcgattcaaggcctttgattgaagctctttgagactaagcgggctttgtatctctggtgtgtaccatcagcgtttcttttcactttatactgttgggttttatgccnnnnnnnnnnnnnnnnnnnnnntaatcagatttacttattactatagatcaaaaataacatttaatnnnnnnnnnnnnnnnnnnnnnnnttcatgattatatgtacataatcta

SEQ ID NO: 125219 - DNA, 1285 bp, Cannabis sativa
agggcataaaacccaacagcccactcctttgaatcccaacttttctgttgtttcctcacaatctgttagacccaactttgacatttccctgcgaccatcggcttttacagcctactccactgattctttaattgtggctgacaagcctgttgaccaaatgcatgtttcttctgctggccctgctaatcttgtgtctctatctgatatttcctcttctgttggtgattctgctacgggtgctaactcttctcaaggtcttcctgaccctgctgttcgtgagaagggcttagcttctgcctccggtgttaagagaccttctttccagccacaccatgttgtggttggaagctctgtgaggtcccaactgaaacgcgctcgtgctggtgacagagaagaggaatcttctcttgctgctgataacttggaatagcacacccgcccagaaaaatgagtgtgttaagttggaatgcacgtggtttggggagtacacgtgcattcaggaggctctccctgctggtcaaggatcactgccctgatattgtttttttgatggaaactcgattgcctgttatggctgtggatcgtgttagagtagctttaggttttgataatggctttgaagtccctaggaagtattttggaggtggacttcttcttttgtggaaagctactgtatatgtaaatattttatcctattctagtaatcatatagactgtaatattaactttaatgataatgaaatgtttcattttactggttattatggttctcctactgcttctaatcgtttgtttacttggaatctcttggaaaaaactttctctaatgcccctaatcttccttggcttattatgggagatttcaatatttttttgttttttgatgataaaatagggagtaattactataatcatactgatatggagaaatttgcacaatttttagataagttctgcctttctccctttccttttgagggggataagtatacttggcataatcgctatgtgcatgagcgccttgattgggctctgggatctgagtcttggaggactcttttccctaatgctaatttgcatcacttgccattttatggctccgatcatcgtcctcttaaggttttccttcatgagtccattgcttctagtttacatcctttcaggaagcggtttcaatttgaaaatatctggctccaaagtcctgctttttattccactgtccaggactcttggactaattcttccagagtctcttcttgtccaaatgcttttagtgagttccttt

SEQ ID NO: 125220 - DNA, 1324 bp, Cannabis sativa
  modified_base (1284)..(1298): a, c, t, g, unknown or other
aaataaaaagaatgctcatataatctgccacctcacatgccctaacaacaacattatatagatatatagatatatataatatgagaagatcatgaagatgtataaacacccacttaattttgagtgtagattaatagggagtacttttgtcctaaagcttatttctctatatttataagcactaagagatctattgataatagctttgagaataataaagtcttaaattttatttagcaaagtgcttttgttgatagaaaactagttgtctaaataaacacattagtaggcacgaatttatagtcaaggatcacatactttgaaattcatatacaccttatacctcatagttgttactgtaaatgaacttaaatgggtaatttagatgttataaagcatcctgaacgttcaaaaatgcacacacataaagttaaaaaaaaaaaaaaataactggttactagttacccatttttttttttttttgtcaattatctttcaaaatatttcaaatcacttccgttgaattttatatcacttatacaaactataaattataagaataagtctccaacaaatgtttactgtagttttgaattcaaaaaattaagttgtgtaacttctctttacaaattaagtgatatttatatatatatatatatatatatacttcacagtgtaatataatttttgttatattatttatttattaaataatatagagtatatatataatataataaattaattatctgtaaatattttgtaacatattaggaattaggttatatatatttttatatatatatatacttcacagtgtaatataattgatgaagatctccaacaaattatgagaaaattctaataaattaggatgttgattgaaatgactaattgcataaacgaattttgtatatttatatgtgtatgattttaataatttttttttatataaatttcaattatacgtatactatttatttaattacttatcgtgatgttaagatttgatagctataaatggaatatgatctcacaaattactctcatatatgggcacttaatgtgaaacgaaacacatgcacaagtttttttttatatatatatatacacttaataatatttatctaattattaaaattatatcatcaatttaaaattaataaatataagtttaatgtaaatatcacaataagaatttatataatgttccgtttaagtacaattatctgtcatcgtgtaaaaacaataatttactcatatattattaagagttagtcccannnnnnnnnnnnnnngaaataaattgtgatatataagataa

SEQ ID NO: 125221 - DNA, 585 bp, Cannabis sativa
taaaaattagtgatgagtgtagtgatattttaaaattattattttgtaatgttgatttttttttattttgtaaaaactaatgattaaataaactaatttacacatttttcttgcataatttgtatatatagtttaaactttaatatcgaaaaattaaattggataagttttattttaataataacttttttatgaatatttattttaaattttacatacaatttagaatactttctttgcttaatttggcatttctatattcaagtttatttatttaattctactatttaacaatgttaagtatactttttttatttttttcctagactatatataagaaaataaaatatatactatttattcattgctttaaaaaaaatacttaaatatactattttgtggtaattatttttattttaggagataattgatattttcttttccatatataatatgaaatttaaaagaacagaacatccaacatttaattaaattttgtatcattaaatatttaattttgtatttttttttgaaggaattaggggtgttcataaaatagctgatccaattcaatccgcacgatcc

SEQ ID NO: 125222 - DNA, 4460 bp, Cannabis sativa
ccgagtcctgttcaatgttcgggtttgagtttaggactgggtttgggtcccaaggttttgattcaggttttctacccaatggtgggtcactgtctgagtccgggtctaggtccggttacagttttgggtctgggtccaggtcttgttcttgggtcccgatcctcttctagtttcggttcaagtttcatgtcatagggtatgggttcgggtcgagtttgggtctgagtctgggttctggtcctgatttgggtccggggcgaggttcaggttcgggtttcagtctcgttcagggtccgaggctgggtccggctccaggttcacgtcttggtccaagaacaagtcccgttccaacatccctatccagttccagtccaagtttcgattttggttctcgagtgtgggtctaggtcttggtatgtgtccaggtcctggttagagttcgagtttgggtttgggttctggtttaagtcctagatccagacaccgactatgggtcgggtccaagcatcaagtctcgaatcccatgtcctgaggtgggtcctaggtccaggtttgggtctggggtagggtcccgaatcccgatccaagttttgaggcccgaattctggtcctagtttgggggcccaattccccggtcctggtcgccgatctatgttcgggtcctaggtcccggtccgtgtccaagttcgtgttctggttcgggttcggttcctgtccgagtctaggtcccgatttgtgttaggatctgagtttcagtcctagtctcagtctggattcgggtgttgggtctcaagtctgagtttggttcttgggtcctaggttcggcaccagttttttggtctgagttttggtccaggactcggtttgaatccaggtcccagtcttggtttaggtcccaggtcacagaacccggtgtgggtcccagtcccagtatgggttctggtatgagtttgagttaaagtttcggttctgttacagtcccatgtctgggttctactgcgagtcccgatccgattctggttccgggtccgggtcggacatgaacatgggaccttatcccagaccagactcagaccgagatcaaaacttgggaactggattcgggccgagacccagactcaaacctggacccgtacccaagactttgactcggacttggacccaaacccagacccagaccaggatccagatttggacccatactcaaccctggactcggatgaggactcggacaccgacccaaacccggacccgaacccgaacccagagacggaatcgaaattagaactgggactaggatccgaacccaaacgtagaacccaactacgacttaggacacggacctgtatgtgggacttggacacaggcctcggaacccagatctagatcagaactcgagactcggacccggacgttgatctagacttgaacccaggactcgaacccagatctagacccggaccgagatcggaaaccagaacccaaactcggaataggacttgaaccccgaccgggtcctacactcagattgggacctaggacccgaacttggatgggggacctggaataaggactcaggcttcggaattggcaccgagacagaagacctgaccccaaacccgatcgctgaacaaggacccagaccaggatttgggacccgaaggggaactagactgggactcgagactgggatctagatctggacctggggcttggacttgactcatagtcgatgtttagatctgggacccaccaactcaaacccagactcggactcgaacccaaatctagaccccaaacacagacccgtaccttgtgacccgaaactaaaagtagaaccgaaagcggatcgggactcgggaacaagactaagggactaggatctggtcttggtccaggaagtggattctgactaggacccagacctagacccagatcgggacgcagacccaaatcaaaacgtggattaggacttgggacacaaactcgaacccagactgggactttgacctagtctcagttcagttttgggtctcagtctgggtttttatctgggttcgggtttggggttaggtccttgtccttgtcctagtcttgttctagttccagttgcgattatgagtttgagttagggttcgagtttaggtcgggattcgagtccttgtccgagtttggattcgggtcctgatttttgtctaggttcggatcaggctacgagtgtggggtcgggtcctgtgtttaggtctaggtcagggtccgagtcccaagttccgatctcgatttgagtccaggtttagttctgggtctaagtcttgggtttcgatcccaatgagggttcgagtttggttccagatccaggtctaggtttgagtgtaattctaggtctggatctgagttttgtactgggttcgggtctgattttgggttcatgtccaggttcaggtttggtcctggtccgtgtctaggttcctttcctagttttgattcgggggaggtttcaggtctgggcatgggtccgacttcagattcctaggtccaggtcaggtcctggtttgggttcgagtcctaaattctgatatgggtctgggttccggggcataggtccctggtctaggtcccccttctaagtccgattcctaggtcctggtctgggtccaggtttgggtttaggtcccgagtctttgtttgagtctaggtctgggtctggattcgggtctaggtctcggtcccaatcttggtccgggttcgaagtcgagtccctgttaaggtgtggatcctgatttggttctcaacaagggtttaggactaggttccggtccacgttcgggtcccaggtctcaggtcctagtcctagtcgaggtctcggtccaacttctggttcgagtttgatttatggtttcaattcggttctagtctcaggtccaggacctagtcacagttctagttcttattttgggtctgggttttgttctgggtcaggatctgggtccaggttggggtcaaggtccgagtcttagtctgagttagggtacatgtttttcggatctcttgttcggtccaggtctgagttcaggtttgggtctgagtctaggtctcgtgttttgatcctgatctggatttgggtcgatatttggttccgggtcttggttcgtgtccatgttcaggtacgaatcacaatctcgatcaagggcttggtctaggttcacgatggagtcctaagttcgggttcgggtatgagtctcagtgcttgtctgggttcgggaaagggtcaaggactgggtccgaactcgagttttggggcttggttatggtctagttcttggtgtcgctccaagtccaggacctggtcacggtccctagccttttccggggtctcggccacattctaattgaagttttagttatgtgtcccatgttggggattggttccaagtcctggtgcagcttcgggtccttgtttgagtcccaatcaagacactgactatgggtcttgtctaagcccccatttctgaatcccggggcaagatgtagatcctaatgatgggtcccaggctagtttcggttcatgtcgaaggtccaggtctaggtctcggtctagttccaaggcccagagtagggtgcagttcttggtttcgatcctaattctttcccgagtcctgttccatgttcgggtctgagttctgctctgggttcgagtctcgagtcctggttcgggtttggatccaggtttgggacccaatcccagggtgtgtctgtgtttgagttcgggtcctggtccggttacaattttaggtctggctccagatcttggtcctggtctaaatcctgggtcccgatccgcttcttctttcggtttcagtttcaagtaacgaggtacgggttcgtatcgagtttgggtccgagtgtgggttcaagtcctaatttgggtccggggtgaggttcaggtcttggttttggtctcggttacggtctgaggttgggtctagttctgggttcgggttcagttctgagtcccggtcccattccaagatccctgtccggttctagttcatgtttcaatttttgtttgagtgggggtctgggtctggctatgtgttcgggtcgtagtttgagttcgagtttttggttcgggttctcgtctaagtccataatccagacaccgactacgggtcgagtgcatgcatcaagtcccggatcccgggtctcgaggtgggtcctagctccatgtttaggtgtagggtcgggtcctgaatctcgatccaagtttcgaagccgaagtttttgtcccaatttgggggcccaattcctggttctaggtcccccatgtatgttcaggtcgtaggtcacagtctaggtccaagttcgggtttgggccttgagtcccgatctgagtctaggtccctctttaggttcgggtctgagttcgggtcccagtcccagtgtgggtacgagttttgggt

SEQ ID NO: 125223 - DNA, 732 bp, Cannabis sativa
caaatgagacaacatcatctgcttcttatttatttaaagcactacgcaccaatactcagttccaaatactattccaattcatcaaagaatcaactattgcttaaagaggtagaactattcgagaagtcaatagtaaacctttcctccttgggatccattaattataacaaatattgatttcttacatcaactatatgcgtaaaggatataaggaaaaatgcattcattttgaggagaaaggaagagttggagaaataaaaacctttaagaacctaagcaacaaacgagataagatgattatagattctctaaacttgtttagtgaaaatacttttaagaaagctaaggcccgtctcacttatatgaacaaagttctttcaatttagtttattatcactatttattttttagaaagagggatgcataaaaagaagtagaataagaaaatgatgttaatttttttttttttttgagagaatatgatgtcccttaattaattggataaatgtgtatatataaatataagtgtatttgaaagcaaagtggatatatatataatgaaaaataaaatgagttttcttaagaaatctaaaatcaatgtaaatattcttaccaaaaaataaaaataaaatcaaagtaaatatattttagtgtagtaccttaccaaaaaaacatattttactattataaaagtgtggtgtttggataataattttaatgacaataataccc

SEQ ID NO: 125224 - DNA, 1356 bp, Cannabis sativa
  modified_base (1295)..(1296): a, c, t, g, unknown or other
aaaaacaagaaaaaaaaaactaatcttatgggaccttggacaaggctttaacaacatcaagaactgagcattagagtccctcaagagtcatcactcgagcagtcaaggaatcaagtgaagctcgaacaccagagagttctacagagacaagtgctgaagcagttggaacaggagcttctgcaggaaagtcatccaaagaaaacacaagagattgaggcttagatttcctagatgatgaggcttcaacagtatcaaaaattgaagcagatgccttgtagatgcagcagcagaaggagccaccaaatcttcttgctctgtcttgatatcacttctctgcatactcaaaattttgtacataacttgatgaaaaggaagattcaaatttttcttattgactttctaaaaactaatgatttgatcaaagatgattgtggccaaatcaatatcatacccagttccaaccttgtacaagaaagatgacatatcaaaggagatagttgcagtgtgagaaatcagtttccaatttgttgtagcaaacttgtgaagcaccaaataaatgaaagtgagattagtgaccaagataacaaaattttgaggccacaccatcttttgacccataatctcaacaagaacctcatccttattaagaggttctctctcctcttcatctggaacaacaagagaaggaagatgcaaggctttggctacatcttgtggagaaaaagagaacaagtgacctctcacaaacactttacaaaacatttgagagttagaatcaacaatttcattattgagatttgcataaaactctttaacaatccgatccacataaccagtaaaattaactaaagaacctacccattttctctcttgaagaatgttaagaacaccatatggacgatgatcacttaaaatataacttctttcaacaagaaattttctttgtgcataaataaccatgtctcaaacattatcattgtggaaaaatagagaagaatgaggtttgaagtgtacacctttcatccttggagaagaaataggttcagtgaatggtttcttgcctttaccctttgaggacaatggtgaaggaactggtgtaggtgtagatatcgcttttggaataggaataacaacttgttcagactcagactcattagattctagagcagagtcaacagaagcaagatataactcatcagaatcattagtcttggacttagattcttcttcctcgggttcagactcaaaagaagatggagatggaggatgggccttttgttgggttttgtgccctnnataaaacccatttcaatataatccgatttactaattaataaagatcagaaatcattttat

SEQ ID NO: 125225 - DNA, 728 bp, Cannabis sativa
tatcttgctacagattgatcatctttaaattgtttcatcttcaagaaatattcattaatctacatcgatcatttctttgttgattacagagaaccacaaattcaaaggagtcgtgctttggatttgatgttgaatagttgagcaagagtattccatatctcaccaaaggtttaacagttgatgacatgtccaagcatcacctcagtcattgagttcattaagaacttggttggaaattaagatagtttctcttttcttacctcaccattttggctataaatacaaagaatttgaagagtcataatttataccattcattcatagattttgcaagtaaaaactttttccaatttcttctctcatagtcgtccactatctctcttcttccctctctaaattttaaaattaagggtattgaggtagcacattattatacttggtaccttgatctttgcataagactaggaaaaaaagattgtttgtgttcttgattaaagatctaggtttagtattttataatactttgcaacagacatgaatcaagggttaaagtactaaataaaaagagattattaattctgttggtaagacttttatgagtaatcttgatctcatatatattgttttgctcgttatataaaataattattataattatttacgttaaataatgttggaaattattttaccaggatcttagatctattcacaagtatgttgtttaaaca

SEQ ID NO: 125226 - DNA, 542 bp, Cannabis sativa
caattcagtgctcatggctattcatgcatattggtgccgaagtgctcattttgcctaagaaagtaaagcttttctatagaaaggccaagcttgtacaacaggaccaggtttgattgcttgtgaatctttatgtcaatctaaagccgcatgaggacttgaatttaggagaattcatgaatggaaccaagctgccatggggaagtacatttgggcaatagctcaaaaacaggacagtctatggttgaaatggatcaatagtgtctacctcaaggagcatgaatagtggagttacaaggctccccctcagagtagttggtactggaggagtcttgtgaacttaattaaaggatcatttccgagacattgcaggccatcagacttgtactcagcaacaacaataccaggtaacaactggatattctcttctctgtccagttcaggacaaagttcagtggtcccaacaggtgtgagggcggctaaataccccaaaacactcatttatcttatggttagcaattcagggaaggcttcgcactaaagat

SEQ ID NO: 125227 - DNA, 1629 bp, Cannabis sativa
atattccactgtgctgacgacactataatcatgaacaaatatatatttattcatatctgttctggacttaatagaatttatacatcaatcataatcatgaaataaatcatgtgaaccatgcaatataaaagcgatttctgatcttctattaattagtaaatctgattatattgagattggttttatttagggcacaaaaccctacagaagcaacttgaaaacattgaaagtgaatcggaggcacctccaaaccttcagaagaaatgatttgttgttttcaatcagattatgcttgctttagttttttggcagtgtttatatagtttgtttgaacaaacattggtgttcttttacgttttaagctttctctggacaatatgcaatttttattttcctattttgttaccttattgtgacatgttttatgttgaattgtttagtattcaaattatatatttctgttattttggattcttttgttgttgttttccattattttattgtttttttacagttgttttactttatttattagtatttcataacattattattctgttataatcttaataaaaataaatgcattatttaatgaaaaacaaattatatcaataaaatcattcatatatatatattcaatgtagtatccaattacttttaaaactcttgtaaagtatgaaaaattaccattaacatcaattgttttaataaaaatagacactttagttctgtatgaaatttatattctttaatatcccatgctcaaatgtatgtgtagttttctcatgtttttccactgttgttatgtagttgtttgtattcacttctactttctatgccttttattgcatgttctcttgttatgccccagttcccaacatttgctgcacttgttatgttgattcttttcccatccagcttgcctcctcaatttttttggtcttctaaatttaaacctttcatgtggaggcaagactataatgtctttcacatattccagtacatcccactcactttggtgtcctattggatacactattcctgcataagttgctagccaatttttcttatgtagtaatttgaactgtatttatatgggttcatgttcatctccttcagcacagccacggcatgttcgcagggcatttcatttatttggaacctgttgcacatgcatgttctttctttgaggtctactgtccatgatttttttcattcttgttacctcaaacaaataatatgttgttgatttaacctgtttattttttttttgttaaaaacaacaaccatttatgctatttatagaacaatgttggaacaacattacagcaatactagaaaaacctaacaaaattcttagatgtttatgtttaagaaattttaaatttgaaatatagatctcacctccagatttaataagtacgtgtagttttctagcaatatgtcttctccaggtggtgccagcttagtaaatgtgttttgtgcttttgtcctattattatgtgtccattgttgcaccaatgctctcaagcatatgttataactggtagctcccttgctgttaaatttgtggtgttcagtgattttgatatgtttgaggtcatggttgaatacctcttgttttggcta

SEQ ID NO: 125228 - DNA, 3245 bp, Cannabis sativa
ccacaggaataaaggacacgctgaaaggtttagaccattctgcttctcgcaagaatcggcatttgccttcagagatttcttttaagaaatgcctgtagcaactagcaatatcttcctggtgggttctcacttcgtgttcgctaaccctagcatcgttcaactctaatttggaagtgggttttgagggattgggtttatatgggatggttgattctgtaggaaactaaaattctaaaaattttggacgataaattcctgaaccagagtgggacattgctggaggcaaaaaagtagtcccaatccctggagagaattttatcaaacccgaaggtgatgagttagaggtcctgaaataacctacatatagcctgaaccctagtatgaacccaaatacagtttaaccctaaaactaccaaaaccaaataagatgacaacgatagaaacaaactaagtagcaatttaacgcaatgtagcaagcatgtgaaggaagaaagaaacttactttttggagttagggcttggggcaatgactggttactttgtccgtaaatctttaaacgtagcgaggatcactgtgaaaagatgaagtcagaggaaactcgttgaaaaaatgtcaaggacagagatggcatgcaagtcctcagacagactcaatagtgattcttggcgaagaagcttaagggtttctctgactttctaaaatggaggaagtaatgcaaaggtggttccttttttcttactttacactcagatattagcttcgtcagatcagagaaaggtttgatcctacggacataattcaaagagaaagtggtaaagatggtcatttaatgttgatgtacctcgaaatcgcacaactgccaaaattagaggacatgcgtcttttcagaaaaaggatcatgacaaaaataccctttgtaataattaaaaagctctttttattaaaaaaaaaaagaactttttaaggggcaattgttatatcagaaatttggcgagcacatcagaagaagatacgtgtcgaactgggaagaatgaagaactcaaacatgcaatcgtaattacacttgacgtggaataactcgttaaaagcataattaacagagtatgtttctaactcgactgaataaacagtcttatgcgaaataaaaatgtactaactggtgacttgtgtctcgacgagaaaccatgtaaatgcaagtgtgcatgatgaggcattaacctcgtcgcgtggaggagatataataacaatagaaatacttagcatatattacacagtatacaaacttagtataaacagaggggtggatcaaggtgacagatagcgaggtgtctatctcgctgtaagatggcatgcacacgagaaagatcatctcaacaccaaaaattatagttttcataattaaagtaaaagtaatatcaaccttcgaaagacatatgacgagctccatctcaccatcaaagttaactcagctccattcccaacgaggcatcccaatgagataaggcttaccatatagcttcaatacgcgttcattttggcccaacaaaagcagaatattcacaactgtatgaaatttaaataaaaattgcatttacttagagtgacttgtaatcaaatctcatgattctaggcgatgatcgttgtaaaaagattatagtcaactttgtaattaactgcccactatgtaattataaataatggcaagcaagatcaaaagggggacgaaaaaactcatatgaaagaggccttgagcaaacaatcaaaaatctaaataagattgacttgtggactatgcagaattttaactgcaaaaccatgtaaaaaccttctgtgttcatactttttattttataacttttatttttttgtgtgtgagattatcacggttaggctcaaatttggttaacaaaaatcttcgttaacacctgggaacacgagacggatatgcagcaaaaatatccagagttgttcaagtaaattttgggacgaaatttttataaggggggataattataataccctaagattttggaatcaaattagcaaaccctaattagttaaatgtgtaataatgtggaattatattattatataatttaatatgtgaattatattgataaatgacatgttaagacctcgttggtgagctaggggcattttagtaattttgacctgagaagggtaaaaatgtaattttattattatagcgtgctcatggaatatattattatatagtatatttgttttgtccttctgcaggtgtttcctgacaagttgacacggtatagtcacaattgggtatttcgggccgaactaagttcggggtgaaaatatatttttgggattttattttggcattttattagtaattgaataatctaaaaatttatttaggtgtggaatatgatgaatgaaattttttcccttgattgcatgcttatgtgaagtattggccctaggggcattttcgtcatttgactatttaatttattttcaacaaaaatggatttttggcaatatagaaattcatttgctgatttgtttcctagccctaaccgaccctctctgcctctcctttctcatcatcttcaagctttttattgttttggatttttggcttgggattgaaggtgatcttgtagtaaatttgtgcattttgaaggcctatttacttgggtaacaccttaagttaataaattctgaatttgttgaagcatgaaatgcatgttttgctttggattatgttcatgaatatatgtgtatggaaattggattaagtgtgttgtttgatgcatgatggtgttggtaacttggagtgaattgctcttggtatgttttggaggtgattttagggttgtgtttgtgttgaaatgtgattttaggttttgaatattattgttttcaagctttaggattcggacttggtgttcaagcttttttttttgaaattatgttgaattttgctcaaagtttttgaacttatgttgatggttgtgaatttgaccttgaatgcatacattgatgattttaagggtttgattttgtgttgttattttcttattgatggtaattataatctgtaagaaattggactgaatttttaagcctgttttgtttggttttgggtttgattttggcttggtgataactctatggtatagagttattttttatgcttttaaactaaaagtattgtgagaagagtagtgaaaatgtgtttgtttgcttaattttagttagtttt

SEQ ID NO: 125229 - DNA, 4117 bp, Cannabis sativa
  modified_base (3466)..(3473): a, c, t, g, unknown or other
  modified_base (4053)..(4091): a, c, t, g, unknown or other
gtgtgatgtccagcgtgaacattgtgtaatccttgatattgtgtgaataacaaggttgggaaaagggtttcctgtatactgtgtgttcttatacttgtgtatccatttacttgatagcaagagtgtgttgttgagtgacgctgggtaagagtgaaactgtgagtgtgtgtgcagactaacatgttgttgggttggctgactagattggggtgaatctaggccatcgcagggaaaatttgagtgcgagaatttagccttatgacacgagtaaaataatcctggttttagttgtttgtcttcgattactactggtggacgatcagctttccacgtggtagcttgatatggcaaccaaagtgggccgatatcaactcacgtcgcaattcttttacataattgctttaccggagtaactgccctttgtattcttgtgaccccctccctcttgagataaccaaaatgtatcttcttctcgcagaagagggttataatcttaagtagctcgagttactggcagatcaaactgatcataggcatcttcctacccctttatatatcattgaaggtgtccttgtgatatgagaccttctatctcatctttccaccgacgacactcttccgtggtatgaccaatattaccatgatattcgcaccgcttatttggatccctcttgcgcctcgcatgtttcataggctcttggctcgccaaaaccagtttcttgtacatgtgcgaggtagaactttttctgagtttcattgagctcggtatattcgccataaagagggatatacctgttggacttcttatccttgagcagccttttggaatcctcttttttctttgatcctgaggcctccgaatcaggttctccaacagtatcgtgccccggatgtctcctgggttccgggacttgatgccctctaaacttattctctgactcactcattcgcaaatggaatgaatactattgccttgaactgagtcgttggcggaggtcaagcttctttagcttcagatgttctccacatatctcaggctgtgtctccaagtttttctcagttccctcagcttacatttcctgagggttcaaagtatatccctgggttatcctctgccccttggcctgcgagccgtgaggtttgccttgtgaatctcttttcccaaggtcaggtttattttgggtaccatcttcccgcgtttcctttactgcagctatttcatgctccaactcggcattacgccagtttacttcctccaatcgatgcctaagattgcagttttccaattccacgattggtatgtatatggttgggtcgtaagcgccatccttatcaacgtgattaggagggaccgattgttgctcacccaaggtccgtcaagccaggggcccaatactgggtcttcctggggcttgcattctgttcatgcaatgactcgatagatccttgaggactcaatggttcttttccgggatgatgattgattccttcttgaggattattatctttgatgtcatccatcacttttatgtcaagaggctttttttctgagctttttcacagaggctctcaatgaaagcacaaaactgttaacgcaaattttcgttaaccaaatttgagcctcaccgatgataattccacaaaaaaaaataaaagctatagaaaaataatatatgaacacatggtttcttatgtggttttgcagttaaaattctgcatactccacaagtcaatctttagatttcaaagaatttttttgagggcctctttcataagagtttttctgtcccctctttcgatcttctatgccactatttataattgcatagcgacagttaattacaaagctgaccaaaatatgtttacagccattattcctaaaatcatgggatctgattacaaattaagccaaacaaatgaggtttttacacagctgttaatatctcgcttttattgggctgagatgaacgcgtaaccaaaaatatatggtaagcctgatctcatagggatgccacgctgagaatggagtcaagataattttgatagcgagcagttgcttatcgtttttcttctcgagactaatattgttttgactctgataactatgctttctggtgtcgagatgatcttcctcgcatgcataccatcttcgagcgagataagcgcctcgctgtctgttatcttgactcgttacactatatatactcagtttgtatatcgtacaatatacgctaagtatttttagtgtagccgttttctctttcacgcagcgaggttgatgcctcgtcatgaacgcgtgtacccacatgatttctcgtcaatacataagttaacaatttgtacgtttctatctcacagaaggctattcagcgagccaagttaataccctgcgaattatatttctaacgagttgttccatgctaagtatacttttcgtttgcgtgtttgagttcttcgttcttcccagctcaacacgtgtcttcctctgatgtgcttaccgaattttgggtataacaaataggtttattgataccctttcaatggaaataattgaattgcttatggtaattttgttaagttgactactgtgcttactgtgcattgggcctgtgattacttggggacgtttcgtaacaaccagacttcagccacatgtcccccctatcagaaggcgcttgacgtccctactggtgggatgctgtctcagatagcacctcttcaaagctcctctacttggttatctcaaagtcaatacagatgtcgccatcagttctttgggcaattgtagttgtttttgtatggtgattcgtactcaattagtaatagttgtagcttcagcaagttggcatttggatggctactttgttcctgaagtagctaaagctttggctttccgcaaggcgctaattcaatgcatctccattatgtatgaaaatattattgttgtctgattatttgaatattgtgcttaaactgaaaaataatgtttctattattacttatttgggtctagttttagatgatattattggtcttggcaataggctccaagatgtaaattttgtacattgtaatagatcttgtaatggcgttgcccatactttggcgaaacttactttaacagctggaaaaagcgtagtttgttggctagggaatcctgcttgtattaagaacttatttataacggatgttatttttgaataaatcctcactcccacattagtagagtgcttgttactcttggtgtttggtagttgagaccttttcttcaaaataaaaaaaaaataatgcatatcagtatgatacatataagaagaggtaagtgataacttttaacggtacaaattaattattgtataaatgaatacattcaattaattatagggactttttcatttttacactttaaaataattttggtttcttgcatttttacagaattctacatagaaacctctattgcaannnnnnnngcaacctaaattgcaacaaaaatagtatagaaaaccctattgcaactagcactacaaccactttagaaacccaaaccgtaaatgtgaaaaaaaaaatgttaaaaaaacagtatatgtggtaattctccttaattatattattaataaaaaaatttgaaaatacaaatgtcaaaaaacttttaagaaaataaaaataatttcaataaaataatataatatatattagaaatgatatcaaatcaattagaattttaacacttttttttgaagatgtaattgcaacaacccacaagagggaaaggaaaagaaacaattacaaacttggaaacaagagagccatcaagctctcctaatatgatccctatcattgcatagagcatccaacatgtttggcactctttaaacgtgatgaagggaagcactaggtaaaacagataaggcgtcgatgataccaactatggtacccgataaaactgacctgtcctctttaaaagtattcactttcttgactagcagaacgcaatctaatgaaatacactttagaggaatctctattagctgttgggttttatgccttaannnnnnnnnnnnnnnnnnnnnnnnnnnnnnnnnnnnnnnatagattagaaataacatttaatgtt

SEQ ID NO: 125230 - DNA, 2876 bp, Cannabis sativa
  modified_base (26)..(52): a, c, t, g, unknown or other
  modified_base (1790)..(1791): a, c, t, g, unknown or other
  modified_base (2577)..(2587): a, c, t, g, unknown or other
  modified_base (2794)..(2798): a, c, t, g, unknown or other
cttgatttttttataacaaattagannnnnnnnnnnnnnnnnnnnnnnnnnnatagaggttctactgtattttgaaaataataaaaaaacaactcatcgtttctcagttgaaataaaatagtaaaataaattgtaaatctatataaaaaagtaaaaagaaaaaaattgtaaatccataaaaatgtaaattttttgtcattttcggtatttataaaataattcattcccttaaggagaattttcaaaaatacccttcttttatgatttatttataattttacggtctaaaatttttaattacaaaaatacgcttgtaaagttttaaaattataaaaacacactttgctcaacaaaaaataaaaaaataactgaaaaataacaaaaaattaacctcacgataactataaataaataataaaacaacaaaaattaactagaaatataatcgcatagtaactataatcagggccggccctgaaacaaagtgcgctataggggaaaaaattttttttgggtccttatgttagaaaaaatatggtatttttcaaaatcggtaaaaaaaaatgtataattttaaaagaaaaaaaaaaattgggcccttgggttgggtgggccctaggcacaggcctagcccgcctatgcccagggtcgggcctgactataatacaactataaataaattataaaacaactaaaaaatatttattatttttactaaagaggtatttatataaacaaaaaaaattaaaagtaaaaaattaaaaaaaaaaaatccgtgttgatatttttataattttttttcatatttttaatcaattatataaatttttcactttcttaattataatggaaatttatatttcccattatgatgattatgaaaaggaataatagttaaattcaaagggagtgtaaagagagaaagaggatattccatcttatttaattaaaaaacaatataaattataaaatgtttgagagatccaagaccgcaaagcaaatactgctttttcagactaaagtaatacaaaataactgaaaactggacattagaataagttttggtaagaagaaacataataatgttatgaagattccacgtgaccacctggcttttcttataagaaagaaactttgcccctttttgtttgttttattacattgacaccaggatacagctatgagaatgagatctccatctcatcaaaatatattgccttttttagaaattgtgttttgtaaaagttattaattggactttttattttgttaaaatataaaatggactatatactttctaaaatagtaataatagaagctcaattttcaacaattttattttttaatttaaataactttatgataatttttaacacgaacaaatatagaaaatataatcagttttatcatagcatctctagatcaaattattattgagttttattttgacaaaaaattagttccggtcttatttgtacaattttagaaaatacaaggtatattttatcatttaacaaaacagatagtacaattagtaacttttacaaaacacaagttccaaaataatatttactctctataaaattaataaaatgttttttttctttcatccatcatgcacataggacagagatttgatggggagtgctctcaccgtcctcatttttattaaggcttttaatctttattttcatttatttgttatcagagggggcatagaatcctttaacaggggcaaaaacaaagcgaagattcttctaattagaaaataaaatttataataaaaattnnaatatataaaaatattaaattacataaaaattaaaatataacattgttattcaataaattaagtattattcaaaacacaacttataattcataaaagggatactaatatactaaaacaatacaaacataaattataaaatattattagaattataaaataaaatactaaacaggttcccgtcgagacagatagtgttatctcaatccccactccgtttaacattcgggacaaaaaataatttctatccctgcactgttccccatttagacggaaaattctcgccctattaggagtaggtccctgcgagcctatttcatgagaaaaatatgcatcctgaactaattttttctcaaaataaaacttaataataacctgatataagtggtatgacataactagttacgttttctgcatatgtttgtgctaaaaattatcttcaagttggttatattaaaaaaaaatatcgaaaattgagctcatggtcctatttgtactattttaagtgtcgtttagtaactcttttgttttataattttttaatcacaatatgaaagtacaatttttatttttaaaaattttatttttgaaaaataaaaatgcattctgtagccacttttgtttttcaattttaaaaatagaaaataaatttgtattctgtaaagttcattttgattttatctaagtcgggtctaggtccaagatcagattcgggttcgagtcagaggccgggttcagtaccaaagccgtgggggtggggcaggcccgaccctgggcataggcgggcnnnnnnnnnnnctagggcccacccagcccaggggcccaaaaattgtttttcctcttttaaaattatacattttttttactgattttaaaaaataccacattttttctaacataagggcccaaaattattttttcccctgtggcccactttgtttcagggccggccctgggtgggggggatttgggtccaagtctagtcggagtccaaaatattaattnnnnnaaaaaaaactatttaaaaaaaatattaaaagtgacttttttaaaaaaaaaaaaatttattcttaattaaaaaaattaa

SEQ ID NO: 125231 - DNA, 763 bp, Cannabis sativa
cttaatttcaaattcaggtatgcaggtcaacctgagtggaactgctgctcgacggtttacaggcccctaaatcacaaaatttgtaaaattgataagtgatatgctaaatcacttttcggggactttaaacgcaaaactatagcctaggtttccctattgatctctagcaaaataagtcctaggcattgagaaaacatgagaaatcattgaaatggggagctgtcttttcggggactttaaactcaaaactatagcctaggtttccccccattttgataaatgaattattaagttcatttgtttgagataaagagatcaatgaattattaagttcatctaatccttttactaaactaaagctcactaaaagacaaaagaaacccatggaaaaagaatattttgccctcacatataccataagtcacattgtcacttaggggtattttggttatttttaagaccttgaatattcttgatattttcaatgtttatctaagctgtcccgctactactaaaatactaaaatcaaacaaaagtgactctataggccatatatcacgttccactattaccggacatagaaatacgaaaaaatgcataaaattcatatttaacataaatagcacacctataatttaaatatatctatataaattcatatatcataactaaaagtctaattctaaattaagccataattatttgctaattctcatactaaaattaagcggtctttacagacatgttcactaaattctgcaac

SEQ ID NO: 125232 - DNA, 1160 bp, Cannabis sativa
  modified_base (235)..(236): a, c, t, g, unknown or other
aaaaatatataatatatatttgttttttttttttgaaaaaaatgatatttatgatatttatttttgtttgtttagtgctgatggaacatgtacctagcttctaagttggtttaatttgtcgtgtaaaacaacaacataattaattggtttgtttttttaaaaaaattgaaaataaatcaaataatcaaatctacttattttgggaataaatataaggattatttcacaaatacannaaaataataaaaaaaaattataaaaatacgattatatgaaattttaaatatttttacaatttttatgattttatttatagaaaatacggttttttaatgtatttttatattgtattcttgttaatttgttgttgattttttattatttgttgttgtttagattttatttttatgttattttatgttgttttcgtttatagaacaccgtaaaaaatgtaaaaaagaaaatctttgaacctaaaaatgtaaaaaaattacaaaaaaaaaaaataattttatgtaattatcccataaatatataccagcttccagatttattagaaaatctataaaaatatacatataaaaaaaggctacaaaaatatgaaaacttgcaaaacaaaaaacttacaatttggacaaaaaatgcagagtcaaaattacaaatataaaactgtaaacaagtttacaaatttataaacgtgttacatttttgtaaaacaaaaatggcatactagtttactagtttatttttgtacatgaagttacctataggctatagctattattcttaattaaaattatttaaatataattaacttataggaaggaccaagtgattcactcgaaaaatattttcttcaaaaaaataataataaaatattaaaatattttataattaagaaactcccctaaccaatgtccacaaataataaaatattaaatcaattttgttaatcaatgttaaattaaacaatatgcagagaaaccaatcttttagaaattaagatgtaaaaaaaatgtgaactatttgttgatttgacctaataagtattgaaacatagtaggcaacaagtaggggtgtgcataaatccatccaatccaatgagaaccgaccgatccaattacaatcgaccgcgccaaacattggatatccaattgtga

SEQ ID NO: 125233 - DNA, 1106 bp, Cannabis sativa
  modified_base (882)..(882): a, c, t, g, unknown or other
tttatcatcaaatttttaactaaacggacattttgttaatttttttaaaaaagagacatttattaatttaatttttagatttagggccattttacatcttggcctaaaaaaaaaccaggaagcctcttagactgaggagccttggccaatggcccgaattgcgcctaccccaaaaccaaccctgaacagggtataatcatattaatacaaactcctaattatcctaaaacttttatatacgattggtttgagaataatatttaaaagggcatgtgcctggtcactggtcagccctggctttttctttttagaacatcatcatctcaattctcataggaaagaaaaatattaaatggtgatgtgataaggtgggagcattagtagtaaactaaaggctctgtgtttgattgcagctgcatatgcatctcaatttattctcattggttataccttttcatattttggtaaattttgaattaatcactgtaccgtgtaacctgtgatccaagatagcacgatactaattaagtgatgctcacaaagtggtcacgtagtggcgcatgtatggtgtgtatattgatgacatgttgatgcttaatttgtacggtagtgatattttcgtaaatattttcaatattgtctagatcgggacaagatttggtatttgccatttacttaggtctacgaatataatagtgcaacctgatttgaaaaactctgtgatttggtatatggtgatgaccatatgtctacagagcaaaaattatatatgttcatgataaaagactaaaagcttagattgctcttttaaaggagagagtacctggtgtcagctctccaccatccctgacaccttggtactaagtgagctactactggtcngtgggactagtagggtgggcatatggagaccatggggactcatatgtctccatgagttggaatattcatggacactatcgagccgacccagtagtgtgtctaagaatgctgccaaaggttagcaagtatgtttccatcggcttgcaggtatgccgcttgcatgggacgtggcctaaacctccaagagacgttctggtgcaccttggccacgagtctcaacacga

SEQ ID NO: 125234 - DNA, 595 bp, Cannabis sativa
tttttctgtttctttttattcttaaatgattctttcgaatcatcctttcttttcgtgtttgaaccattaagattacctattttagtcaagattgtgctcgttgttgtcgtactcgtgctgggttcacttcttgagtcagttttcaacaacttcatctcgtttctcgcttcctctttatgcataaatacttgtgctctttcattaaactcattaatgtttctcacaaggagaccttggagatcatcccatacttcacctccagccatggataagtcagttgttatgctgtctgaagtgtcatgagttgtatactgccattagagttcctgacctttttagcaaatgtgctaaagcgacttaaataagccttcagtgactcccttggttgttgttttatattggctaaggacgatgcttaggtcgtcggtcctttgcagcttaaaattgctttttaaagtccctggacaattgttctcaagatgttatggaatgatgagtaaatttgttgaaccagctgctcgcagctcctattaaagagctcgggaataaaatgcaatgcaaactattcgagacattactggctcgcatgatagtg

SEQ ID NO: 125235 - DNA, 960 bp, Cannabis sativa
tttttggggttttgaaaaaaaaggtatagtttttttagggttttaattattggtttataaatcaaattttttgattttctaagcatagaaaatcaaatttcccttagtatattcttgattatacatttggagagcgttacatatttattattatgccctaacacgaaggcatataattcaattaattaattaactacaaataattatatatatctaattaattaattaattaataactagtcaatggctacatattctctttaccacaccacacagacacacagtactactacgtaatatataaatagtatatatttgaggaggacttttgtttaagcatatatatttataaataaagttatttttgaaggaatttttgtatgttttgattttttacatctaactcttttattttattttgtgtagccaaacttttttatatttttttttttataaatttaaggtgtgaactgaatattatcgttaaatactaactgaattatattactgtattcgtttcaaagtactttaacgtatatacacaaatgttcatagtaattatttagttgatatataacagtaatatttaacgtatgttttaaatttacaaaaaaaaaaaaaagtaaattttaaaaaaatttgccacaaagagaaaaacaattaaatgtttaaaaattaaaacatagaattcaccaccaattactcttataaatatatctcctaactcatagtatataatatactatgaggaattaatgctaattacaagctcttaatcatcctctacgtccgaaattacatgtcgaaatattttttttcaatttttttttatagcggtattcgatatagttacagtatctcggtaaatttttgaaaaattatgaatagtttacagtaccaaaaacaaagttcttgatataccaatttaccacgcgcgttcaaaaaatttcaaacttattt

SEQ ID NO: 125236 - DNA, 1640 bp, Cannabis sativa
accataatcatgaaaactacatgttaacataaatgacttctaatcttctattgatagtaaataaaattatattgaaatgggttttatttaaagcataaaatcctaacaccttaaacctcctagtcgagcctaatccatcagtactctcccaatgcttgaccacaattgacaatccacatattcacaccaggcatcttcaaagtgaaaatggctatgcctcttaacttgatcacatttatcatttgaatcacacactagtatatcaaccactaaagctttatggtcaaattccatccaatccaaaattttcacacaaaaatactctaagctactcttcattacataaagctctatccaacctctccattacaccatgccaattacaccacataagttctattttgcaagagaagaaatcaattaaagcacaattgtcaataacttttctaaaaaatttcatagcccctaaaagtctaacctgtccacccactttctcagatagtcaagttatttcattaaagtcccccaaacacaactaaggaccatgtatctccccatgtaaatttcgtaataatttccaagaaaatttgcgttaagacacctttggattcctgtaaaaaccagttaggtgccaaggtacaaatccctctccagcaaccattgtagtaatatgacccagagaactcgaatcaacacacagttcgtactcatctctccacattagtaataaaccccactaagccccactctatccactgtccagaacttattaaattgcaaactcgaacacaatctctcagcttggaaccttgttaacttactctcaattagaaatttaatgcttgagttaaattcctaaatgtgagattgtaaagctttcaacatccaaggttttccaattccttggacattctagcacaagagtttcattgctcttgacgacctttcttatcaaggctccttgcttcattacaagaattagaagaagataaatccaaaatatcataaataccaacctcacaatcatgaccatcacacccaaagactattccatctgagataacatcatttctactgcatctaatcccttccctaccaaaggtggagaaaaaaattgttgtttagcttgacgcttggccttgtgcttaatcaaaatgattttatgttgacccacacaatgaccctcttttgcacccaatccacctcaacaactgcccattaatcctctaaattccctagaaagttaactttaaaaacctattgatttccctttgtcaatactacccatatctttaattttcttccttttctctttctctttattcaacccctatatcactcccttgcatttttctttttgttcaaagtcacttttttccaatttctcgtataacacctactgaagcaaaagagaaaataagggcccgtttggcacaatttttgaaaaagttaaaagctgctttttgaaaaaattgtaataaaattttgtttggtaagcagtcaaaaaataactttttgaagaatttttggagaagctggagctgaaagctaaagctgctccaacccaacttttagaatgagctgttttgattaaaaggctataataaacttttttttgtactaaaatcatatttacttat

SEQ ID NO: 125237 - DNA, 867 bp, Cannabis sativa
atttatcaaatgtaaaaaaaaaatcagaaattcagtatataagaaaaactctaagttgatgtgattcttaagtatattaaaataaaatataagttatttttttaaaattaaaatatttaattattatttattttattataattaatatatatatatattaaatattttaatttttctaatatataataaataagtaatacaaataaacttattatagtacgtcttttaattaaaatagttttttttttttaaaagttgggttgtaacagctttagcttttagcagtagcttttccattaattcttcaaaaaactgttttttaagtgcttgctaaacacattcttatcacagtttttttaagaagcagcttttagccgcatactcataatctaaaaactatcattaccaaaaaaacttatatttggtaacaactttttaattacaacatagattttttgtgactaaatgtgaattttagtcattacaaaaagttatttatgattaaaacataatatttagatacaagctatgactaatttagatttaatcacaataagtattgtgattaaaaatatatttagtcacaataaattgtgatttttgtgattaattacttttagttacagactttatagtcacaatatacgaatgataatttataattaaattgtgactaaaagtaaaaaaatttgtattgtataataacacatacatcaataattactatttgaacgaataaatcaatttattcttagtttctaatgttcaatatcgatcaaacataatttggttttttcactacaagaaatgttacttttgccagcacatttttgtgttggcaaaagttggtatagcgctggtaaaata

SEQ ID NO: 125238 - DNA, 1446 bp, Cannabis sativa
aattgtatttgtcattgaagattttgataattggaacaatataattacatgattttctttaaatttagggctgaccctgaaatataataggtcatagaaaaaaaataggcctttatttagaaaaatatgtggtattttttaaaatcaataaaaaattgtataattttaaaaaggagattttttttgttgggcccctgggctaggtgggccctaggcacaggcctagcccgcctatgcccagggttgtgcctccttaaatccaatatgtaggaaccataactttgtgtatggcaaattatgcgtgtctcattagttgtttacatgatcatactatggtcatactgagtgtatgttatttttgttggttcaatttttgttagtaatctttcatgcactatggtttattcgttaactataatttgctaagggagagattctaagtgtcatattttttcagtgtggtaaattatgtgttggtatcatctatttacctgttagatcgatgcatttcgattttttgggtttatacatttactttgacaattcaacatttaagttgaaaatatttttgtcagttgttatgagttggcattctaatattaagtcggttgtttggaaagttattctatatattcttgatttttgattctaacatattctaaccaactttcatttgtttagattctttgatatagatatttctttgctaggacaatttttttttctctacttttactttgttgttgtaggttctttattgattgaagagttcaagcttctgtgtagaaatgaaaattgaggatgtttaatttgaagggagttcatattcatagatggagggatttgaggttgtatttctaaaggcatcttgagtgaagagtcagagaatttgattctctggtttcaagggagtgaactaatattcttgagtgggtatacaagtattcgggtaaattgtaatctctatgcatgtaatatgttgatttaattttaaaattgaaagttgtatataatattaattttatagtggagttattttattctagttcagagaacttaagtactagctgcctaaaatataattttaggatagataatacttattattaagttagttaaggttatcataattctgttatgttagtcagtctttctgttcatacagtcggttcctactctgcctatataaggcttctttctgtatcaattcaaggagtcttacacaaaataataaaaccaaaaattcaatttctttcttctaaatggtatcaaaagaaaacttgtaaatcttcaagctttccaagctttcatcaatggagcccgtaacaaaacaccatttcttgaaggtacactcccttaaccccctcctaacgattctctttttggttcttggattcgatgtaaccaaatggttatgtcttggattttacattctgtatctcctga

SEQ ID NO: 125239 - DNA, 1469 bp, Cannabis sativa
  modified_base (1418)..(1419): a, c, t, g, unknown or other
caatccatgaaagcagtagcatttttctcatctgctcttgcaaacaaaatagtgtcatctgcaaacattaggtgactaaacgggggcactccttgaaatctttattcctttaatgtctcccagttcttgcctcttagcaatcagctttgataaaacatcatggcagagaaggaaaataaagagggatagggggtctccgtgctgaagacccctgttaggaaagatcttcttctgcggaaccccattgataagaaccgagtaagagacagttgtaatacatgtcattatcaggttttgcacctgactatcaaaaccgttggcctctaaaactctcttaatgaatccccagtccattcgaccgtaggccttgtgcatatcgagcttcagcgccataaagcctccacgacccttcttctttttaatagcctgaacaagctcctgggttaggatggaggactccgcaatccatctcccgggtatgaaggcagcttgaaaaggtgacactaatttgtccatgaccgccctatgtctggttgcaataatcttcgatatgattttgtatgcaaagttgcatagacttatcgatcggtatttatcaacatacgtagcattttcacctttcgggatcaaacaaataaaagtgtagtttaattggctctgaatacttccctcagagaaaaaggattggaccattcgaataacactactgccaataatgtcccagtagcttcgataaaaacaaactggcataccgtcgtgacccggagctttgagcgaatgcatagcagcaatagtgttgatgatttcctcttccccaggctagtatgcttctttttaccagtaataatctactccctttttgttgtatatctatggagaataacaagattacatgaacctagtcaagtgagttccttgctatctctcaagattacaaatatttctacaaattttttgctgtcttgaaaatagagaacccgatcccctaaatagtgaatacgatccactatttatagggagaaggatgtagaagactcacatttaattacagaataaataattaatgctaattgggtcaatcccacaaaatcctttaatcttccttgattctcgcaaactcctaattataggagtgtggactgacttatttatggagaaatcagttgacgaaatgaatctagacattttctctcgtgaggatctctggtcagatgtccttcctaaggttgttcgtggtgtgggtggtgcagtttttgatcattttttcaaaccaaccctcacatgcaatttttctaatttcccaaactgcacccacacccgcaccgcgaaattaaaaaactgcaaaaattgcaccgcaaaaaatagtgcggtgtggtgcggtttctacagtttctgcagtttggactatcaccaaatanntaaactatcacaaatacaacaaaacttgagcaacacttgtcaaaaatacc

SEQ ID NO: 125240 - DNA, 2084 bp, Cannabis sativa
taattaggatttttgtcctataataaatatcaaattatacttttagaatttttgaggttgttaatttttttttttttttcgaattatagagatcgttgaatttaaatttttttatccaattttactaacaaaaatttgatgtagataaaagttcagagaccacgatttgatatatattaaagttcaaatagcgcgatttgctaaatgtcaaagtttagaatacacaattcagtacatgaaaaatcatcatgttggtagagttgaattgaattagacaaaaattcttaaattcaataatcaaattatttcagcataaaattttaaagactttagaaatttgtgagcataaatttaggaaaaaaaatcatatatcctatcaattttatctccatataaaaactgccacacaaaatgtaccaataataataataattatataatacactattcttttatataaactttttatatttttaggtttaattttttcttttatatttttacattattttatgaaaataatagcaaaataataataacaaaaaataacattaaaataatatataaataataaaaaattaatagtaaattaacaagtgtacaacataaaaatacatcaaagtactttatttcttgtaaataaaatcataaaaatcgtaaaaatatttaaaactccgtacaatatttttgatattttttttttttgttattttggtatttcttttgaaattatccaataataataatctcattaattaccttaagccatttattattattattattattaaaaaatgaaattatagtaagaaatagcatttaaatagaatgatataaatttttggtagggccacccaaatgacttgtattgggagttatatcaatattatcactatataaaaaaactcacaccattaacaaacaaacaaaaaaaaagtgcccataaaaaccactcactcatattctctcaattcctcactttaactcttttttttttttatttatttttttggttctaaagatgagagtgagaaaaatcccatttccattaatgatcttcttctttgtagctctactaatcagctacggtggtggtgcagtggatctcagtgaagacgcagcaacagtactttctgggcctgagagtaatgggcttaatagagcccagtttccgatgggctttgtgttcggaacagccacctctgcttaccaggtcgaaggtatggccttaaaagatggccgtgggcccagtatttgggacgttttcattaataacactcctggttagttcatctaatacctacttttatttttaaattaattttattattctttttaaaaaaaaaagtaataataattttattattctttcttagaattattattattattttttcattttattttttgaccaatgaatttcaggacttattgcaaataatgggacggctgacgtggcagtagaccagtaccaccgttacagagtaattcaatttgtttttgtcctttttattaatttcataaatactccatttattaatattttagttataaaaaagagagtattcttcttgggcaataggtaccaatagtcgtcttttgattagctaacgatatttttttaaaatttattatattaaactatatgaaatctgatatttaattgaattaataatgatattaacacgtaaatactaagtaatttattaaattaataatgatattaactatattagtattttgtaaaaaaggaatatattctcttttgtatttgtatgataaattaatttgttaatcaagagcagttttagaattttacatgcatattaatatataattattattattttttgtttgaaatgaatataattattatccttaacctgaaaattttcaattatttgacataaatggcattgaatactattagacactagtagtatttaatacatctatacatatcgttttgtgattgactagcaatactatttaaaatttattatattaaagggtaaataccattttagaccctctgttttacaaaagttaccaattggaccccgtgttttgttaaatgacaaaat

SEQ ID NO: 125241 - DNA, 1327 bp, Cannabis sativa
gatattggatagagtgggcagtgtagcttatagaatagctttaccgccatcattatctggggtgcacaatgtatttcatgtatctcaactccggaaatatgtgtataaaaaaaaaaaaagaacaaagaattatgtatataaaaactaaaacataagaaagtttcgtacctaattaccttaatgaaaaatttatatgtttccatcaaacaaagtaaatataattatattaaatatataactgaaaaataattattgtaaaaatatgattataagtacttttaatataataatttatcctaaaaacaatctctcaaaatataagttattttgaattgggacaaaaaataattttttttttaaaagaaaaaaactaattatatgtattggtcatttcgcaagatggtgaagtttgaaattatggtaaaaattgaagaaaaaatattctttttagtgattgaatctaatttgtcacacaacacatgtaataaattttggaaagaattctagtcacgtgcatgttttatctagttttaataataaatgtcattttatttatttctacttaaaaaatagtattgttagtaatagtattataaatttattaattacatttatgtcatagtaattaaattattctattaatttaatagtttggtcagaatgaatataaaatgtaagtgcacatatatatttatttatggccataattaatgaaatagcaaatgattcaagtactaaaatttagaaatgttgtttatataacatagatcatatatctagtataaaagattgaaaactatgacatcattacatatttttacatatttttaaaggttttagcttgtgtacacatgaggtttaccccaacagattttacatacgtcccaattgattttgttgcttgtgaacttgacaagtaggacaaaaggaatgtcaaataaaactaaatgtaatataaagaatatagacttgaaatatatatatatatatatatatagagggtaaatctactgtgggcttagtatctttacctcatgatataggaacataaatgaaaagaaaataaattgtatagaatttttgcttttgcatgtgcagaagattattatataataatattattatattattattttttattttcttataaatatattaacagttggatagactttggtttcaatattaataatttaatatagtacatatatgtaataattttaataattttttttcataaaaaaaaagtataatagtactttacgcacaaaaaaacaatgaattagttttttttttttatataacattacttttttaaaattattta

SEQ ID NO: 125242 - DNA, 2458 bp, Cannabis sativa
  modified_base (741)..(744): a, c, t, g, unknown or other
ctctccctctctctctctctctccttcgaacccccttagaccagctagggttttgtttgttcttcagcaattcaaacaattttcagcaaaagttttgtgatcttaagctctaggtaagttgttggcttcaccctttttagtttcttgagttttaagaaaatggattatgcatgttctgtgattttcgctactgtagttgctgttggtgtttgttttgtgtttctgatgttagattattggtaaatatgttgatttgagctagttttggtggctgttaataggttggaggaagctttgagtcttagaactcaagcttgactctttaattgtgatttttaattctgagctagattagttgttttattgcttgaaatatgtctattgggatataatatgcaggtctggaaggtttggtaaagattggaattgatttagtaaggtttttgaatattttgggttttctggtgtaaaccagctaaccggttttataggacctgtaaaaccggtttcggatttgctgctgggttccctaaaaaattcatgttgtcgattcgtgttagttctagagctttggttggttaaatcttgctagtttagggtattgccatgttaggttacagtagataggtttttggtttaaaacctaagtccccggttgtgatttagcgtgtcacttatccgtgttgtgatcgatatgatttaggagcctgtaattcgctgagcagttgttccactcaggtnnnncggcacacctgaattcaaaattaaggaaagattagtataatgtcatgcatattttattacatgtttaacatacatattgtttatgcctattagaatacattaatagcagtaatagtatacttaaaattgtactgattactgagaaatgtatgttggctgaaatacaaatcgatcttgtcacatcaatatggctaaattatgactgacacacttagtataggctgacattatggtcgatagtattgtcgtatgaacgttctagacttagtactgtgtgggacacggggatagggtcatgattcggtgtatgggcgtcagattataatctgagatattattatgttttatattatgcttttcttactaagtctgtcgactcacattgctatttccatgtgtaggtaagggcaaggctaaggctgagcaatcgtgaggacgagcaaatgaagattgtacatgtcggggcagttaggccttgagcgtacgatctttgggacatcagggcttttgctgtatagtcgctaggcgacaaaattttgttgtaaatattaaacttttgtgaatgtattttgtaaacaggatcacaaaatttttataagtatgctactttatgttttcaattaaataagaaaattttaattaatcacgatttttgataacctcgttgatgagcaacgagctgcacagtatgttaaaaatcacgctaacatgcctaagttagttagggtgttacacttgtggcgaagaattgtttaattttgtacgtaactggttattttttattctatccctttttctgttatttagtttcttgcttttcaatttttaactggttattatttttatttatagtgtacagcatctgaacgtggcattctactatcttaggaagagtattttattcgatgttaatgttaataagagagagtgatgaccacgtgcacatattttgatgcaacacttaagggagtatatgctgattatattaaagccaaacgtgatccaagtgttattaggtacgacaacatggtcaccgattatattctgggacaatataacttttgttttcaaccttgaattggcgtggacgatgttgtcagtccctgtcatgtcagtctacaaaaatattggattttttttcacttcagcattttgaggacgaaagtcttcttatacaattcaatgaagaatatgaagacaaatcagatgaagattttgccgatctccttgcgtattgtgagttactgccatatttccttgatttcttaaattttatgatggtaggaacgatattagtttggagtcatgcccgttatgctgttccaaaggataccccaattgtgtatgagtttgtggacaagcttcccagccaaagcagaaggtaaataactggttattttttagcctatgatacttctatcatttttcattgttttttttctgcttcaataacgtgttatgtattgttaattatttttgttttttttttttcagtgattgtggtgtgtttgtgtatgctaatctattcatccgagacaagattaatgaggttcctccaaatatggatgacatgattgcaaactataggaatgacctcgttgtgacattgtataactatgcccagaagaagattaatgaaggatattctactgaagatagggcaaagggaaagaagtccaagaagaagaacttagattcttgttaaatatttgac

SEQ ID NO: 125243 - DNA, 576 bp, Cannabis sativa
ttttaaaaacaaaaaattgattaaaaaatgttaccaaacgccacctaaaaaaatccacacttctgcttcaactagactttataaacgcagatgttaagttaagtcttaattactaataatatgggttaacactattaaaaaaatttataaaaacccaagatattaatttgtatataatttagaacacaataataatatataataattaggtacacatatctaattgatatatagcaattactataattcgatagtgcaatacaattaattaagtcttcctccctatgtctctaaatcagaagcaattttatttatctaattatccaaaagatatataattatgataagataatatgtatttatagaattaaagaatgtggtgccacaatcacatcaccaatgatgatgcaaatatgtcaaactcagttaattacaaaggcaagacaaggctaaactcaaatgatgacatcattgatatgtatatttaaggctaattaggaattttaccccctgaactttgatatgtagtaaataatgtctcttgaacttttaaggtcgtttaaaatgccccctgaa

SEQ ID NO: 125244 - DNA, 2345 bp, Cannabis sativa
  modified_base (2282)..(2288): a, c, t, g, unknown or other
ccacatacattacgtacctcattgtacgagtgttggtagggtttgtttcgtaccctaagtaccactgagtgatataccacacacaccctatactgtatccctgtaatgtactccttaacaatatacactataccaatgcactctataccataaccgtacaagtgttggtagtgtaacaaatatataagcatgaatatacacttaacatatacatacactcgcatattcatattacacattatatacagttcttacctcttttccaaattcaagtgagttggccaacttgagcggaaagtctcgtgttggatggatgccctaatcacatattaaaattgggtcaatcacatgtccgaaccctaattcgggaaactcgagtctacaactcaaggctctgttatactctctagtgattacattaacctaggaaatagggaaacacccaactaaggcactgaaatagaccagtatagagaaaatgggttgttcggggaatatgtcaaaaccggttaaccggtattacatgtcctggcaaactagtttgcaccaagtttccccaaacaacctcaaacttgctcaaaagtcatccaattgccaccaaaccttccaaagtacataaaaagagtataaacaacatattccaaccaataacatccagaaaaactcattgaatccaaacatgccattaaagacctaaacataagtttcaaagttcaaacttgtgcaattccaacataaaatagcaaaaccagctactagaacttagaatcaactcaaattgaaaataaaaactgaaccaaaacctaatcaaaacctaacagtcctaatttcctaaaatcacaagttacaactaattcaaacattaagaaaaacataaccaaagtgtgtctagcgcttaccttgattaaatcttcctccaatccttgctgaaaacgaaaaattcagccatcaaacccttggttcctagctggttcgaagagaaagagaaggggaaaagagggttctttgagtattttctattttttggtcttttcctttgtttttctctaagtgaataaaggttagtaaattaattacttcggtgaaattagaatatccaagtgtcactcccataagcaaccaccaaacctcttcttttggcaatttactaaaatgcccctaaacttataacttaggcattttcaagactaggggtaaaatggtcaaattcaataacccccctcaacctcaatattttattttctccaatatatatcccactaagaactaaggttctagacttacccttttgatcaaactagccatccatcgcattttccgttgtcgccgagtaaaaattgtaaaaattacataattcacatataattcaaataatactcgtagagtttaataaaatctccagaattgagaaattataactctaatgcccatttctaatattgggacccacaaataaattaagttcataaataattataaaaataccaataattagtgctaattaccttttctaatccaaattacaaatgcagtcattacaattatccccccgttaaaagaatttcgtcctcaaaataccaataattaaaaattacaaattttattttatgtttaatattaaaaaataaaggagatttttatttataccacaaaaatttataaatgcactccattttaataatttttattttgcataaaatacatatatttaattatattagtttcttctttccaatttatattcttaaaaaatatagctattaaataaaaataaattatatgaaatttcgttaaaaaaattatatataatttttgttatcccaaagtttacacatctgacctggcacttacacgtggcataatccagccaactcttaaacatgacaaggaacttttgagaagaagtgtgcttggtaggtcccatatggggcttacatccataagttgtagatggatttccatgaagcatctggccaggcgatcaacatgtcggtcagggaagataagagtaacaccttgcaaaagtgattccactagtaatcccacaaggaagacatgtcttgagcaaggcctgaccaggtgaatgatacgaaccacaccaacatttgtgatgaaacctgatacccattatggcagcctctaagaattcttgaaatttggatgtggaaccacgacccaatgcttagttaaccatgaaccttggtatgaaggaagacgccacaaacggtagtggaaattcgcttgataagtcaggttgaacgccacaaggaatactccttgannnnnnngaatagttctctcaagaactcaagaagaaaacctctcaaaattttattccaaaatat

SEQ ID NO: 125245 - DNA, 2830 bp, Cannabis sativa
gattctaaaagctgctccattagtattcataataatgcacctcgcaattatgagcgtcaccacaacaatcgtcccccaagggacgcaagaagacctgatttgcgagaatacctcaatcaaagacaatctgatttgagggaacatttgaatagaaggcagaatccaattccatcagtagcaaataacaaccataatatcaatgggggacgtcaaaacaacatccccaagctgacgatggtgaggaaggacaagttaatgaccctaggctcaatgctttgtaacaaatgatacaacaactgatggtgcccaataaccaaaatgccactggatatgatttggatgaggagccagagccttactctcctagaatattggccctaccatacccacaagaattcaagatgccgaccacaaccaagtatgatgggagtacggatcccagggtccacataagtgactttgacacacttatgcgtgcccaccaagtagttggtgactaaaaatgtgtgttaatccctgtaacactcactggagcagccaagacttggttcaagaaatttaagagacactctattacctcatgggaccaactctcacgtgactttaagagggaattccgcgccgccaaggccagaaagttagaatgttcctcccttgctaatgtgaagcaacaaccaggcaaaagcttaaaagcctatattaaccgatttaatgtcgaggccgccaaggctagagatgttgatgatagtggacaacttatggcactggaggcaggaattactaatgggtcccaattttgtgatagtttgcaaggaaagagagcacacactatatgagttcatgaaaagagctcaaaagtacatcaatagggaggaggcaaggttggccaataaccttcctctttcatctggagcaatagaagctactcccacttcaacaaacaataacccctccaatgcgaacacatccaacaagaggaaaaatgaccacggtggggaccacaacaatactaagaaacaacctctttacaccatcttcacagaattgactgaaatgctagaaagaaactattttcctcattaatgaacaaactgtgaatttaagagttccagaaccaatgaagggaatcagaaaaaaaccaagatacctcaaagtattgtcgataccaaaaagatgttggccacacaaccaacgagtgtaaagtcttgaaaatagaaattgaagatctcatctgagctgagccacttgctcgttatgcgcacaacaagcagggggcaaatacccaagcacaaggacaagcccaaaacaatgcccaagtagcgccaaacaatgtgcaagccctgccacaaggccaaatgtagatatggtgccaccattagaagggcatgatgtcttagtaattgccgaaagtccacactttgctggaacaagtaatggggcccaaaatgctacattaatgaactgaaaagtagtaacaatgcacaagtgtcaccacctcaacgtcacccaaaacaaccacatacaaaaaatttcattatttttaatgaagaagatggagaccatgtacagatgccacataatgaccccttggtgaaaaccacccaaattgacaacaagagagtgaggagaatacttgttgataatggaagtggggtcaacttattatacaagtccaccattgacaagatgggacttgagactcgtgatttataatcgtgccccacatatctatatggatttaccggtaaaggcataacaagtattggaaaaataattctccctctcataatgggagaggccccacaaattgtaacaaaaatgatagaatttatcattgtggacattccatcggtttacaatgtaataataggaagaccagcgcttatcgcactgggggcagcaacatcagtgagacatttagttgtgaagtttccaacaaactatgggaatgacataatacgtggggaccagttggcggcaagggaacgcaaggggcgtgcataaattaatccaatctaatggcaattgatcgatccaattacaaccgaccgccaacattggatatccaattgtgatcgaatcagattggatgttatttttgaatatccaattggatcgaattggatgttggatggggtgtccaaaaatccaatacatcctacatccaatcaaactaattagtatgttcattttatttggatgagtaattaaattttctattattatacgtaaattatatatgtatatataaaaattaacattaaaattttactctttttttcttggattggatgaatccaatccaatccaatacatgctagacctaaaatattagatgcatctgatccgatctaaaaaatactaggtctaaaatattagataaatttaaattaaactaataaatatatatataatacatctaacggatagaactgatccaatccaacatccaatggaagttggatcgattggatgattgaaattatttggatctgatcggatggtaaaatctatcatctaatatataattggatcggatctggataggctaaaaacattagatgtggtccaataaacacccttacgcaacagtgtggcactaaaaggacaaccccaacttgggactcaacttttccaagccacgacttttgaacacacttgccaagacaataaaagtggctaggagaagccacgtggagccacccttttttagtttttaatgagtgcatatttgtacattcattcttagtcaattattagatagattaatatttatttttgtatagatctaatgtgttttctccaagtgtgtaggtttgtgctaaaaaga

SEQ ID NO: 125246 - DNA, 1272 bp, Cannabis sativa
tttccaacgatatatagaactcccaaatcggagtttggaatcaaaagttatgaaatttcaaagttggaaatccaatctgcccaaaaatttgacggcgggccgcggcatacccaagccatgtcgcggcacctgggaccaactcctaggttccatcaacaggggtgggtcgagccatgctcagaccatgccgtggcaactgggttccaaacccagaaaaccaacagcacaaacacgattttcagcccctaaaaccatttcagtttaatcaaaaacacaatcaaactctcaaattaccaaataaagttgctagcaaacattatagggttaaaatatacaacttaagcattaaattccaacattaaattccaacattaaactcccaaaatcaaattgcataaataacccaaaactcatgcttaactaagtaacttcaagctcttgaacaagagcttcatctcaataaactcaatcaattttccagcagcaaacaccttaaaaacacaaggtttcaagctagaaaatagcctataattacttcaagctcaacaacataattcccaaccaaatcatgcaatttcccactcaattcaccacgatcaaaaccaaaaccatgaacatgcaacttcaagaacaaaacaactcaaaacatgcttttcaacaaataaaaaccagcaagaacttcaaagcataaaacagtaggaatactacctcaattcctttgcacacactagcaccagaatcaaagcttcctaagcaattcccaaggaaatttttcttcaagccaaggttgaaactcaaaaaggcttaaagagagagagggggatcgggtttggggaagaacacaccagaaattgattccttattttctcgaaattactcttttatcaaatatagaaaataaaggtcaaaagaccatcttgcccctagggccaattcactcataaccacacatacaaggataatttagtcatttcctactcatttatttccaaataaaatttagattatccattattaaataaaatgccaaataattcaatccaatttgcatttcgggcctgaacccggttcggcctgaaatacccagttgtgactatatcgcgccaacctgtcagaacacacttaattaagacagcacaggcatacaatataatataataatattgttccataagcacgtaattaaatttaattcattattttacccttctcgagtcataattactaaaatgccccctagctcaccagcagggtcttaccatgttataaatc

SEQ ID NO: 125247 - DNA, 2020 bp, Cannabis sativa
attgtctgaatatgaatcttgaaggattgaatgcggatcttggaacctcttcttgtggctttggctttgatcataacatttttggtgaaatactcatccttaattccacgttgttatgctacttataacactgcaaaaaagatcacatgaaactaaaaaacaaaaatagaagaataagaaccaagaacacaaactgttatggcaaaatgaatcaggtttattaactttgaatcatcacatgtacaacctaaattgaacttctcaaaactatacaattgtggtgattaacaccattagaactagagagagataaagctgagagaactctggtttcttcaaagtggtgatcaataattgaatgagaacaaagctaaattatatataggctttccaattcagttgcccaagtaggaagaagcattaaacttaattattttgtttggcaagtagaattagtagtgatgacttggacaaatgagtaagtagactaaatctccaacaagttatttatttttctattgcaaataattttgtttttgaatatttcagattttaattatagatttatggttaattgggtttggatggaatataaggaaatagagtcattttaatcaaattatttatggtcattaaattaatgaggtatggaacagagtctcatttaaattacaaaggaaacatcgaactcatattgataatgtgttgagaacgagaattattctcatataattcctctttggcccaaatttaaatctccttcgaaatcacaagaacccaaataatttttcatctctccatcaataaaaataaataaataaataaataaataaaataagaatattatttatgttggggtactattttggattatatgttttgaaaaaattactaattggatcatatgtctaataagttaaatgactttgcattttatagtaccctaaactgttttttggtcaaaataaaaccttatagtaatccgatctagatgtattatggttacattttctgcatttagtttctgcatattatcaatgtgggactctcgagatggtaactattttttttgtcaccaatcttgcatgactcgatcacaagtggctcttttttggcacactattcctgaatcacaagcagctcttttggcttgtctttttttgggactggtttttgaatttggatcggttactcattagagttttagtttggctctgataccatagttttatgcagaactatatggttaaagaagtaggaataggtgagtgtatagtaaggtgcatgagattctatctcaaaactaattgacattaatgagaggaataactcatacatcttatgtatggtatttaatttctatattttatcaatgtgagactctctaactgttgaatcattatatatctctctcgttttccggtacctctctctctacctctcaatctttctctcttaatcttgaaatctcctctcgaaactcaccaatctagcatacatgaaatgataattgttggtatataggctcaggataaagattctaagtcagtggctgcaactgtttagttgttaataagttagttacgacttaataaacttaacgaacttcttgtaacaggatctccacatcagcacaagacaaactgctttatgacaagacatacgcttcctaaaagtgtatgtagaagggactttctagataggaaagacaacagttggagttgactattcgaaactcccttccagggggaacaactaactgtctgaaactcctttctggtggacatgatagacatctgagaatgctcttttggatgacacctatcattccacgagacttctttcgaatagacaagttagactttcagaattgccctttcgaaattcatctaacttttcatgaccaaaacaactttagagatcttttatttggaggaactataccacaataattaatcaacaaaaatatagcttgcaatctaattgggacatctccccgttagatatacgatcaggatta

SEQ ID NO: 125248 - DNA, 1383 bp, Cannabis sativa
ggtgagggaagagaaacagaacaagtgggagtcaaataaaaacaatcagccaattataaactagtaacattgcatccaagtggattttgattttcttttcttttatctaagcatcaaaggggaattgatagtagtgtacgtctaaacaaaataatattaatatatattctaaatatattttttttataagagaattgctatttgataatttttttttattattttttgaaagaaagctatttggtatttgaagttggcactatattatattatatatataattatttagctgtttttctacattaattatttattcaatcaaattatatgagatccaaaattaggctaattacaacaatatttggcactttataaggtgttgtttaacatttctcttttgactattctttttatttttatttttatatgaaatttctctttttataattagttgggaatatgtatggtggtgactagagtgacaccagattagattaattatattttggggttttgtgtgggttgtttgttatctctctctatacatatatatgacataaaatatataataatggagtacttgactatcatatatatgtcccacatccatcccatgctacatatatatagcttctcttgttggttactggttagatagcaattaataattaattgtgaatcatatgaatatcataatatcacagctcacttttaacaaaacaacctccaccacgctttgaattctcactactttttcttcttaatgcgcgcataaatatcgtatacaaaattgttaaagagttacttttggaccagtttattgtatattataattaggctatttagaattttcgctcctgaattttaatgtaatcgtgcatttcaaatttttaggtcattaaaagtttttcttttaactatttgtattgtctgatgcaaaaacgtttatccaattttattaatgaatgtctaccgatgaaaattcatgaaacataattttgtacaagttattaattaatgttatgagacatgattggtacatatcaaagtttgagaggtatgatttaatacatgaacaatcatcacgttacttaaattaaacaaaaatagataaaaatactaaaatttaacaatctcaataatttgaaggatttttaataacttcaaaagtaaacatcttaattaatcttacaattagaataaacattttgtccattttaaaaaaaaaaatcaaaataatttacaatgtgaaaattttaatttaaatagtcagttacacacgtaggtattttgttttacacttgtacaattaattatctaaattttttatttgacatcataaattatttaaaatttctcaaagagtagacaagtgttggccat

SEQ ID NO: 125249 - DNA, 2122 bp, Cannabis sativa
  modified_base (1420)..(1420): a, c, t, g, unknown or other
aatgtaaaatttaataataaaataataataatataagtcatttaatgcaaatgagtatgttatagctaaaatttaataataaaatattaaaaagaacataatgcaggtaaatataaaagtatagcatttattgcgatgcaaattttttatcatgctatattgtaatgtaaatttggatcacttttgattatgtgagatttttgcatcataatttagcacactattagactagacttttaacaatgaaaactatattttatatttgcatcacttatttgtatctccattggagatgctgtaatggttctacaatgaacacattaattcaggtgcaaactcaggagcaattgccttaagagcactctcataagcttttctattctatttttaaaatacatcactatttttttttttattttaaatcaaatttttacattaccccatatatcaatatctttaaattaatacttcaccaatatttattttttaaaagatttaatatattttatttatttcaaatatataatattaatatatacacatatcatcaccatgtaaaagaattactcaaacataaaataattaataaaatatatttagagggatgaataaaatatgctagtaatatagtattttataaaatatgtggcagacccagaatttaaagtgagtagacgttttttttttttggtaaaacaggggtaaagtaaacttaaaaaaaatattcacgcataacctctattctatatgcaacatagtttaatcagtacaccaaagctaacattatatctacgaatatcattttttattataaatatatgtcgtaactaactaaaatgtatatacatattttcctgattttttttttcaaggggcgactgcatgcctcgcctcacttttatgagggtctgcccctgagcacgaatagtgaattttaaaaaaactttaaaataaagaaggaacttaaagcatctgatgtagtgtatttttagttagttttttttcttcaaaaaaaataataatttaaagcttctatattttagagtatctgatatgagtgttctaatacaattcgacaattcatgatatggggtttgatagttctcttgtgaaggtacatgtagactaagtagcattgtaggctcacttgaagttaggaccggtcttaagctatttcaagcggtctaaattaaaaaaaaaaaaaaagaaatttacacttgatattgtgtttcctagtttttttacaattttactgttatgcgcataaacagctcataatttattctaatcagttttattatattttaaatttgtaaacagtattgtttgtatttttcattttttttttgaaatttggacaataacccatgtgctactcattcctaagaatatatatatatatatgtgtttatatatatanatatatatatatatattgttcttaagcaaatcagtaaacacaaacacatattatttatttttcattgtttttgagctttttcctctattcttattcttcttcatttttttcctttttttttccaaatctaagtcaaataaaagctaactccttttttttttttttttttgtaggtaactaaatagaagaaagagtatatgaagaagaagaagaagaagaattattgggaaagataagagtgtattttttgattttctaggactggacctacatatatagccgttattgcatcttgtgttgaggctatgcagaagatgaataatttttttaatcatatttttttttttattttagtattgttttacagttattttgtcatgatttatttatttgacgtcgatctcactgttcttactccattttaccaaaattaatggttgatattttttgggtgttttcgtattgttgtggtggttctatccgtgggtgtaaaatatagaggctataaatatattttttcttcctcctctatggctatttttgtggttttttattctgattctcctataaatacatttgacgagctcactgtaaaaggttttgaggtgtatggttcttttatatttttctaagtggttatatatctgtttcattgttttcatcaatttgtttttctattattttaattttcttttagtagtt

SEQ ID NO: 125250 - DNA, 695 bp, Cannabis sativa
atatatatataaatataaaggacactttatggttactttgattaatgatgtaatggtagtaagagtgaagagaatatgataatagaagtagagagtttagtacaaagtaaacatatctcttcaatttttttatagtttttttttttaaaaaaattagttgtcaaaatattttttatttaatgtgtatttttcttgtacaattaaattaattttattatatcaattttgtacctctaattgctcttttcttctaaggaaagtttcattattagctggtttcattttgtttagggaactagtctgataagagaatgaatttttttctatggaaaattatctatttttgggaaacttgactttcccttaataatctcgatttcaccttgattagagcagataaaataaattttatttgacaggtatagaagaagaccaattcatgatcttagtccattttggaaagtttcctttctagttctgatctgctgcagcagagtccaattctgatgctgcaaatcaaaaaaaaaaaattgaagaaagttttatatagctaggaaagtgtatttgttgttgttttggttactatgttctataaataagaactagagagccaaaaaaatttcagctctttgaacttcattatttatatttggataaatagcgggataagtactcaatgtttatttttagcggca

SEQ ID NO: 125251 - DNA, 971 bp, Cannabis sativa
ggttaattgttaatttatctaataatttacccaaaagggtcgccggcaatgagttgggttttggattttgcgggagtttcatgccggaaatcagtgatcttgtggtcggagaaagtagtatatcgattaggtaaagttcagttaaaagtttggaaggtgttcgttaaattgtctagctcaactgcatgacaaagtaataagagaaattaaagaaaggagaaggtaatggagctatacatatacacacagacacactggtagaagaaccatgaaagaagtttctttattttacttgtttctttctgtaacatagattttctatttatatttcaatactaatcattttctgtaatccaataggaaaaaaaatataaccttttagcttaaaataaacaaataatctaaaatcatttatattttttttttttttggtttattttttaatagagacttacatggtttattaataaaatacaaaattgaattttaaaataaccttacaagttcatgtgttaagcctaattgtaaactaaccaccttataaaattcttttttttttcttttaatatatataaagtaaatacaatatatatttatttcataatattttttttaaaaataaaaaacaatgcaaacaagaatttgctttttgtaaaggaatgatataaacgtttaaaagttgtaatacttgtttctcttttcctactttaaatttataaaaattataaacaatggatatttagttcatttttgcggagaaagtaataatgaccattttttttttatatattaataaaactatttttatgtataaatatacatatttttgataaaatcactctaaatatttatttaattaaaaaatttgataactactaaattgtaatataaacattacaaattacttaatgtgggacaattacatatttctttttatttatttatatttttaagaaaatacatttctattt

SEQ ID NO: 125252 - DNA, 622 bp, Cannabis sativa
cagtattcaataataatctcacttgcaaataacatagaaaaaacctaacataaaatttaatatacgtgtttcgcacgtagttttttgctagtatatataaatatatatatatatatatcattgctcgtacttaaataattagttaccgtccaaatataactcatgaagatatatctagacatcatgatcgatataccaatataaatatatggccattgatgatataattaaaaccaatatatatatgtaccgtttttttttttctttttctatattaatatatattttaaattttcaatttgggtgcatctaacttgattagtatgtggactttacaaattattaattttcattttcattaatttattttttaaaggggtcataaattaattctatttatatatattgtgtttatataataaatatatatatgtataaggagagagaaagataagcttgaatgaaagaaagtgaagtatatgaatcatggatattgtaattggactacagttttgattaagttaattgttgtaatttcagcggaaataaccttgaggattcaatcataaaatctgcaatgaactcacaactttgacagtaaaatgaacataaaccaattaat

SEQ ID NO: 125253 - DNA, 2268 bp, Cannabis sativa
aatgtatgagaaaatgataataattttttttgcacatattttgtaattaattaaaataatgtatacaaaattgtaaaatgccctaaaaaatatcccttaataaaatttagactcctaattaatttatacaattaaatgctattatttttaatttctacccaaaataccctccctttcatttttctctctttgtctcttcctctttctcgctctctcttcctcttcctcgcaccaccgagacacccagaccaggcatcgagacaaccaaccactaccaccaaacctccttatctacccaaaaactcaaacgaaacccaaaggcccaagaccggacctccataacacttaattgtcaaaaaatccagaggcctcgaacctttgtctttgtctttatctgcgagcgtcgtccatactgagaatgcgacctcatccttgagcccaactagatgctcaccagatttgccttcatcttcatcttcgtattcgtgtttatttgttttttttttcttagatttgtatttgtttcagaccttagatggttgtggttatggttttttctggccaaaacatgcttatcgatagtttatcgatgatttatgatattgtaacacaattttgtcaatttaactttatcgataggttatcgatgtcatttatcaatatgttatcgatgatttctgtttgcacacaaaaatagcagtgcaaccatcgataaactatcaataacccatcgataatcacattttagccagaaaacaatacaaattcaaaagaggaagagagagcgaggaagagcttatagtggtctatctcagtctcaattcatggggtggtgatgagtggcgatggtggttgagagaagctaaggaggaggaggaagagcgaaagatttgggtaggtgagatttggaggttgtagggttgagttttgggtagatgaggagattttgtggtggaggagaggaggtttggtagtggtagttggtggtttcggtgtctaggtctaggtgtctcggtggtgcgagaaagaggaagagagagcgaggaagtggaagaaacaaagagagaaaaatgaaaggaaaggtatttttaatagagattgaaaataatagcatttaattatataaattaattagaaatctaattttattaggaggtatttttttaaacatgtaaaataaaatttccttctaaaattattcttcttggttttcaaactcaatttctcattttctataatgtatatttattagagcattgtgttaggttcattgttttgacagattatattaatagtgattccaatcttatctgtgctattaatttattataactgtatatcagtattcttttaatgtccacgtgagtctgttatattttaacagttggcataaattgttcttaggtcggttgaactattgtctataaatagctagtttcattatgtagcagagttagctagctaattcataatcttggttagttcagatatatcgtgttgtattgtgtgtggtatcttgtatagtttgttgctatttttcaggtctgattgtatagcttggtgatggatatccatactagaaagatcagagcctggtggtgctgagttcagactgaagggagttcagtgtcatctttgtcatcagatttgaagggatttcagattgaagaaaagtgtcgaagaagaacttagctgctggacagggaatcttgtgtgtacaaccaagaatcttggttgttgttggtaatacattactaattgttgtaaagattgcattaaattcctaatagtgaactggagattgtaatacgaatcttttggatttagtggatgttattaccctggtttggagaacccaagcactagtcgactgagatttgttctcagtgcagacgaagcttataagtcactgtgttctttactgcttactctttaatccgattcttgaacgataaagttgagattaatcaacctaatcttgagcaagttggtaaattgaatcatgaaatttggataagttgttctttcaaatggtatttgagccaaatctcaaaattagccatgtgaatgtatctctggattgccaaacaaaaaaaaggtgaagcttgctagtagagccgtcggaggtttagatttggttcgaagggatttcgagtcttgctggtgaatgaattcatctagcttactcaaggggatcttgagtggttgaatcgagggattcttgtattcgaagggatttcgaatctagctggtgaagggattcatcta

SEQ ID NO: 125254 - DNA, 1041 bp, Cannabis sativa
aactaagaagaaaagccaagagaactacgactctagaccagttaatccaaatcaccactatattttaagatattatctccactgtctaacaatagaataaataaagacgattatcttcaaaactaaaagttagatgcacatatttagagaattagcaatatatatgtataagcttaatcttgtcactaatggctaataactaatttttaaactaagtcacataagctacaatatatctaatttaaataatgtctaactactatacattattcatatagcatatcataatcatataataattatatcataaccatatcattgtttaaatagtgcgaacccattataccgtctattattcaaacaacataatataataatgaacaaataaaaaaataggatagaagtcttatacctcactcccactccttttgaacattatttcatacggaaaacttaaaaatttctacttaatttccttacctcaaatgtggagaaactagcttgattgtgagagtgatctttgagaaccaatgtttatcttttaaaaaaaagcaaatcgtagcctttaaggagaatcttatttttcactatgaagaactctttgagcccaagcctacagttaaagctctccaaaacttgaggaagactaaatgagaaaacaactatgtttttgagaatattatggcggtgtgagggtgatggtgatgttgagatgataaaaatgttgagagaataattgtggcatggtgtagtgtagtgtagtatctttcactcttgaagaaataagtgaccaaatggaagaacaactttgtagtatataaaggacaagagagataatgttgagactcttgagagtttttggcttctagtgagttgagggagactatgatagagcttatgtgtgtgtcgataatgagtttacgagagatatttataggccccaaaattaactacgaacacacccaatgactagattacaaatatttcaatgagtcactataaactctaacctccctgtaacgtccccgcttcaagcctcca

SEQ ID NO: 125255 - DNA, 1277 bp, Cannabis sativa
  modified_base (1054)..(1054): a, c, t, g, unknown or other
  modified_base (1232)..(1233): a, c, t, g, unknown or other
cctggtaaaatatttctaacaatatcatatatattaatcatacattaatatatatatatacacatatatgtcacatatactattttaatctacattatgttatactagggaatgaatccgcgcttcatgcggttttcaacaattgatattttctaagttgattaatttttacagtgaataagtaataaataaaatatattatatttttaatgtataaatatcaacaaaaatctaaactagtcttaatttttttaataatcaatctattcagatataatgtctatttattctatcaatatatatatattaataataataaaaatgatcaggtcatataataaaataattaactatatacattagtaatagagatggtcaaaaataactaacttattatattaatatggacatattccctgctagctatttttataaaatagttgataatcactaatagtaatgttatgtttccacaattcaatatatttttttttaaaaaaaaatcaagttcatatcatataagttgctattttatgctactattataaatatataattatatttgttaatatgtatagttagtattatatatcaaaatatacacatatatatcatcttttaataaaaaaacaagatatatataaatatatacttatattcaaagtagttgaatttttttttttaaaatatgtattttagatatttttacagtattttaactgttattatttttatattaaaaaatgtatataataaccacaatatgaatactaatattatcgagattcttttttttttaaatatataacatacaatacaacttggtataaaaatactaattgtaatagtaattagattttctttttctttcttaaatgtcaacgtagttaatgacctttaattttaattattatatatatttttaataattacaaaactaaaacaactacaaattagataatttaaatggttataaatataatggattaaacttattttagatgttaattatagtcaacccatataatagtctatatctaaaaatattgttatnttatctaaatttttattttctcacatttttttctccattaaaaataaaataattgtttggttactatatggattattttagaataatatgatatgactgcatgttgtagtaataagtaaatacattgtcaaatgatatattataaaaatcaatagtggaataataataataataatannaataataataataataatggtggtagtggtggtgagagttataa

SEQ ID NO: 125256 - DNA, 722 bp, Cannabis sativa
tatttttgaaaaaatttccatgtagcagtatttttataaaaattaactcaaattccagtataaatttcccttttatttttaattacattgaacacaaaagatactcatcataatcatcaactaattctaccattattactctttattttagattgattttaatagtctacagttttacataacaaacaagttttcttcttctttttatttattggaaattacatattttatagatgtttatataatttgtacaaaaatatctatatatatatatatatgattttgggtaaaacttaaaaaatacaagaaaacagtataagataactaattattactagttacccaaaacttttttcgcatactttcttaaccctttttttccacaaaatatatatttttttcccaaaaaagggcataatttggtaaatttttgaaaaaaaaaatcatatgaatgaatatttccatatatttaaagatttttacactaacatattgaattttttaacctttttactttttactcttaggcggaatttttttaaaaaatactatgtaaattttatatgttaaatttccatggttgttttattgttattttaagggaaatttgcggcaaaagtccccaaaaagttcagtttaatacagataagtccccaacctccagaaatagcggcaatagtcctcaaggtcatgtttttcatttgtccgttggtctccaagtt

SEQ ID NO: 125257 - DNA, 1202 bp, Cannabis sativa
tttatatttttttaataatagggtgtatttatcattttatggggtgcaaatagaactcccctaataataaattgtccataacaaattaactttcccgaatttcatctctttctctctagccgctaaccacaagttccttttttgatgttctgaccagggctccttgggctttgcgtggctctggtcgggtatgagtgtttgtgtttgtgcgaacagaagcctcttgatcctttcttgggttgtcatggcattgttctcttctttttttttttttttttgtttcaacggtttgtgggctctctttgacgatttgtgtaaatctatcgaagatttgacggtcattctgaaggttatttgcttccaatcaggggtggcgttgtcaaatccagggtggtggtgtggattcctggaaggtcagcgatggtgtagctctctttggattcgaagtggtctcttgtattgggtcttcttgggttggggaccttggggttgtgttgtgggtgttcacaaagaaatggtccatcaatatggtaatgtttcaagattgaagagggtgaccagtgtttgggatttgggccatggctatctgtgttttttaattttattgtgttgtttgtttttttatgttttcaaacacatataataaaatataacttcataaaaagctagtgataaaaaatactatttggaagcatagcaagttgtatcctctattgtcgttaaaggtatcggattttgagttttgacaatcgtgagacgttagttcggtcggtgctcaaagctaattggcttccccctttactggtattggtcttctaaactgtgatgcttccattggttccaattcggtgggctgtgattcgagtgtggttgcccatgattttcaaggggttgtcattgctgctcaaactaagtacaagtcagggctcttctctatttaaatgggtgaggttttggcagtgcaaatggccattgaacttgatggttttccacagttgccttctttatttgttacctctaactgtgttgtcgtgttgaatgccttcgggttgggagaagagttgcacactaattggtaggtgttgattaagtccattagggctcgtttggtacgccgtattgtaatgtattgtattgtgttggattgtattgtattagtattatttaatacaatacaatgtttggtattgacttttattaat

SEQ ID NO: 125258 - DNA, 990 bp, Cannabis sativa
ttggggatcatggtgttagaattgtcttggatgttttggtgtcaattagcctcggatgtcattccctccataatgacaaggaaacgtaatcaaggcgttttcctaatttgaaagggcattatagcctctcccctatgtacatgtttgtgttttatatttttcttactaagtttgtcgactcactgatatattttctatgtgtatgtaaaggcaaaagaaaaaccgaacaacagtgaatttgaagcttaatgaagattgtacatatctagatagttagacctggaggattcaaatttttgggaaaccatgggctcaattttgtagtcgatgggcgatacttttgttaggttgtattttgtataagttgaaaaaatagattaaggatcctgagatttgtaaaacttttagtgttgaatatattatttagtgaattttataattatttaaaaagttttatataaacacaaattttacattaaactcttcggttaacaaagattagcatagtaattaagaaaaacacgataacatgccgaagctagtaggcattacagttagagtttatgccctgaaaagtctgtaagatatttttgataataaacattagttaaacatttcgatatatgcttaaatgtttaattattgatattttatatttaataaattatatataaatatcgaaaaattctatattcatatatgagggtgtgacttgtattgtacaaagaattaaaatcactaaccatgaataaattagtcagcaacatattataattatagaatctttaatcaacggttgctaatacggttcattgatgctcgttattcgatgcaagcaatctccctttagattactaatgtagaaagacttttaagtgaaggaaaagtatttaatagaaattatatatgatatggaccgaagttatctttatcaaacatatcgtttactataaatgcctaattcacatcacaacgatgatcaattagtag

SEQ ID NO: 125259 - DNA, 746 bp, Cannabis sativa
ttcctccgccatacgcgaggagactcaataaaatttggaaggaggttagatcaagacaagtgacgtcgatttctttttcaaaaaatatatataaacacatttatatccaaaagctttagtcacaaaattgattctcatgattgaatggaccgaatagagtgaacagataggtttagtctagacgactttcaagtcaatgacttaaatccatttcttattacagtaacacatgttcaacctactatttgtttaaatatgaaaatcattaacatacaacaatgcaataatttagatgaccatggaattcacaaaacctatcactaaggttagtatattaggattattttctaggaactgttacaatatgtttagttggagataatggaatgaaaagaaatagaatcgaaattattttcattctacctttgttgctttataaaatattggaatgattttaccactattttggtgggatagctattctatttaagagtggagggaagatcattccaatgtacagataaaaaaattattcatgtcaaattttagtccgttgcattctactcccatccccattcctctatttttattactcctaaccaaacatacctttagcgatagttcatatcttattatgtacacatcaataactcattacacaattataaaatgaaactaaattcaaatagtaactaattgctatcactactaattacttgatgtatttctgctatagatacttgatg

SEQ ID NO: 125260 - DNA, 1013 bp, Cannabis sativa
agggcataaaacccaacaagggagattatatttacactcctaaagattgtaactccacctcatcattaaattcaccccattaaatattattttttataacaacatcccacattatttactaaaaggatattattttagtacacctaaaaattttccttaaaaaaatcatctaagaacggaagactttgcaccatttcacaagagatgagggtttaagcaagtggttccatggaagaccaataaataatgaataatgattgaagatgaaaatggagatgacttttctttataagtagtctaagtattgagaattgagtttggaaccaaaattcttaacaaaaaaaaaaagtttagaaccaaaatggcaaaatagctatattttattgtgcgatgtgaagatgataaatgttaatactactatatacataaataaaatctgtaatgcttgtcccctttcttattcttttggtataccacaattatgaagttataacaaaaaaataagattttctttgcttgaattttgatttttttttttctatttaataaatggtggtaatgggaatggagacatggatttcacaatgcttgctgatagtagtagtgtttgtatgaatttgtgttgtaatttcttaaataaatgagaattatatctaatataatgaatttatttttacattggatgattgcttaatgaaatttcaatattgattaatgatttaagattttaaagattttaatgagtagtttttaattttctgaaagatttcaagaaataatcgtgggttacatttattaaaatataaataaaataaaataaaaaacttttaaaaatacttattttggtctttaatatgtaattatatttttggcgtgtaattataattgtatggggtataaatataatttttaagggctcgtttggtacgccgtattgtattgtattgtgttggattgtattgtattgtatttgttatcccaattttttcactctgacgtggcatcacatgaat

SEQ ID NO: 125261 - DNA, 541 bp, Cannabis sativa
agagaagagtggttcccacaaatcacgtggaaagattgcagggaagcaacggtccaaatttcatcttcataagatcacagtaagcagtgtagagtggaggttaattccaaagccaaagctagtcatgtagactcaactttatgctgttgactgttgagtagccgttgtatttgtcttctgtttttatgtacgagagactgagaacatagtccatgtttctttctattattattattattattatttttttgctcaagttctttctattattttgcttttaagtctttatttatttatgttacaaccccctcatgacacattatttccagtctacaaactgtactactaaccaagacacttttttcttttagggaaatttcactatttgcccctaattaaatagctcatatcaaaatttataccatctattaatttgtacaaaacaattccacaattactcatttcaacctaaaatacctctcaaatttaattttcctactctctctctctgtctttcctttccctctctctctctctctct

SEQ ID NO: 125262 - DNA, 2226 bp, Cannabis sativa
  modified_base (2173)..(2179): a, c, t, g, unknown or other
taaataaaataaaaaaaaaaaatcgtaaaaatgttaaaattccgtgaaacgtaatttttttgttgtttttaagtttttgtaaaataatcccttttagtttttatgcttaatttagcggaattagcatgtataatgttttttttttcacttttatatattttttcactttttttttttcatttgtgtaaaagttgtttccattttaaggttatactatttttatttcgatgttatattgtttccatttaaagattatattgttaagatttttgacccatgaactttgacatgtaccaaatcataccctttaacttttctagcagttaaaagttctcctaaactattaagatccttggatttaaggactttaattgaatttcattcaattatacttattctttgattgttcatgaactaaatcatgctccgtgaacttttgttgaattttattcaattatactaattctttaaatccattaatctcaatagttcatgacgaatttttaatgatcttcaaattcaggggcatgattttgtagatgtaaaattttgggggtaaaagtcctattaacctttttatttttataaatgaataaaaaatcagttataaaaatataaataaaaaatcaccatctttttatctaattaaaaaatggacttttttttatttatacttttataattgactttttatttatttataaaaatagaaacaacttaacctcgaaatgaaaacaacttaactttaaaatgaaaacagtataatcttaaagtagaaacaaaataatttttataaaaatgaaaacagaaacataaaaatggaaaaaaaaaatggaaaatgcaatatgcatatagtaatttctcttttaaaaatatttcatttttacattatatgtactgagtttgttgatttattggctgaaaaaaagttcaaaaaaaaaatgataaaaataattaaattaagtttaacttaaatattttttatataaacatatttttattatagtataaaaaatattttgatatttttttttaattaaatagttaatttaactataaaaattcaaatttttcttttgttattcttcattacttaattagttacttagctgaaatttatgtataataattaattagttccatatgactataaaaggaagtttacaatttagtgaatagtcgttacatattaataaaaaagtatttacaattttacgaagtatttaaatataattaatttacttttagttataattataaataaaaatatatatatttatttacaataaagtgtgatttttatgaatataatattttttaataacaaatattttaatcataaattgctaaatttgttgcgaataaaaataaaaatgaattgttttatattttttattagtttagttatttattagggtcactaataaatttttagataattttaatgttaaaaaataatatttaaatattttgttgcatacgatattatgttttattgtacatttagtaaataattgtatgaattttattttcaataaataaattattcaaaaaaatttaaaaataaacttaattaattacaacatatacacgcttgttaaaaaagtagaatgaaatattttttgaaacatacaaaaaactgttgctatttggtatgtaataaacacacaaaatctaccactatgtgtgtgtagtgctgtaaatacaggccaggctttttgacatggcacgagcacgactaggcacgaaaaaatacaggcttggacatgacatgacacgatgctacaaattggcacgacacaatacaaaaaatatgtctttaaacacgacacaacacaaagcgcacaacacgtaagcacaaatagattaggcacgacacacgacaagaccgaaaagcacaacaggacatatattgaaaaaccttatcatttattgataataatgataagatttgaatttattaattataaataagttagaataataataaaacttaaatgtaatactgaatattataattttatagtaaaaattatgaaaatatctataaaaatttaaatatatttataagtaaatattcaaacaatacttaatttatatgattatctgtaaaatattattgaaaagttatataaaagtaactaaagctataatatatatatatggaacactnnnnnnngggtaatacccattgatgggaactaaaaaaaattaataaggtaataa

SEQ ID NO: 125263 - DNA, 2209 bp, Cannabis sativa
  modified_base (2153)..(2169): a, c, t, g, unknown or other
aatctagatgctggtaaaatatttccaacacatacaaagactcaccatcattctaataaaagttatttatttctcccttcagtttagcaacttttgaaggagggaagaatttagataaaaacttttaagccagatcttaacaagtgactatagaattttgttgtagagaattcaaccaactctttgctctttcctttaaagagaatggaaaaagcctcagtttgatagcatcatcactcactccattgtatttgaaagtgccacaaagctccaaaaaattagtcaagtgggtgtgagaatcttcaaaaggcaatccactaaattggagagtattacaccatttgtaaaatagctggcttgatcttaaagttgttggcgtccactgctagtggtcttatacagttttgtacctccgtcagagtagggagtacatagtctcacaggctcctttcagcattagggtgagcctgacctccttgcataactcaagaaattagatcatttccttcattatgcaccatcttctttgatttctttgcttctctcttgttcttttttatttttcttgcaagatttctcaatctaaggattcaaaggaacaaggctctctgcacctcttctatcgcgcatgtaaacttgagataagtaaaaatagcaactaaacaggttagaaacaagagaaaacaaaaattaaattagaataaaaatatattaaattgatattgataaattcaatccttggcaacgacgccaaaaacttgtttggcaaaatttatatgcaagtatacgaaatcgaaacaagtaatataatgataaataaagtatcgttctctcgaggattgattatcaatgtccaattaattaattgtttggttctatttgataaataatcattgttggataaagagtaaataaaacaagcaataattaaaattttaaaaaataacaatgataaagacaaagattattatgatcccaaattatcttttattttacttcataatgtaatacctaatttttcttcttcctaagttgagttaagaagtttataatttggttaagacttataaacccaatctatatgaaaacttcttatatttctatgacaagtttaattacaaagataatattaagcttcacaactagtaaaataatacaaacaacctaggtaatttcgttctaaatcaatttgcttacatatcaattagagcacattccaatcttatatttcagaattttgatttaaattcataaataataattaaagttgatcatcaataattgcaaaattaaaatagattgtatgaaattgaataaagagtagaagaagaaattcaacaatcacattaatcaataaaataaacttaagtggttcacgtaataatccttaaaaagaaattagctactaaatgacattctaaaacaaaagaaatttaacaaaagacataaaagacagagataaaggagaaagaacactgcttggagtcatccacctgtgccttctactctttgctctccttctacactcagaattcctctcaatttttgaatggtgtcaaagctttgtcatcaacccccctttataatgaaaaaatccaagtttcaaaaaaaaaaaaaaaaacaccaaggctccgaccttacaaggaatttcctcttttctttgttgaattttccagtttcccattttcaagatcctgctacgatgactgatagtattttgaccataactctctcgatataacttgaaattgaaagattcaagatgttttaaaaagatgaaagagagatctagaactttctttagaaaatttttcttagaagtaaatggattatagttaaaaaaaattcttgaagctttagactttatttttaattagaaacagagcatgttgaacatcaatgacttaaatttttttcaatttatttatggaagtgatcactcttgactctagatcacaaattttggagctaaaaatgtaatctttgacccattttaggcaataggaaatcaatccaagcaaaaacaagtttcatttctttattatattttttttttctcatttttgctcaaaaatggcttgcaaaatactaaaattaccaaagttaaagtgttataaaaattaatataaaccccaagatcaatttgtatatannnnnnnnnnnnnnnnnaatatataataattaggtatgcatacctgattgatccata

SEQ ID NO: 125264 - DNA, 902 bp, Cannabis sativa
aattttgtacaaggccaaatatttctatgtacatagcattgtttcctttctctacatccaaattcagctccattgtaatcttaaacaagtttcttgtagcttatcttgtaaacatggtttcataatgtatgcagatatatcaattaattatattctataatggcactataagagtgtatttctttattacagtattatactataaactaattgtcatttacaatcagccgtctttgtagtaatggcacaaatttcatatgcacaagattccctctttactaaaggtttaaactaacaatccaatcttgcattcatcatcattttgcttttgcatttttaatcaatgaaaacaagtatagtaatctgaaaagattttagagagagaattaattgtgaaaagggttctttttcttcaatcactttactaattccacctactttcaatcttatctttatggttttatacatgtttttaacagtatttttcagcatgattgatgcctttctctgctaaagatatcaatatccattttgtttcattagtttctgcactataattattttgactctgtttcaccattgattttcaatcccaaaatatccctggattattcacaacagtaacataatccatggatatcagtggtcattttctaataacgaattcggatataaacggggcggggcgggtggggggattgctcccacctttatattcgatacctaaatttgtcccatagctatctcaatatttgtttaagttaaagtggggacggggcggggattactcagctgggggaaggattctcattaggtgtccattacatatatattattgaaaaaaaatgatgtctcaaatagaattaaaaaaaaaaatcataaaaactcattagaaaaataaa

SEQ ID NO: 125265 - DNA, 1427 bp, Cannabis sativa
  modified_base (1373)..(1385): a, c, t, g, unknown or other
ccctgtggttcgacctcacttgcgcgagtatactacttgattgcgtgcacttgcgtagtaattaataattttcgtaacaacatcaccagtaaatttttgaagatctatttgcatctcgaagtacttgatgtgtgtaagaggatcttctcttccggtatacatctttcataccagcatcttgaacttaggcagggttaaggcattaatatatgtcaagaatggagacccccttgacctatctagttcaaggtctgatggttttgggccaactaggtcctttacatatcccttatttgatccaactatgcttgaacagaaggatctgatgtagtaggtacttgatcaagtggcctttcttggttgggctaaagcctttagtcgaccataccttggctggccatacccttggtgaggttatgtccatggccatccagcccatgactgggtaactggctttggctagccagtcctagattaggtaattggccatggtcggctagccctaatctaggcaattggccatggccggctagccctatactaggtagtgtttggctgattgctctcccttgattggccagtgtggcctatgtgttgatagggggttgatcatactaattgctcgggtttggtggatccacttgtttaaagtaatattcagtggtggaacaaagtcactttgattcttactccttgagttgatgttgtctattgtgtttccacttcttccagggcctggtctgtcaaagataggccttagaatgacttgctcttgaacgtttcaaagaggaacatcactctattggtcggtcagaggctggccgagttatgctattactgagccaagaatgcatggtcatcccccaacatcactcggtgccaaggactggctattcctgccataagatctgtttggcaaaaaaatttcagctttgggcaatggaaagtttgtcattattcacgaggaacttggttggactatttgccagttatctacttgctatagactctactcgatctgtcgacgagccttccctgcagaggatctctaattagatcctgccctctttaaatagttctctcattgaactgccttatcaagttactggcctcccagttttggcactccagcttcgcctgataggtcgggaggatggcctcctggttgtccatccaccttaggaatccacgtctcgattgggcaaaagcatcacaaaagtgcgtggttcttcagtccagtcaacctggcctaccaacctctcttggcctggccagttcgatgtcttctcccaagtccacatgaggctcaccaataactagttttgctttgtggaggttgttctatattgatagtgttggattttgtgccctannnnnnnnnnnnntcaatataatcagatttaataattaataaagatcagaaataa

SEQ ID NO: 125266 - DNA, 1578 bp, Cannabis sativa
  modified_base (27)..(28): a, c, t, g, unknown or other
aatagctataaataattttccataatnnaacatgattaactgctaattttcaaattaaactaagcggtctttacagtcatgctgcttgtgactccttagtcgactggtgtcgattgtgtgttgattgggggtagatcacactagttgttgcaattttgtggatctagatgcctgaggtgattggtttcacttctcgaatcgccatttttggtgtttccacccactcttggtcctcgtcggttgaagatcgatctctgtcgtcggtcgaagatcgatctctgtgcacctcgctcccctaggggaggaagtgttgtaccctggctggccatgggtactcctactgatggctaaccgaccagtggctgtatagtgggggttgctgttgcgccagggattcttggctggcccaccaagctgctgattgtcgagatctatctgttctcgtcgtttgacctttgagtaaaggtctatcctccctctgaaagaggaagatctatcctagttcctgaggaacttggcagtagtcttccttgaactggatccctaattaaggagatactgacctctttagttagatctctgattgaactattttattagattgttggcctcccaattgcggcgatctaattcttcttggtgagatcaaaggatgtactcctagtcatatccatccatcttaggaattcgcgtctctactgagcaaatacatcgcaattagcagcgcgtggttctttagttaggcctgtacgacctacagcttccctgagtctggccaactcaaggtcttctcctaggtccaggtgaggctcgccaatttctgactcacccactcctggacctgtctctcttgcgtagaacccgagttgaggtccagttgttgatcctggaggctgtcgcccttgggtccttcctttagtgggaggcaccaatggtgaatctgctcctggaggcgtgggcctgccacttggatccattgggatgctcacgtcaggttgggcagctgtggtagccaaacttgttgtgcctgttgtggtgacgggattcaccacatttgcagtattcatagggagttgtgactagaacccgagtgtttagatctgcaatctgtggatcttgagggagacccaaagatgcagatggtatgataggagttcttcttgtgttcaccatggaatttgatcagatcacgatatccacgctctcaatgaaagcaccaaactgttgaccttgaaaagtgatcaactgacagtggggtcgtgcagatctgatgcttgccaagtgtgtgcacaaataagaataaaaagcaatagacaatgtgatttgttatagaggttcgacccccttgtgatagcgggtaatgatctactcctcttttagttgtattaaatcgagggaattactatcaagatcgctataggtgggatctgctatagtacgtacccttaggattacaattaatgcctggcaaaactcaagcgttggttagcctaggatgttggatagcttatggtgttggacatcctttgatgatggagagcctaaggtaggcgtatgggagagagagagagagagaga

SEQ ID NO: 125267 - DNA, 803 bp, Cannabis sativa
  modified_base (726)..(730): a, c, t, g, unknown or other
catattaatatatgacataaaattttgttggtagcgtctttatgaatggatccgctaggctatgtttcgatgctatctttaagaccatcacatcacctctctctactatattccttagtcgatggtacttcctctcaatatgctttcctatcttgtggctccttagttccatggagttggtcactgctccactattacttctagaactacttccagaatagagtagaatgtcttcagctaaactgcttccagagcagtgtagaattgcttcacaagctgctacatatttggcttccatggttgaatctgtaatactagtttgcttgatgcttatccaggctacaactccaccaagagtaaatactgacccagatgtcgacttttgactatctttatctgattcaaaattagaatcagtatatctaataggatttaactctccacaagaatatataagcatgagatctctcgttctccgaggattcttgagaatatgctttacagcaatccagtgttacaaatctggtttagattgataacggctaagaatccctacagtgtagcatatgtcaggccttgtacacaacattacatacattaagctcccaaatgctgatgcataagggtactttctcatgttctcttcgacttaaggaaactttggacattgatccttacattgaataactccatatctggatggtaattgtcctttcttagaattcnnnnntgagaatctttctagcaccttattaatataagttgcttgagaaagtgctaatgttctccacttcctatctcta

SEQ ID NO: 125268 - DNA, 1055 bp, Cannabis sativa
  modified_base (442)..(443): a, c, t, g, unknown or other
aaatcaaacggttggaagaagggctgaatatgaagagacgattcataatgactctcgaaatcgtacaacctccagaatcaaaggatgcattttttccaagaaaaaaatttgacgaaaataccctttataattattaaaaagctcttttactaaaaaataattttttaagaggcaattgttatacccaaaattgggctgccacctcaatgaagggcacatgtcaagataaataaaatgtaaatcgatgccattgctgttatggaataactcattaattacgtaatatcagagtatatttgtaacccgctaactgtaaggtcttaggcgaggaatcaatgtacaaactgacacttaatatattagcaagaaaccatatgttgctaaatgcgaatagcaaggcactaaagaaagcgacccatatcaatcatggagatgcttagcnnacaataaacaaactaagtgtaaaattcagatcgactcaagaacaagtaagcgaggtgaccatcttgctatgggaagacttcctatagcttcatctagctaacggtaacgatgcttacaaccctggagagtcagaatggttctttgtaaataagaaccgcaatcgacaccagacatagattgtcgaccttggaaagaggaatggccccagattgctattggaatcactgtaacaaagtttctgtcaagacatctccagatactacagctaaagatgtgttagatacacaattattttgacccagtaaaagcgggaaagtcacagctatacgtttttcaaatcgtaaaccacatttacactacgtgatatgtaatcaaatcccacgattttagagataatagttgtaaacatattctggtcaactttgtaattaattgtccactatgtaattataaatagtgacaaacaagaccaaaacaagggatgaaaaactcatacaagagacttcctacaaaaaattagaaatctgaataagattgactcgtggactatgaagaattttaactgcaaaactatgtaaaaaaaccctatgtaatgtccctgcttcaagcct

SEQ ID NO: 125269 - DNA, 1119 bp, Cannabis sativa
  modified_base (1071)..(1093): a, c, t, g, unknown or other
cctgccacactgtcggaagccgcacaacaatggtatttcaagttgacaccaggaagattcaactcttagaaagctttctcctcgaagtttcatgcacaattctcttcttctcaccaactcccattgcacttagaagacctggtcgaagtgaagcaaagactaggagagcctctctgagcttacacaagcagattcataacggaggccacaaaagtagcatgcataactgaagaagggatgttagcctccatactggggggaggggggcatcgagattcttggagagctatggaaagacatcaagaagagtggtccagtagactctatgtgtgatttccttgaccgagcaaatggtttcatgaagcttgaagaagccattcaacgggcagatgtcgagcctagaccgggccaaccataagctccttcagctggaacgtctgtccaaaacccccaataccttagtagttcaaatccgggcggtaaaagatctaataacaacggcagacaaggtaatggaaaaaagtgaaagtttgcaggcaaagccgaacagaccccaagagagaatccttccaagttcactgctttctctgtcctgactgacgaccatctacatggccactcagtcagtagtttcgtacaagaaacctacttccatgaaaaaggacataagtaagcgggacatgtccaaattttgccactttcatggagattatggccatgacactaatgaatgcaacaatttgaagcgggaaattgaattcctaataagaaaaaacaacccacatgtacaaaaatatgtcaaggcaaacccaaatcaaagtgttgcccagacagacaataaccaagacctgttactgcctttaccagtggacggacatttataagtcatcatcggggcccacatatagctggagattcaggcaaagctcaggaaaggtatgctcgaaccttacaacacgagcaaaaataagtggtcctggccgtggaggaaaggaagcgaaaaatgccacaggtaggggagcggccagttgttggaaatttattttgccaggatcttagatctactcacannnnnnnnnnnnnnnnnnnnnnnatatgaactttctaaaacgataagat

SEQ ID NO: 125270 - DNA, 3204 bp, Cannabis sativa
attataatcttgaaaaataaaattaattaatataatatgataaaattttaaaactattaaattaattaaaatcttaaattaaatataagttaaaaaaagaaaagaaaaaatacttctaaagcatattgaactcatgacattttaattatttaaaaagtgattattataaaattattataagttatatatgttatagtttttaataagtataattattgttttaaaaataaatttaattaaaatattttttatgtaaatttgaaataaaaaaaatatatatttaaaactaaaattaaatagaaataaaataaaaatataaaaaaaaaataggtttggagtttgttagttgaacctacaattaataatattcaaaattaattataaataaaaaaaaataaattaattatggtgtagctttcaagagttaatttgagccatttgattaaatcaagggctataaattactatccttatgataggtaaaatacttaatccctactataatagcctcctttagatatatgtgatatatattgtgaatggatggtattttattgtgaatgtatgtgaggtgattgatcgttaacttttagttaaaaaaatgggcgtaagtctcattttttttaagataataatgtaagccaatattaggacataggatttttttcatataaatttatttttttgtaatttatttttatgtaatttttttcatcgatgtaatgcttaattgcatgtgagctcgagttctaaggagtcccagccatgcaccacgacacaaccactgcatgtagcttggattttttgaccttggccatgcgcacgatagacacttggtttttcgcttgtaattgtcggaatcaaggaatctcggtatgtgttacaaaaaattatatacaaatatgcaagtgcacgtaatcaagcagtactcacacaggtgaggtcgatcctacagggaattgaactgaataccactaaattagacttatatttctatttggtaaccaataaatttgaagaaaataaaattacgcaaataaaagtatttaatcaatgatgagaaattaagcaaaagaattatcttgatttaattacccaatggtttatgctaattactattctctttctcaatgtgaatgggagattataaaaattaacctaactctttcaaatcttttaggccctaaatcacatgttatctaatcatctctgaattagactaacatataatcagcattaagcaataatttcaatgtcactaaggctatgcaaatactttcatttcacatcaaaacctagtttatccaatttcccaaaactcacttttcaaattttaaattgggatcatgaagtatgcaaaaggtgatcaatcttaaacatgtaattaagcacaaatatgaataaatacacaatcaagaaagaagaattatcaattatcattaacctaaaaaaataatgtcaatcaacattcattatctccccaaatataggagtttagttcataatttccataatcaaatccataattaaaattgaaacagaaaataacataaaaaaattaagaaagaaggaaagaactagttgaagcaaccgatccaggtcgccacaagctgctcttaaagtcctctcctttgtttatagggctccaattctgaataatgatcaaaaatcatgaactcccttttaaatgagccaagttttctttttaaaatttgtgaaattacaaaattgcccaagaactcgtcaggaaggcttcatcgcgacgaagcttatttcccgtcgcggcggttggagaactctcaacttggaaaactttttgccaagtcctgtcgcggcgaagcttattccccatcacggtgaactttgtacatttttttttacctcaactcttttatttcttgtcatctattcttgtgaatactcccaaaaccataatggtcccgaacagagaattaaaacttcgccatggtcaacatctttgtgctaagtttggttttcagcaaaaaaccactaaaaagaaagagtttcaaaaaacttaatactgtcttcaaccaagatactaaaagtaaaagatactaaaatgatggaggggagggatttaggaaagacaatgaatttggagagggtgaagacctcggggaaggaattcaaacttcgtgcggtggccgtagcgatggcaggacaacaagaatctcattgaggcaagcaactctagaccgaatctcgcaagcacgagctataagtccatcaatctatgcttgaaaatccagcagtctcgatgggtttgaaggaggaatcgttaggtctgagggtggtgctcctgggttttctcatgctcgaatttgaagtaaaaggtgaaggcactcatcggaatatttgtaacatttgttttttaaaaaaaaaaatcaaattcatattaatatttatctttgaaattaattaattaagcaaaaaacaaattcagttgggcccacctatgtagtaggtgcctaccactgtggagaaacacagtgctaggcaccaccttataataattacattgtggtgtttgtcttaaaaacaatttgactccctaatttatttaaataataaatttaaaataaattatttatttcataataaataattactattttgttaatttaaaatacatttttcaaacatcattgtttagttttatccataccattgagattgttggcaattcggggaccatggacctataatactaagctccaataaattagattatttattgaatcttttcaaccaaataattatatttattaattccataattactacactataaatatagaattaaactcttaataattatagaattatatttactgagtttattagagtgtccattgatataatcaatttttgtgattaggcctccttgtgtcggttcttaattagttttggtcaaattatctttttacctttctaattacttctttattctttagtattgttaattcactagtgacatataatttagatccaatataaatttgttacacaacttttcaattatagaataaaagaaccaacatttgattcgttaggaaagtcaagattctatgattataaatcaagttcctagtcatccacattattagcttcacaaaatagaagttgtaagaattatcttctctgtgaaacattaacgagtgaatcaaagaaactaataacttg

SEQ ID NO: 125271 - DNA, 2717 bp, Cannabis sativa
ataattctattatgatataatattaacgattatttattgttattattgtttattgatattttttagtattttaattttttttagtgtaactctattttaattataacctctcaactagaatataatttgcttggtactaagtgtatttttaaatagatgttttactatacatatacacaatttataatacaaagtaccaactaactctaaatcgagaaatgctaaaatgtactaatgatatttaacaccctctctttggtactatattgttattggtgcaattaaatatcatgttacatataacttaagataataatttttaaaaattatcactaattaatgataaagtatcatttcttatgatgttaggcaacatataataagcaaattgtcaacgacttaattagcaaataattgggaattgatatttgaatacaaagcacatgttatgatattcctagaatcgctatcaccaactaataatcaacacaaatatctatatatattttttttgtaaggaataatcaacacaaatattaattacatgatttaggttgatttttataaatcttatatttatatatacttgcaattttgtacatatttacttgtactgcaaacaactaaaaagatatattttttttagttaggtaacctatatataatgtttttgcacataaaattatatcaaatgcttaaaaataatatatatttaatctaaataaatatggtttttttttgtgagaaatagagaacttattaattaattaaagcattaagcacacaaagtttacaatgagaaagagtatggaagataatcatgaatcaataaaagttcttttttaagtttaattgagcagcattagcttctctactaatgtgccaaattaaagttttaggaaattcagaagaaaaggactgactatatatggactgactatgtatatacatatatatatatattataataatgagattaggtatagtgcttatttgatctagaaacaaaaaatacattaacaattagagatttagaatctatcttcatcatgtactaaccaatagagatttagaatataattcaataaaaaaattggtaggacaaaaaaatatagctcgatctcgagaccattaattaattctagagaagttattagaagaaagaccctgcattatacactagcttttatttttaatgatttaccattttagtcataaccaaaagcttttattggctctcatcataataacatattaaggggtgtttgttatcatagcatttaattaaaccgcatgaaatagtattattcaagtgatttacttgttagaattatttatttgtagactaatataatactataatcacaatcattaattatgtgcctaatatttctcatacaactataatggccggatggttaacaactactaattatttagaggcacatgagagcacccatatgattataattggtccattgagttatagtccaccatcaattagtccttattaacccaataagctatataaccctttagggttagatgggtatgtgagatatataaatatacatatattaaggatgaaaagtgtgtgttaaggttgatggttagacataagtgggtttgctccacaattgtctcttgattagtactcttcactctctagcatattgttttgtgtgttttggacttggatattcatcaatggctcaatttgatgggatgagtaatatgggaggtatgttttcttaaccattaatgctctaaataaatgcttggatcttggatagttgtaagagcatcattggagtaatatatttgatattatagtgattataatgctcttgcttgaattttgttataacattactgttatcatgatttttaacatatattcataactaatgctctcatatttaaaattactaaaacatataaaagtttactgaacgtgagcttagcatatgtctctgatgatgattgtatatatctaaccggtcttcatggaaagatgtaaaagtaattaaaattataaaatatacatatattttaataattaactttttaattgtaataaaaatgtaaaaatatagaacacgaactcgagtccgcataaaaaaataggctggtctacttaaataaagcggcccaaattaataaagcacgacacaaatcaagcatgacacgaaactactaggtttgcaggctatgccgagcctatcctataaaattgttgtatgacatgacactaattgtattttttttatggcatgacaccacatagactatgtttttttatggctcgacataattccttattttaaaaagccccaaaaaagaaaatatgggccgatttacagctgtggactgcttttgattgaaatcagttgatctaaccaattgaagagaattatacatcatatattatactttgtagtttgtaagtcgattgaaatgaaatgcaatctcgatagagcaacaaacatgttttctaatatgatcaagttataaaggagaaataaacccaaacaatgagctttaagaacaaatagagcaacaatcgaaacagataaaagaaaagaataattaacacaaatgtgattctactatctcaaatcaatctgttacaacaacctagtaacatgccttttgaaaatttatctccaagaaattgcacaatgtgagtttttcaaaaataggctccatattgtatt

SEQ ID NO: 125272 - DNA, 1238 bp, Cannabis sativa
  modified_base (586)..(589): a, c, t, g, unknown or other
  modified_base (652)..(665): a, c, t, g, unknown or other
taaatataaataattatatatactcatataactatacataatgttaatttaggaaaagttaattaataaaagactttgtttttttaaaaaaaaactttttatattcatggaaagagaaaagttagccattaatgtggagagagaatatcaactctgttaatttagctgttaaggttaacataattttttattaaataattaaattaaattaatgaggtggctgtaattaattggtgggacagggtggagacagcatattggggacaggtgatttttttccaatagtaatgcccttaaaaaatatatacttttaaaataattactgactaataaaaactcataaccaatgtcttgtaatttttttaagggatattggcagctaaaccacttgaactttacggtttgtaacagttaaccacaaaaaccgaaattttggcggcaaaactacctaaactcccattctgttttgctctgtacgtctccgtccaaaaattacagttaagtgccacggtggactgtccacgtgtacacccttgtacatgtgccaaatttttagtggttcgcgtaatattagttttaaaaaatnnnnataaatatttaaaaaaaattaaaagatcaaaaaaaattatttttttcttttttattttttttnnnnnnnnnnnnnnttctttttctttcttctttcttcttctttttctgcaaaaacagccctctttctctccctcatctccctataaacaagttctaaacttgctcaaactatctagaactccatataaacaagctctaaacattattcaaagcttaaatgcaccaataaacctcctgaaacaaaatcaccattggagaccaaactttgagtttccaaaattcaaaacttggttccaactaaaatagctgatacaagcctccaaaatcaaccttaaacaatcataatcaagctttaaaattaatctctacaatcccaaactcatacagaaacaaattcccaaaacacaagtcaaaacaaagcttttcttcctaaaactaaaacgtaaaagagtctagggctttaccttagtcttccttccaatctttcctaaaaatcaagctgaaaccctttctaaattactacagatttctttgaaaaatttgcttggttccttgattcttactaggccgagagtggggtaaagggatgagacgagagagagagaaagagggctcgggctgtttctgcagaaaaagaaaaaaaaatg

SEQ ID NO: 125273 - DNA, 529 bp, Cannabis sativa
atttatgatccaaattgcaaaggctcttgcacttcggcaggcctcccaaaaatactactacctccatgcaattcacaaggagaggcccatatgaaaactagaccatcaaacaatattagtagaaactgaaagagcatatttagcttaaacatatacaaccacatataaatatcgactctaaaaaactcatgtgaagtaaataatatatcattaagaataaaacctaaataagaatccagcatagtaaatttgttgagtttgagaaccacactctaatctatcaagagcctttgcaatttctgggtcgcaaaaaatatatcgcgaaaatgcagtgtggtgtggtacggtttgaacgatttacagtattatcattatcaaaaattatactgaaaacttaaaaatcaatctaaaaaagttttaacgataaatttttttttattacaatcttaacatcataacatatatattaatcattaaatattatattggattgtctacctaatatacacatatataatatactaggtga

SEQ ID NO: 125274 - DNA, 1402 bp, Cannabis sativa
gctgaaggagtgaaacaagtactgtactttctgtgatgtgcaccaactgctgaacacaagcaacaatctgaaatgcagtggaactgtctaagccatttgttatctcatccatgaacaaagcttttgttggacctacagtcatctcccctgttgtcaatcttttcttctgaccaccagatatgcctcttctcatggcatctccaacccaagtgtcagcacatatatcgagcccaaggatctgaatggaagcattaggatgagtgaaaagataacaaataagagatacacaaaatgaaagaggtgtggtctgttgaagagaatgaccttcagtatgtagtctgtttggagagttctctttagtccctcaacagcaattgcctgtaaaaacaaacaaactttcattttcaacacttaattgtcacttgcatagcactttaattgccattgtacatgtaaccaggttcatctttagcattcaaaaaaaatatgtgtaattattaagctttttgcagatactctactcggttttttggtacaatgaattgtatattttgttacttatagtttttctactcataatatgataaaataatttagtaaactcataaataaggacaaaaaggatctgaacactatttgaaaagcaccttcatgtaagtatcaatgtctggatctggtacaattcctgcctgtttctcccttctactgacctccatcataatctcttttataagcagaaaaatacatcatcactctcatgtactaatagaatatccaaacatatgagttatgaacatactttatatatatatatagctcaacaaaacataccaactcggcttccaacaccctggaaacgggctgaataatcaagtgtttctcttactgtcatatcagggatatgctgatcaaattgactgatataagcagccgttttctgggggacaaactcatctagtttgtatccgttgtaagaaacctcacctgttaactattaaagtatatcaaaagttaagtacccagttgagtatattgactagatatagtgttaaaattaattaacctatcattcaccagcaagcatagtttagaaattgtatcttattttctactactttctcattaacatttctttccaaatttgcaggggtgatgataatggaattcatgcaagttggtgagaaggcataatatgaacctttagtgatgagtctaaattcccagataaagcctttagcagtgatgtcttcccacatcccgggggaccaagcagaagagttagcctgccacaaaaagattaaaattactttacttgaggttagtgattttatgaacacactaaagtgtcacacttaataaaccacttgaggctagctcaagtggccataggaagtgtgtgtgt

SEQ ID NO: 125275 - DNA, 883 bp, Cannabis sativa
tggatttgctctgttctttccgaactactcgccgtttctggggaaacctgggttttatgtagagaatttgttcgtgagagagcgttacaggaggaatggattggggaaaatgttgttgattgcggtggtgaagaaggctgtggagatgggttgtggaagagtggagtgggtggtgcttgattggaatgtgaatgcgattaagttctatgaagaaatgggagctcagattcagcttgattataagttttgtagactcactggggatgctttccaagcttatgcttctactaattaattgattaagatgaatttaatgatataatggtaggggccacattccatattaaatattgagctatatagaatataaactagttcattcttcactaataaattttgagataaaataccaaaattctcaacaaagcataaaataagtgagacatttaaataaaaaacatgagaaatgaaggtaccaatggtacttacttagtattttattatgtgttaatattgctattcaactaacatgtctaaaagttttaggtactataaatactcaataacaatgctaaaaaaaacatgatacctattactcaccgactttttataataattaggttgatgtttcgtgcaatagacgtataattaatttttttttttaattaggttcaataagatgatgttaagtgaatgtatatttaatttttttaaattttaaaatggagtttgagattttaatctttaagaattttttttacgtgtgtcatttaaatgtgattatatatataaatgtatgataatattttaaatttaaatttctttatataaaatatttacataattttacattttattttaatttaaataaataaatttaaaa

SEQ ID NO: 125276 - DNA, 1279 bp, Cannabis sativa
ataataataaaaatgaacaagtaaaacataatggtcctgctgatcaaacaattattgatattagtcataccagtagtgcttctgagaagaaggtcaaaattgcagagaaaactcgttctcaaaaggttgttggttctgttaaagcagttagagtgaagaaatgtccttccatgcctagtcttttcttcattggaagtggtgatcagcagaaggaagaagacttcgatgaagacattgatggtgatgatgactacgttgagaagaagaaggaagaagaagtaggtggggaaattactgggcaggagctgtttaccaaagctgaaacttttattggcaacttctacaaacaactgaagatgcagagggaggactcatggaagaagattcatggtttttatcagagagccttctaagctatttactaccattattcatgaccttggcttcctattattttgcttagtgtctaattactagtaactattgctattacctttttttttttcttttatcagtttaggctcattggtttgggggtatataattggttggggaaccattctattctactcatggttctttcctttcattattattgggttctgtacataagtaataattatcaataggtatagtatatatatatatatgttccttgtctagcaaggtttcatgtataggaactattatcactagactcgatcatagtgtgtctatatacatatatttatatagctagctaggtccatgttctaatgtaatatattatataaacctataaatatattgttcacttctctactatttctttttaattagttggggttatgaaacctataaatatatatatatatatctatatataactgtttttgtaaatgagtttgtaataacatatatccaagcaaatcagattaatttaatcctttttaggaagaataaaagagtgagtcttgatatattaaaatatgaaacatacaacccaaaaagttaaatactatagaaataaatcaacttcatgttaatttttgacttttatcccttaaatatatcaattaggatgataagatgtattgaatacaatattgtctctcttaaacaaatgttgacgtatatgtatctaattcgcttatatatttttccatgaagtcacaaaaataatgatcaaagatatctatatacatttaggtgcagtttggtaacactttttaatgagttttttgtttttaaaattaaaaaaagtgaaaatatttttcaaaaacatgttctataaaattgt

SEQ ID NO: 125277 - DNA, 693 bp, Cannabis sativa
  modified_base (645)..(646): a, c, t, g, unknown or other
tgtacctgtaatggatagtactgtgccacaaagagatagccaagcatcttttttgtttctgataaaataagtcactatgtaagctggattaatggctctgatgactgtccaatcaaacttgatgaaattatagagtccaatgctactaataagtgcaaaccatagtaagagtaatggagaaaatgtgtaacccactttgtcagttccaaatctttgaaccataaatagcataattaagattgctactgagaaccaaacaattttatctgttaagaaacaaaaaaaaatgattgaatcaattaatcctactatatatgattaattgagattataatgatattatatttacttaattaccttgtgtcatactaggtgcagcttccttaatacctccaacagctgataaaactgcaattaacaaaaggtgaatttaatcttgattagtgtgttgtattacaccaattaattaattttcatctatatttggataattattatttttgaatttttatgtacttaaaaaggaaaaaaaaatattgggagtaaggccctctctcaactaagtaactttgcctcggttaacatgggtaaaatacaaccaagtcaaacccgccttatttctaagagcattgctattgggcaccnntggtgcctagcaccttctaaatgtgtcgacttacaattggctagcga

SEQ ID NO: 125278 - DNA, 1556 bp, Cannabis sativa
tttttatatgttatttttttaatattaggggtgctttttataatttttgaagtgcaaaatgagaggggataagttgaaaaatatctcttttttgtatccattaatcaaaaataccctcatattatttttttattaaaatatatccacttttttaagtagattgcctaatatacccttactctctacttaagtctagcatataatttacataagggaaatttgaatttctatacattttataagagataattggttagtagaaccaataattagggtaattttaaaaataggacacttttacaaaaacccctaaaataccctcctcataatttctaaccctttctctctccttctcaaacaaactctctctgaccacttcgcccgaaccgaaccgcgacccccacctcccaccacgagacgacccccacctccgactgagacaagttcgacggagaccaaaagcaccatccacgaaccgaacccacaatgtccaaggtatgttataatttaatttttttttttttttgtgagaaagtgttaaagattgagtttgtttgtgattgtgtttgtgaaacttatgattttgttagatttagggaaatttttgtcggatctaagaaatgggtattattttgcttggcgaagaggaagacccgatgggtccgatgctcggaccgataggggtccgatgatccctattgctttcaaatagcaaggggcccgatgggtcggatggtaccccatgattttgtgtagtttcaattcaatttttgattatgctcgatcggtccgatgggcccgattgcaggcccggtggtccccaatttttcgtattttcatttcaattttttgataatgcccaatatgtccgattatgagtccgatggggtccgattgctttgtttaattttgaaatttgtattattaattattaattattattttattaattattaattattgttttattttttgttgttttattaattattaattatgatattattattaattattattttacttttaattttttattaattattaattatagttttattattacttattaattattgttttatttttttttatttttttattaattattagttattattttattattaattattattttatttttattgatttattaattattgttttattttttattgttttattaataattgttatattttttattgatttattaatttttatatatcgggcccattttaggcccgatgtctcccgatatatggcccgatggccctacaatatataattagtgttgacccgatatggggctcgatagggcctgatatatggcctgataccctcggtaattttttaattttttattttttattgctcgattgtgttgtgtattgttaatttttttgttatattagatttttaattaatattttttttgtttaattaaaaatatatattggtgggttgagacatgactttgataatttataacacttagtgattatacttaatattttgattagttagtaagttgttactaggtcaaaataaat

SEQ ID NO: 125279 - DNA, 909 bp, Cannabis sativa
ccaagtcagactccattcctttaaaccctttattttctactttccattctttttctctcgttttctgaaattattaatatttggatccttgtatgctgtcatgttcttgagatattctttttattattaaatttttaatttttggatctgggcttttgttcttaattgtttagcttagactaatttgggtttctcctcattttgatttttgttattgcttatgttgtcaaatgcatttttttatgtaaagttttctgctttctcattgttttttttttgtttgactcttatgattttcgttttgatttgttatggttcattgcatgatttgagattccacgtttctgaaggttgttctaatttgaattattttgcagggtatatgcagcattgtgatgttatattggttatgttttgttttttctttctttctctttgatcggttcagttgttggatttaattggcgttttctctcatggattaaacattgatgctatggaatctattttcattttaaggatagataccatttataaatgttctaatgttgaatcaaaggaatatttgggctttgttttccttagtgtgtgtttgacatgtttttgaaaattgtgattcattgctagtgtcttacattggcaatcatatcttacagtattgaaacggctgagatgttgaaatgttcatattcttgataaaccgtacaaaattacagtattgctcacatgcatgttaatgacatgaaactctcttttaactgttttctttttctgtttttggttttgctgttactttcttcttattcatcttcagtcagtacttgaatgtaataatttcaaatatttattactgtcttgctgatatgatgatatgtcacatggaatggaagaatattaatatgtgtgtat

SEQ ID NO: 125280 - DNA, 792 bp, Cannabis sativa
tatatattttgatattccctcaatcaaaaaaatatatattgatattcaataatatataattttttttttataaacaataatatataattagtgtatatatatatggacagctcagtgattgtattttaattagtgtctgcatatataattataagaagaagtactattaattattatctctatctatggcttaattattagcaattacaatttaatttaatttaatcaaaatatagctagattaatttatatgtgcctaattggaaaaagtgacaatcaatcaacaaatggaacaaaaataaaaacaaaacatctcataattttagagagagacacaccaagacaatttagacatattccatacatttatatatatatatagatagatatttatatatattggaagtggtccataccataaataaatatatatgtgataaatattaaattcagaaaattcaaacattaaaaatttaagtaataggaaattaatttaaggaggctcacaaacaaaacctagctaccaaattttattcagatatatatatgtttgaaattgaatattgtaataatgattaaggattattggtatagatgtcttcagatgagttttttgcccaatttataaaatatatttcattaattaattttaggagaatttttatttatatggtttttaaagtttagtttgcaacactatgattttcttctcaaaaaaaattattttataaaaaaaatttcaaaaaaaaaattaaaatataagaaaaaaaaaaacagcataagatatgatta

SEQ ID NO: 125281 - DNA, 909 bp, Cannabis sativa
ttcagtgctcaaacacacaccagaattatgttctcaaagtaatccatttgagtgatttcaatggcgagatctcttttcttacaggcttacaacgatggtggctggaaagttagaatggaaatctctttttttttttttttctctagggatttcttgagtgcgactaaccaaagagaaatgatcaaccatccagactagaatgcgattaggagatcggatatcagaaagatgaatcccctagtctaggtcaatgccttttataatactatggtatgaccatcactctctcacacttcagaagaatggttacaatcggtacaacactacaacaaaaatgtgttttgataacatttaaagtatgtcttaaaagtcatttgatgacatttttctaaatgttgttgaatgagggtgccttaaaagtctaatactttcaacaatatttttttactgttatgtttaatgttgttataaaactttttacgacattaatataatgacgtaatttcgcttgacatggtaaaaatgctatgtttcatcattttaatcattaaaacaattattaattataatattcatttgtaaaatgtcacaaatgacacatataaaagatattatttaattatatatttttgttatttaaagattaattatttattttacaaattaaaaatacttattattggtttattaaattaatatagctattcaattttagccaaaaaaaaaaaatgtagctattcaatttcatataaatatatttataataaaataattacaattcacactctttatccgaattaaatttcattagatatactatataatacaattatttttactttgaaatacatgaataattcaattcccttaacaaaatgcatttatagttatattccttcatcaagtcct

SEQ ID NO: 125282 - DNA, 1184 bp, Cannabis sativa
cactgataagtgacacgctaaatacttcccgggaacttaaactcgaaattagaagttttcctatcgataaatagcatgacaataccttaattatcgataaaacacaaaaactgaggcatccaaaactggccccaaccggttcaccgaatccctaaattgccaccattttctgagatcctacttggggaaacggttcaccgttcaccgtttctactaaaacgtttaaccatttcactacaaaaaccaaaaactcgagattttccttaagctacccctttccatacttaaccaaactcagtgaaactttccataacaatttaaaatcataattaaaacatatctatgaacttggaaaccacaatcactcatactaatactgttgtgacattttaggccaagcaatcgagtttttactgttatcggacctgaaaatattttatttcacaaatagcatataatttactcacataatccaataaaatctctataattaataaattacgtctaattttcttgtttcataaaataagcctatttcttcatattaacttagtaagcttataatcttactcaatttattctcctaatacataaattacttcatatttcataaaatatgcttcaattaattataattaatttctggaatattacattgcatatgcaacaaactaatatgaggtaataatgatcatgatattaaatttgtgagaattattaccgtacattttgttttcggtcaaaacaatatgacatagtctaggcagaataatatttactcacaaaagatgaagtaagacatgtagggtgtgaaaataaatatttgtacaagaatataaatttctaataaaaagtttgcataaatacgcaaaatgaattgttgtacaaaattttcatagacttaagattgaatgaaataaggcataaatatttaaaaaaaaatattcaccatttgattataacctagaatatattttatgagaaattataagtgtcacgtaaatgttgcaataaaagttatttatttggagctcttaatattgtgagaatttaaaatatgtcttatctaaaaattctagaacaatttaatgcatgtcttacgcgatatatattaagtagctatatgacaaacatagcaataatcttatgagatatattatcaccaaaagaattatggatcatat

SEQ ID NO: 125283 - DNA, 744 bp, Cannabis sativa
  modified_base (591)..(596): a, c, t, g, unknown or other
aaaagtgttctgggcattttttccttcatcagaaataatgaagattcaagcaaactcagggagaaaaccacaaacccaagcccctggaaacagggcctagcacctagattgatctggtgctgggcccagcgccctggttgataatcaacctggtgtgctgctttcgattgctcaaatgcaaatctgattcgaccaatgattctgaaatggtcaaaaatagggtaggagacatcgtcctcaagttcaagaaccttgaaagtatcaatacgagatctcgagagctcaagaatagggtacccaacgcccaagttgacaaatggcctgatgcgatgggttctgcttatccatgtgacaatgctttttatcgatcaaaattatgtttctcttacccttcaaaaaaaacctaacaattatgtttcttttactagcggtccgtgtaattttatcttaaaaaatttacattatagactaaaaattacaaaaatacgttaatacagaaatatttttatttttactctttgaacttttcaatttacaaaaatacatcttcagttaaaataataaactatttttatatctattctatataannnnnngctatataacagaattcttggtttctgagaaattattgggtgactttttttttgaataaaataaaaacaaattattagatgttgccaaagggtcagcatccatgtagttagttaaacctaaatgtaattaatccacctaaagtgttgc

SEQ ID NO: 125284 - DNA, 1534 bp, Cannabis sativa
  modified_base (1477)..(1486): a, c, t, g, unknown or other
ggtaaaatatttccaacaattaccgaactgctcggggccgaacctctttaagaaaccttgtgctctttatttatcttttcatattatatctgaattgtatcctttatcgtttattatcaagactcattgttgttggctaaaagcgaggtcaacacttagctaaaaattataactttaaaataatttttcttatttaaaatataattatatatatatttttttaatagtttgtattattattgtttaggctaattaggatttttgctccgtaaactttgacgtgtacgaaatcatgtctctcaaacttttcatgtcattaaaaaattttcccgatctagtgagattgttggattcaaggactttggtcaaatttctttcatttttattaagctaacaattgtccatgtactaaattgtgcctcttgaagtttaatatctaccaaatggtgcccccaaactttgacatgtactgaattgtgcattttgaactttcatccacgtccgatttttattagtaaaattaaagaaaaaaaatttagtccaacgatctcaatagttcaaagaaatttttttacgtacgtgttgaaaagttcaaggagtataatttggtacaagtcaatgttgggggaaaaaatcataaatagtctattattattatttatgagctaattaaaaaattataataaaatagttatatactttgttgataagatagaaaacatatattaagtattaagcgttaattttatattttatttattttttacttacattttgttatagagcattgttatcagacattagtggtgtttatcactatctagatgtgcaagctctatgattggtcagtgatactctttaaaagttattaatcaaattttataagatatgatacttaattgcgccaatagtaatatgacatctaggaaaatactaaacatcaataatgtttttggcattactttaattttttctattaaaatgtatattatattgatacaaaattattactaatacatttatatttttttaataaataataattaataaaatattataatatatataattttaattttaaaaattaaaagattatttgtctgtaaaattgaaaaaaaaaattaatgatttaatatatagatttgattagtatataaatattttttttgtaagaattatttttcattataaatacattactaaaaaaaaataatataaagaataactcctttaagaaataattatgtatttttttatacaaaaaattatttatagaaaaacacattaaaaaattacattattagagttatcttattttgtgaataattatttgctttatttattaatgaggtgctaattgagtgccacatgcttgatatgtgtttccaaagagtttaatatctcttctattttcttaaaaaaaaaagacaaaattaataaaacacttttttaatttatataggtggcgtttggtaannnnnnnnnnatcagttttctgtttttaaaagtggagaagtgaaaatattttttaaaa

SEQ ID NO: 125285 - DNA, 1582 bp, Cannabis sativa
tgtataaatgtttaatgggccggcccagagtatttttgtaatttttttccttttttgtatttttctgtttttttccctagaaactatcggataaaccaccggagcaacccaaattataaatttgaaaaaaaaaattaaaaaatagtatatgggataattttacattaaaaataatctttaataaattatataataatattcataaaccttaaaaatatataattattatattaacaaggcaacataactgcgcgaatcattatactaattaataaataatttttaggatttttttttataatttaaaatcattatattatgttatggcgcaaatgtttttttattgtactatatgaatgtattaatttttgagttaattttaaagtagtaacaaataatggttagtttggtaggatttaacaattttattaataattttaaataaaataattattgtatttattatattaacgaataataatatatataatactaatataaatttttacttctttttatagtttgaagaaaagcaagcatacaatcaaaaaactgaattattaccattacaacgacagtggatagaacgattgatagcggtaattcacgaaggtttagacgaatgatgctgaaaggcctaagaatttttcttccctatcttatttttttaggttaacttgtaattagatttattaacttgttaatacttggactaattttacaatatttgtataatatataattgaaatttatttaattacttctataaaataaaattaagtatattggctaatcataaaattaatttaaataatatttaatttagctttttaaaaaataaatatttaatttaaatttaaataaaatagtatttaatacaaatttctaaatatataatttaaataaattaatttcttgatttataattggtttttaactgaataacataatagttattaatgatttggcgtatatttttaggcctaacgtcagttatatatgcatatagcgttagttatttgtatataatcgacacaatagtgtacatatagcgttagttctttattaatgaatgagtccatagggtaatatttggcatcagttgttttcaatcctacagtatcgcctggatcagcgtcggtagagaattttaccaaaattgacgctaaaatgtcttaaaaactgcctctaaagctcagatttatagtactgttaacattaaaaaggaaaggaaaaaaaatgaccattctttaaggaatttgttaactaatttctacttcttcttctctcgtgatacactgttttaattcatttgttctctaagtttgttcaggatcaatggttatgagttgtacttgtgttggttcatcttctttccacatgatggtgtttttcctgttactctcacagtacttttcgttgctcaatcaactcttgaatctaaatgggtgagaagatttgtcttagtcctttggctactttgataggcaccgttacgaaaaattattaaatactacgcaagtgcacgcaatcaagtagtatactcacgcaagtgaggtcgaacaacagggaattggattaa

SEQ ID NO: 125286 - DNA, 1013 bp, Cannabis sativa
atatatatatataggtacccctaaaaattgtatcaaacaatataacatcatacatattttgtttcattctaaatactataatttttcatttacttttatgttatctttaattagctatcatcattaaatgataattttttttacttaatttataatttatcattatcttttgctatcagcaataaatataaagagaaattattagtttttacatacttttaataaaatattaataaaaattaagtgttgcatcaacttttataattttacattggtacatactacatatagtgctaaaaattgtgtaaatatatcacaatttgaattttgtggaaatattatagtataatatttacatctcacgtgtgaatactgaataaacttatatgagatcttaccaaaaaaaaaaagacacatatgagatagtgaattagtgaaattaattttgagtgattagaaaggaatagacgtgtaacttaactagaaatgtatagatttttattccattccatgtatctttaaatatatggtgtaattataaatttgattgctagtattatcaaaagatacaaaagaatgaaaacaaatatataaaaaaataatacattggaaatgaaagtatagtaatacatatatagtataagccgaaagtacaatagtgatctataattttatgattgtttctatatatgagccaaacacagcctaataagttagccaattaaggaggaataggataaagatgagaagatatgaatgtgtgtagtgctccaaactcagccaccacaccaaacgaagattaggtatgaatgtgtgattatgtgactaagctatgcaaactaagggacaaagaattttctcatacaggatatgattttatcctgtcattgtactttcatggattgtaattcgtgatgtacgacaactccctcatctgacggctgagattgatctaggagtaattagggttaaaaagtagaaacgtatcctgacactcatttaatgtaccctga

SEQ ID NO: 125287 - DNA, 607 bp, Cannabis sativa
gtttatatgtttttgtattcttttgtttaaatgtttggtttgataaagtgagtagaatcatatctgatccagataaatcaggttagataagatctgatttgaataattggtctaacgggtcgggacaaggcagatcatcatttgatccggattagatctgatccgatctatttacactcctaaataacaaatgaacaaatgtgattcatttttcaaaagaaggaaaaaaaaccctcttgtatacctctgcaagtatccaatgaagtttgatatgaaagaaagttttttttaacaagtgattgttgaatcaatatatgtaatgtatacatatatgtatataaagaaaaatgattggtttattttatttagtgggagagaatgaatagagattgagataaatgataaatccgtactccacaacatttgatcatttctcaacttttgaagggtatcatttcatttccaccctttaatttctacaaaaataaatgatatgaaatgatatataatttatggtccaagccaccgaaaccatcattgccgattttgatagttcattatagaataatacaaccctctaaaccaaattgggggtcccctctctttt

SEQ ID NO: 125288 - DNA, 1749 bp, Cannabis sativa
catggtcagacaaacatgccaaattgtgtaattacctccaattacacacaaatctaattatattgtggctttccaaacgcaacctacacttcagtcgctcttatcatatattacttaagtgaatagtaatatataatattactaagataaataggaactttgaatattggtaagattaattataatgatcactttcaaacacatttatgtatttattcttttattataatatattcacataaaatcttatatattttttttaaaatataaagttcgaaaagagaaaaatccttatcacttgaataattcaaatatactcaataaatttaataattattatttatttgtatctatctatttatctatcttatatatatatgaaagagatataaaacagtgatatgtgactttaaaatatttctaaagattatttgttctctctttaattctcttattttttttactttttactaacaatttttttttttttacttttctcctttttaaattccaaatatcacataatttaaaaaaaaaaaatgatctctaaaatcactatttttttttaaaaccaaactattttttttttttcaaatatgaaaactcacatatttttttttttacattttttttaaacccaaatatcacataatttaaaaataataactctaaaatcactttttttataagctatttgtttttcaactatcacataattttaaaaataataactcacacattttttctatcacctactaactcgaatcactctccaaacctatttatgtattttctttctctcttttttttttttcgaaatacttttaccaagagataaaaattatattgaaagttaataatgttattttaaaaaaatatattatattatttaaataatagtacattaaaaattagtaatgatcacaaattaaaaatagtagtcaatttttgattagtatggttgaataatatattatattatttaatgtaatattatttaaataatagtacattaaaaattagtaatgatcacaaattaaaaataatagtcaatttttgattaatatggttaaataattaatttaattatttattacatcaagtagaaatggtgacaatattagatatagagataacaaaacaaatgatagcttattttatcagcatgattgaatcacaacaagatttttgagtaaataatgacataagtacctaatattttgattctgtaagtagcattaatctaataatatttttagcattataagtattaaatgtttgtaaaactgtaatctctatctaattttatctgtacatagactgttattttcttaaatacatataagatccaaattttaaatttttgagtcgggttaagttgaatttacatctaacttttcatatttttcagaaatttatattaaaagttaataaatttattaaaatttaatgcaattttattatttagttatcctgaaataaaatataatttatttcatatatacatatatataattactagtttactaaataaccaccatatctgatgttcaaaacgatcttcttaaacgtggcaacaagaaaataaaaacaaagaacaaaataataatcgagtggatagcataaaacaattacttagggacttaacaacatttttattcgttttattgtctaaatttttgggggcagttttgtcctatgtggctagctctgagaatttagcggccatggcttggcaaagcatgctct

SEQ ID NO: 125289 - DNA, 751 bp, Cannabis sativa
  modified_base (43)..(43): a, c, t, g, unknown or other
tttaggatgttaaataacatatttgttagtaaatctaagatcntggtaaaataattccaacactgctctggtgtaaataaatcacccgaagaggacaatgtaaaagattcgagtgagaaaggtaaggagccaaatagagatgatatagaagggggagacaaaggaggaatggatccttctcccaaaaacagtaaatgatataccgtgttagtttccatgttatatctttctttaagcttttatgtattagcagtatttgtggtaaaatctgaaatttggtttattttgaagtagtaatgtgactttcctccttaattaattgtggaaataaaattaaagtaaacaatttttatatcacaaataagttcaaaataaaaatagactttagataatagacacttttacattgatataatagtaaaacgatagagcaaacttcttatagggaatctcattaaatggcataacaaaaagttgttcaacaaccatatgagatgagttttaaaattagtattatatataaaatatcactaaatgaaacttaacggatgttcaatcaagttgtataacataagggaacttctgttaagatagagggctactgtctctaaacggggatttatgtcgcgaaggacatccttttggagtagggtttcttggttcttcttttggatggattgggtaatgaggtatggcgacctcagtgtagtcgagaatttcatcaacgatattctcgaatttttctctagaa

SEQ ID NO: 125290 - DNA, 944 bp, Cannabis sativa
taaatatttatatagattatattaacaccctacatatttctcattatccgtgttttaaaataatcataataataaataaaaaagcaagtaattaattcgtgttttaaatatttagttttttttcttcttttgataataaaaaagttatcaatttgcatatgagcatatatggagtgtttataaaattaaatttcaacaatgatgtataatgtgagttaaatttagctctacttaaaagttgtgactaaatgtagttacaaaatataagattatttttaatagagtgttaaaaatgtggttcatatgggtagtgtatgaagtgatccaaatttaacacattttaaaaataatattaaaatttgcacaaaatataataatataatacagttcaaatagtaaataaatattattttttatttattctttttgctacttattaatgtaattaataattttttattttcaataaaaatttaatattttactggttctttcacactaatttataaaaaaaaatgctaattttatccctaaatacattagaatactaatgtgaaatttgtgtctgagtcattttttagttaaatttaattcaaattatacatcttttattgaagatggtcatataaactaaatttacagcacaataaatatcacatttttttaattattcttttgacactcattaaatttaaagctttgttaactaatttttaaggtaattttacacataaatacattaaagcacaattgcaaagtttaagccaaatataacattgactcattttttaaagctaaatttagtacaaattttagatcttgcaatttataacactagtcggaggcaagtgtattcaacatgactttttattttaaagggactcatttattataaaaatatgaaaaattttatttatattccacaaattaactacaaaaaatgt

SEQ ID NO: 125291 - DNA, 627 bp, Cannabis sativa
ttagctcaactcttcacatctctcaagtcaagtctcgagcctcaaacccaattcaccaacttaccaaaatccatttccatgattacccacttcaattttcatcatcatcattatcattatcggatgatgacgagtcctgctttacagccaagttcatcgaaaattggtttcctttattcgaagcctcaccacaccttcgccaaccggtttttgatcttctccaatcactgtctcaatccacaaaacgacttgtcgttgttcatgatgttatgatggcttcggtggttcaagatgtcgttcgtatcccaaacggagaagcctactcattcaattgctgatcttttgttttctttgcaaacatgtgtaatctgttgggacgaaacgacatgttcccaataatggatattccaccttgggagtcatgttttcctgctgcgttaaaaggttttgtggagagagaggttggggtggttaaatttcaagctggagagatcttcaacagttgtagagcagttgaaggagcttttcttgaaagtcttgtaaacgacattggtgtggagaagaacaagatttgggcagttgggcctttacaccaaacgacattgactcgtaatgagctaaggaggg

SEQ ID NO: 125292 - DNA, 1757 bp, Cannabis sativa
tggtaaaataatttccaataccttggccagctagaccccatggtggccacccttggtcggctaaatcttgaacaagacctccttggttggccaagtggtggacaggattcgagcatgtgttttttcaagaactcaactacgttctttttgttcttcgttttcttcatgactcaaaaaccaagaatcataacgaatatcgaaatcagatctttttcgtctagaaatcacacattactaatcctaaaactataccatgcggatcaaaatactaaagggatttaaatctaatgtggaaatcaaaagacattcaaagtgaagaacaaggttcatgcattcatggaaataaactaaatcaagcgaatagcaagaagagaaagcttacccacgactagaaaccgttgatgaaggagatgggaagcttggatcgtagaaacaaagcaaatatcttgggagaatgaaactatgtgggtttggccctctagagagaaggaggagcttcttcaaaagttactttctagtgagagagtgaaaagtgaaaaagtgaagaagagtttcctattctgtgggaccactccttcacttgccacatatactcaactcagagatatgtaaaagcagttagttagtttactgaaactaatgagatcagacattcaagagtagacatttcaaaggctaaaaatgcagcaacatttacttagttaagtctacatcagttccgaatcaggtggtaagtccctatccgcacagacgtccacacagggacttggggggtaaatattatcccaattttttcccacatgacatggctgcttatgtggacaatattagcaccacatagcagtacaactcaccaataaaaaaattaaattagcaccctagccaacggggatcccaacactcaaacgagacgacaagtgacagaacaaccacctcaagggggctggccagccacccctggtcggccagcataaggctggtcgacctatttcctctaggtgcccagttggctaggattggacctagcaggattttggtgcacaaccttacacgtggactacaagttggactgcaaattgggccttaattaacaacccaataaagttgatgaaaaagacgtatgtttaagggacattttagtcttttgtatttaatcaatttaacatgtaaatatctacttattttatttataaattagagttgaatctcttttatataaagagccttaatttaaccctaaaacccttagtctcatcctaggtagctaaacctcattctagtctgataataactcactccactctctctctctctcatgcccactatatatagcatctctccacacttgagattttctatttttgattcctactttgtaaccttaagagaactatattagatcccacatatagtgatctaaatagtgttatctctcgatatcaatacaattaaaagggaaataggtcattacctgctaactaaggaggccaaacctttataaaatctgtgtgttcatttacttttgagttctaattatgtaacaggtggcaatcatcgatttaatacgacctcgctatcgattggccaatttctgagttcaacagtaataatctatatatctatatgaaggagaagtatgatccagtgacgtggcggtctcaaatcactctaaaactattattctctcatctccttaattctctcaattttaatattttattaaaacataaatcaataaattaatattttactattat

SEQ ID NO: 125293 - DNA, 902 bp, Cannabis sativa
tttctccctagacaataatatgattctgggattattgtggaaaaaagagtctcatcttcgcaaagcataattttattaccacaaatagaataagccaagaaatgtcagatccactctgtctagcaactattgttatagagccacccaatgatggaatccaaaagaaaccttccttcaacacttcctaataaaataatggaatgcaaaaatttagccaagttggaatttcaacatttaaataacaagtacatcaacatcacttaaaaataggtggtaactcattcgctacattgcaaagagcttggcaaagaccaatccaggctagtatagtggccaaagtcggcaagcaaactatgataaagtatgactaaagtggttaaaattttggtaagcataagcagtgtaccaatttttgaagatgcaataagttcagcaaacagaatgagggtgacagttagaaaatttctgatagaaacagaagactctttgaatttcagttaaaataaggagacaatggttcttttgaattggcaacaaacttacacaagaagactcaaaccattttcgacataagcaatggcccctatacattgcaacttaaatagaaactagctccctgatgatatccattttttatgattgagaatgaaactaaacatgcgaaaatacatatacaccagtataaattaacaaattgagtacctactaatgggttaaccccaacctgcctgctaggagttagcataaatcattcaatctaacgacaatcgacagccaaatattagatattcaattgtgatcgagttggtttttatttttgaatatccaattggatcggatcggatattggatggggtgtctaaaaattaatacatcctacatccaatcaaattaattaatat

SEQ ID NO: 125294 - DNA, 1606 bp, Cannabis sativa
  modified_base (40)..(55): a, c, t, g, unknown or other
  modified_base (105)..(111): a, c, t, g, unknown or other
taggttcaatctcaggagtactatacatgttctttgattnnnnnnnnnnnnnnnntttttggtcagggtgatacgtacactttgggaacatggtagtacaattgnnnnnnngcgctaaacatagatatggaatcactactccaaattaggcttttagtgacacgcataaaagtgtgggtcactaaaaaattaggagtaggttttagtgacacatatcattagactctaaatatttgatgtttatcacccaaaatgtgggtcactaataatatggagtgtcactaaatactaaaaccgaaaatttataattttataaaaatgaaaaaaaaaaatatggcctatagagacatgctacgcgtgtgagcaattctgtttgccaacacgttatgcgtgtcgctaaagccacgtaatcacgtggctttagcgacacgcataacgcgttggcaaatagattttctcacacgcatagcgtgtcactataaatccttttattttttttataaaaataattaataataaatcttaattattaaaaaaaatataaaaaactaaaaagttgcacggtttcctattatttcagctttttttccataaaaactgaccaaaaatataaaatatttattaatcaaaaataaataaattggggtctaaacccctcattctctttcataaaaaacccgaataatattctacctcttctccttctctcttcttctcgcctcttcccctctctctcttcttcttgcctcttctttctttctcttgacagatattgttgctgcccaacttcctctcacctctgtggatcactgtgacgagacccaagttgtgctcttcttcctccaatctcagtctcgctctgacgtggatcagtagacaagttgccattcatggagatccatctcgctctgaccgaagaccttaatttggcggtggttcgagatctacttccactttgtcatcgtttaggtcttttcgtggtggttcagaccgttgaggacatgaaattatcaagtgttgtatttgcttgaaggtgggccaattttgattaatcatatatgcatttggacgccctctctggtagacccaacataataatttagtaatttcagatctattaaaaagtttttcttttcccttgattttctttgccatcttttcaagtacctactctactcatgatattggaagctctcgctgtaatcttttgaaggagttaactgagtttttattataatttatttgtccttcttaataactaagaaggatatttgtttgtcaaaaaaaaaaattcctaaaaactgtaaaaagttcacatttttttgtatattttttaggtttttacatgactaaaaattttttatagccagaaattatttgtggagatacttaagttttagttttttttgttcatgaaaaattgttcttgtttgcaggaagaatggtggccttagttgtacagtatacagatttattgtgtacattttttgtatttatataattgtaaactctggtaattttggcaaaatgattaatactaaatattgtttacttaattaaaattattattgttatatttaattgtatttgtatataattaatataa

SEQ ID NO: 125295 - DNA, 908 bp, Cannabis sativa
caagctcttgacaaaatatgggttgtgtgtttcctttagtcccatatcatttatgtatgttgattttcatggtgtttagaaaataaaatcaactctcatcaaataaaaaaaactaatgtagtgaatattaagtattttatacataaaagtatatttaattttggtaatgataacaatcatgatttttccatgaataaattacaattcagttttacttcacatcccacacatgtaatgtcctatgaaagacattaatgtgtataaaaaacaaaatctcctaaagtaaataaactaagagtactctcaacatttcttctactttatcactcaaaatatattattaaatttattttttttattttatttctaatgtttacatttcgtatactaaatttacaaaatgtatttctttcatacttccaaaaatttcaatgtaagagcaagtacatgtcaattcgacgaaaactatgtctattttattattcaatgttaaacaattattaaaatagagaattatttttataatataaaattaaataactcaactgaagaaagtgaataaagtatgatactacaattttaaatgatagttaaagataatcttcaccctcaacaatcatcctcaattataataacaaatgatattttaactttttaataaaattattaaccccacagataacgttaaagcaaacaattattcaaattcccctattgcaagttgaattatctacgtttttgggactggacacatggcctccaggttgacatttaagacttatcagtaggactctcatgatggatatagtgggccaagcccacctgtataggaccttccgggtgttgtatgagtttcgtcctcacagtacctgttaggctaaaattagtctaagtttcgggtcatattt

SEQ ID NO: 125296 - DNA, 1539 bp, Cannabis sativa
  modified_base (1426)..(1433): a, c, t, g, unknown or other
ttacaataaaaatgtaaccattagaacctcctcctccatatatatatatactaggcagaaattacgtgcattgcacgtatatttagttatattgtctagtatatatatactcaccattttctcaatgtaaagatgccttacctgtataaggtgttgtcataattttgaatgttgtctccaagggcatccccgttcgaacgcttgctctaacacatcttccattcgctttgcgagtagaatatgttgagcagatttgtaagaaaaatgacaaaggttccattacatttctaggaagcaactaattgagggaagccttaaaatgaaaaataacaataagaaaacaattatagtaaaacttacaaaataaaagttcacatggattaccagtaatgaaatattcaaattcagcaacaaaagaaaataataaaaaagagaaattatgctcaaacacaggccaaaaactaagataaaacttaaaataattcagccttagtcatttgcttttaatgaggcagcatcttccaaatttttaaggagcaagcaacaagtccccaactcaagattcaaaactcaaaatagataaaaattgaatggaatactatgacataaaaataacttgaattaaaaaaaaatgaaatttgaatttgaatcagactgacgtgcaaataacaattcagcattgttgttgctttgataattcgattgtttgtcatgaccttccaaatccctaacccctgcctaaccaaaaaaactcaaggggaaaagataaaaaatgaagactacattctcctgaattttggatcagactcacgtgcaaataaacaattcagtattattgctggtgctttgataaattgtctgtcatcacattccaaattcttaagcaattaacccctggattaagatggacaagaaagaaaaaacactcccaaatgcaatacaatgatgaaaaaaaaaagtttaggaaaagatataaaatgaagactatatttcattaatttgaatcaaactgacgtgcaaatatacaattcagcattgctgttgctcttgataatttgattgtttgtcatcaccttcaaaattcataaggaactaatccacggcttaagatgaagaaaaaaaatcaagtgggatataataacaaaaaactttagttcagataataaaaaaaactacatatgtataaaattacatttcaccaacattggatcaggcagacgtgcaaataaacaattcagcattgctgtgctttcgtattttgtttgtatcgtgccataatctggagaagttaatgtataggtgataatacttaactactttccaagtttttagggtgtagctaaattgtataatatttataatttttatttttattagaataatttataaaattatataaatttaattagggatattctgttaaagnnnnnnnnattctgttaaaataaacagataaatcaaaaagaatcgttaaaccaacaattgccgttagatatacacttttaatatagaaagatatatgggtatgctcttaatggg

SEQ ID NO: 125297 - DNA, 1708 bp, Cannabis sativa
  modified_base (1113)..(1122): a, c, t, g, unknown or other
taatggcttggcaaccaaatgtttacactgtcgacattaggttctgttcaagccaaacgatgcactgctttgtgcagttcaaacaatacccaggacatttccaacttactttgatttatggatttaatgatgagaaaaaaagagagcagatgtggatagatttggaggaattgggcaaaaacaataaggaagcatggctagtaatgggagattttaatgaaatccttaatgctagtgagagggttggcaaaagagcagagaataatccatcacaacggtttagagattgcattgaacaatgtggtttgactgatatgaagttttcaggtaatttttttacctgtaataacaagcagaagccagatgacagggtattctctaaaattgacagggccttggtgaattcggactgggtggagtcctttgcagattcagaagtgtaattttaattgacataaatataaattttagtgggataaaaataaaaatatttaagaataaaatgagaaatataacttttataaggataaaaaaaaatataaattttatggagcaataataaaatataaataaaaagtattagtttttttttgggatagaaagtgaaatattaaaaatatgtatataaaatataattaataaatagttgaggagggcaaatgaacacacatgctcccattttctccgcctctctatatgttctattacttattgatattacattatataattagatatttattggtatccaaaataatttgttgtgttatacttgatagtatgagaggtacaacgataacaaaattttttaacaactactaaataaactgattggtatgcaaccattaactactaactattataaaaaaaactactactgaatatttaaacaattattaattacttatataaatatatatggatgagatttcaatagttacatcaaatatgtaaccattatggttacatttatttttagtcattagatcactattgaatggttttaaacttctgattaattttaaaattaaaacaaataaataaattaataacttgtaatttgatactttattttttttttataaaatcttaattaaaattaattatatttannnnnnnnnnactaataattattaattaatttttcactatttgttactaaataagaattttttagaaattaatttttttttactcaaattattgaaatatttataataaaacttcttacaatttaaaatcattacacccataaccttaattaataaaaaatagtaaaaatgacttctaattaaatataattctacactcaattttattattaatactttaagtgtcaaataagtgtgtcagtccgcaattggtttaagtgatttatttttatttttgaaaaaaaataaaataaaaaattaaaatataataacaattataaaattaaagataatttttttaccgcacttgacacatctgtactttattccaccatctgtcatgtaattctattttctcaaagagatttattcttccttctttgctgttctaaatataatgtatttgtatcaattgatcggagtaaaatcataaaaaaaattgcaaatgtttgaaaattattaatcattattggttattgatattaaatatagaatattgaaatgtttgaaagttattaatgttatcggttattaatcttgaatacgtgttattaaaa

SEQ ID NO: 125298 - DNA, 1066 bp, Cannabis sativa
ctgctgctatatatagcagagtctaagcttgtattcattttgagcattgaataagatttcagttcctttcttctatttctttctctttgcttttcaatcactgatacttgtcttgtaattataccagtagtttatagttacataagtaaattattttaaaaggtgagcaaaatataactaaagaggaatatttataaaaatttgtatagtccaagatgaatttttgtaacataacaaattaatgtcattcaggagacaaaattcgtatttattcatttgtaaggtgagacaaaattcttatttattcttatacatagacattttaactttggattcactaagtccaataaaagcttgcatacaatgtatgacataaggaggttgtaaatcaatagaatcctattaattggtggaacatgatttctttttgttcaaaattaaagaaatcaaaaggaaacgggagagaatagatattgtaaaaacatgaaatgaaaaaaaattgaaggttcatacgaatcttatagtagattagaaattacagcacatgagctataaataatagaatagagtatttgattgagttaattactatttttgtctgatctattagttatggtatgtgaattaatcaggatgtctctttcaaattatagataattttttccatcttcaagaactaattatacattaataatgtgagtatgtgacatcccttaaagaaagaaaaagaaaaaaaaaaaatacatgtgatgtgacatcattatgtcggtccaagcagtattagagcaccagataaatgctaagattaggtttttattttattttatttatttaactatatggactctttttaaaatgagataaaatagcacctgtatattcatactttttttgttattattatatatttttttatttaaattcatacaaattctagtgaaagaatgcatgtgctataaataataaatacataataataaatccagtgaaagaaaaagaatgttagatgcaaaattactttaaatttacaaactaaattagtaaatgtttctttttttaaaaaaaa

SEQ ID NO: 125299 - DNA, 764 bp, Cannabis sativa
attgctccatggtaccttctcaaactcttgcgcaaaccaagcttgtccctctgcaattttgtaccattggcagtgaacacattatgttgaacataatttttgattttgtttttaagttctaccatctttctccaatacaacttccactcaaaggaaccttgtactcccaccaagtttgatgcttaatataaacactatggacccattttacccacaaattatccttcttttttttaattgcccatacatgtttcaccatagttgctgcattccaatgtggaatatacattagccctagatctcttactttttttggacaacacaacttttcccatgctacagcccctgctccattcatcatactttttcctgtccatggaaaactcctacatattgcttcgagctctctaattatttgcttaggaaggaacataatttggcaccaagagacgtggattgagagaatgactgatttaatcaaaaccaatcttcccgcaaatgacaagtgcctcgagctcccaatcctaattctagctgtcattttctgcactaagctgctgcaatcagtagccgagatcttcttaggacagatgggtactcctagatactttaaaggctcttgttgctttgtaaaacctgacatgtcaagcacccttcttacctcatattcactcattccactacaatacactgcttgtgacagtcagtagtccagtgatccgtgaggggaaataccgagtaagctgtgcaatcccacaccgcct

SEQ ID NO: 125300 - DNA, 777 bp, Cannabis sativa
cttgttgacattggattgtaaataagtgtggcttagattttgtaagctttcatagagttttcctaatgaacccaccatatccatattataggtaaacaagagacttgtgattgtactaacttccatggatagaatggagaagaggaaatctgtgaagtcttttcctgcctcagcaaatataacctttttctcctttgtattgattagaagcttgatagaaaaactactagtacttcccatattgctgtttctttaattttattttgagggggctgagatttatatatatgaatagttatgaattgcaattaacttgtatatataataataatataattatttaaaatttgatgaattgggagtttttggttaaatcgatgagcaaacggctaacacacatagcctattaattttcaatatatatgcatgcatgcagactatattgcattcccaataaaaatatatataaataattttccatgcatacattccccagaaatgcaaataattatgctgggaagaaattaaagtgtttcgatattaggaaataatagttcaaaagtccatataaaaattaatacactacgcacaaaacaatctagcttgagtatgttaaataaaataaaaagtttatatattatatatatatgtctttttttatttaatttaataaaaagaaaatactattttgaattctgtattttacaaaagttaccaattagattttctgttttgttaaataataaaatgaatattatattttccaaaatggtaaaa

SEQ ID NO: 125301 - DNA, 976 bp, Cannabis sativa
ggttcataagttttggtaagcaaagttaagattgttaggaaaggatgatgaggtggcataagaaaagaatcttataggtcagaaaagatgatggagaagaggagtgagtggtatggaataatggcgtgaaagtggggcccataagggacaggtggcagtacattaaactttaacagcctgtggggaacaatacgaccacgtttaacatgaaacccttgtggttgtgggctcaccttcacctccctaaacactcttttctattgtgtttctaacttataacacataactataagaaaaatgttaatctacaccttaaatgtgaaacgaggtgttaattttttttttttttaatattgagttttatatattttaattttataaataatataaaaaattatttgtcaattataagatgacatattattatagtgttgagtactttaatgtgtaaattaatgctctaagtataatcctaacatttagttcgacattgagaatggacaggttagacttgtgcctagagcttacttagccgaaaggcccaaaaaaatttatccatcccgtcttgcttaccagtcatgtctttaattttcttgtctctttttactctcgaacaacatatatgaaaggaaaggatgttttactatctgctaaattattcatttttgttgagccatttaaaaaatttatatttgtatgatatatacattaagacactacgtacttactgcagatgctttaaaataaaaaaaattctaaaatatttaaagaactaaactaaaaacacgctaaattagttatgtttgacatcataactaaaactattttttgtttttaaaaataaaaaattattttttaaaaacaatttggcttgtttggccttgtttttctaaaatagtttttaaaaaacaaagttacaaaaaataagaattttgaaaacaacaaaatattattttctgttttaaaaaccaattca

SEQ ID NO: 125302 - DNA, 1282 bp, Cannabis sativa
aggcccaagcccaagcccaggcccaggcccaaatgatggaccagtggcgtcaccaccaccgcatgcggagagaagagggagaggaaaaggttggtgtctacccaaaatggcggctgattcagaagccttgcagaagaatattgattatgtatgtgggctgggcctggactgtggcccaatccaacaaggtgggccgtgctttctacctgattcagtcagagcccatgcagcttatgccatgaacttgtattaccaagtaatgggaacgaacggctatgcttgtgatttcgagaaaactggagcaatctcacacgttgatccaagtacgtatgtttttttggtatcatataattttaaagtatttttgttatatttatttatttttgttacttatttttaataccaggctatggaaaatgcaaatattgacgatgaagctgaagaaaattctattgagagcaatctagtttaatttttgttcacactattgtgaccataaatagctctttttcatctaatgatttatatgatacaaattacgtagtttaattactatttactattatatataaagctaaaataaaattagttacatttttttaattttattttgctctgcaaatatcaatttgtctaaatattattacattttgtatagattacccattagtgaataagtacaaaagttcaatttggatgatttattgctttaaaaaaaaaaagaaaaagaagacttgccactcttaattgttaaaattatagaagttggttgagaaaatataatagagtgatatatatggtgagatgtaattaaatttcatctcaaaatcaaataataagaaatgaaataactcataaaataagagtaatgacaagtagacatataaattatatataaaaagatgatatacattacatcataaccatcttacataaagatggttagtttaaatcttttgtgtggcatcaatactgtcaagttgtgtataatttaaatattttaaataaataaacattcaccaatctttcctttttttttcaaaattgtgacataacatatttattaattcacccaaattttatatttaaaagtagaaaaagagaaagataaagaaaaaatgagtacaaatagacccacccattctttaaagaaaaactatacccataaatttatttcattgtgaattaattaagacataaaggaacataaataattcttttataagagtttttacaaaaaaaaaaaaaaattgaattttaaacaaaagtttataattttatt

SEQ ID NO: 125303 - DNA, 2211 bp, Cannabis sativa
agagaaaaagaaaggtataaataaaaggaaatttggtaatccatgctaaaaaattagctatggtatttaattaaatccaattattacacataggaaagatattccaatctttcaattttcttccaaaattacctttctttttaactcccatcattctttctaactccattctctttcttctttccctctcccaaactcacggtgacccaccccctccataatcaaactccattcgagcccatcgcacgaacccacccccactagaaccgaacccacgacgacccaggaaaccactcgacctaagcgacccaggagacccacgatatgcctcaacgaccgacgagacccacaagacaccccagcgacccacgagacaaagctctgtccagtctctgatcacctttcctgcctccgtccacgacaccaactccaacccatgtttgtttgtttttttctttaatttctactttaaattcgcaatctgtgattaaactgaaatgtggtgatgactaaacttgtaattttattaatttttgtgtttggagaagaatttgagtttaaggatatagtttttttgggattttctttgtttgtgcaaaattatgcgatgttatgcaatttttgtgcgattgatattgcaaattcaaatcaattttctgtgttggtattgttgtgcgattttcatgcaatttctgtgcaattttgtgcgataagtcatgacaatcataagtgtttttgtgttcctattggtatgtgatttttgggcgacattttgtgcgattttatttaaacgttttactctagacagtgcttgaacaattttaagcgatatgtttgcgatctttgtgcgattcatggttgttgttttgcaattttatgtgttattcgtgttgttttgtgattttgtgcgatttataatccaagtaatagtcatcttttgtttgtaaatgcagatggctctagaactcattctcccattggctgagcattttccaaggcgtatcacctatagagggaatgcatactttgtttcaataaaagctaagttcgtagcctttaacttgaccgacaaggtgaaggaaactccttggagttttttggaatggcaatgatctaaaattctccggggtgattgtgcatcaatttctattgaggaaaaagaaagtgagtgaggtcaaaaatgatgaagtgtggttttacgtgggtaaaactgaagccaaatttgggcggtctaagttcggtttgatcacatgcctaaaaatgagcggtggcccctcgacataagaattgagtacacaatgtgattctgatcggatactacgggaccatctcaataatgcgaaagggtcacttttaaaaccctttggctagcttttgaggtatgcaatgttgcagacgatgtgtacaagctggggctgtctacattttgttgaaggtgtgttgttatcaatggctaagggtgtttatatctagacaaatatgctgaaattagtagaaaatgtagacaaattcttcgagtatccttggggcctcatttcttatcagaagttgttgtcatccacaactaagaatatgattgagcttaataagaactacatggataaggtctctagtaagaaagataagatgaagaagaaagaaaagaaagagaaaaaaagtactcaaccagaggcgaagtacaatgtttacggacatgcaccgacactgcaatattgggcgtttgaggtcatgcaagatttggggaagaaggatggccagtgcaaaaggactagattccctcgaatgttgaactggagtgtcctcgattcggttatgaaacataatgtgaagcaagctgatgtggttgcactgtttgagaaaagggtatgtgaacctttctctatttatcattattattttgatatttattttgctataagtgttattttgtttatgtgcaagtgttagagtttgttgtgcgatattcatgcgatatttgtgctacattttttatgtttatgtgatatttgtttgaatacatgcgattttttgtttaagcgatttatgcctccaacctctactgcagccaatgatgccgactacctagggttggcgaagagattgaagaatgtcgaagcccaataatttgcaattttaactgcacatactgagatgaaggttgactttaagagaagttagaaagagatgaagaatcttatcatggatcaaatt

SEQ ID NO: 125304 - DNA, 1142 bp, Cannabis sativa
attattcacgatttccaataacctcgttgattagcaacgagctgcacaatatgttaaaaatcatgctaacacgcctataatagttagggtgttacacaatcactacgtataaattgtaaaagcaagtaaagaaattgacacaacaatttataaaggttcgcccccttgtttagcgagtaatgacctactccccttttaattgtattgatttgagagataataccacacagattacaggcttttatcttgtaatttctagtatgactctctgtgaatgttacaatgatgagaatgatgtatgaaagattctgaataagtgagatgagaaacagactaaatgtctgatgctctttatacagtttagagcttacaaaagatctctattcaaataggctaatatcgttcaaaagtaggagatattactcttttatcatatatttaagttataaaaataactaactaatatctctaaaggataggtagatattttggggttgaatccatacttttgtgggttattggagccatctcgtagctgaaactattgtatgacccgtctaggaggatggttgcagaccccaccattcgattgggcttcttttgatactctttattggtgctggctgacctaccttctgtctggggttggccgacacatactcatccttggtcggccaggccctctagctggctattttcttataacttgaccttgcctgaatgtttagatccttttccaattgatgcgttgtgcatggtgactgtaacgccctaataataaggcacgctacagtgatttttcaattgaagtgctatctttgctaatcaaagaattttcttgaaaattgtgtcaaattaaaacttttagaattaaatatgaaactttataaactttatatgaatatttacaagtgtcgggatccccttgttaaactttttacaaaatattccaaatacaaaagtcaggtcgcacaacgactacaaaatgaaaacccccagatgtcccgagattgaacactccaggtcgcgccgcaatgacatgtacaacctcatcctagctcaaactcactcctgttcaatctttgcctttcttttacctacacatgaaagtagaactgtgagtccacagactcagtaagaaa

SEQ ID NO: 125305 - DNA, 1173 bp, Cannabis sativa
acagtacgtttaaaatcacgctaacacgcctatgctagttagggtgttacatagcccctaaatttcttcctttaaatagtcattcattggtggtgtgaccaatatcaccatgattggcagaggcttcctgtagtgtaccatgttacaggttgccttgtatacattctcctgagtatctatgagacttgtgtactcagtatatcttgattcttgggtttttctttttcttttcagactcactttggttaggacccttcgtactccttttactccttaagttgcttactttagattttggaacttctgctttttagtttgtttgttcgggagcagcactgtattcagtctgtgcagctccgaacttaaaaaaaaactagcctatatagttggctgtatggaagtacttggtctatatactataggagtagtaaaggcagttggcggagggtaaatggatggagttgtcatctgtgatggttaggcatttgttatttcagtggaaggtgctgggagcactccatatgcttagacataagcatcttctaggtttttaaatccttgggctcttgtcaagacttcacttaatgtatctacccttttgcactaaagatctccccacagtaaaggtccagttgtaagtcctgatgttagagccaccattttcatgtcatcagtgactttggttttaacagccacatccatcatgcgttgaataaacttcttcaagctctctccttattgtttcttgacatttatcaatgagctagcttccaaatcatagtcattggctgctacaaactattttctgaacataacttgtaggtctctccaattgtggattgatcccggagacaacatcttccaccagtcctctgcggacactcattgtcaatgaaaaacataaacattttgcgtcatcactggccttggcgacttgcatgatgcagttgtatttggacaaatggtcgctagggtccgtgcaaccttcatacaactccatttggggcattttgaaacgcttcggcaatggtgcatcaatgattctcttcacacaaggctctgtatcttcttcctcaaaggctatgtttttccttggcaggaaaataaagtttgcaaattaaacaggtctatttatagacttaagcaagcttcacgctcatggaataaaaggtt

SEQ ID NO: 125306 - DNA, 1122 bp, Cannabis sativa
tccccttgtctaagacccttagctcccttaaaccctttttgtaatcagccattcatcataagcacataggaagtctcccttaaacaaaccataatccagtgaatgaacctagtaggaaatctgtaacttttcaataaatctttcaagaaatcccaatctaccgtatcgtagggctttactcaagtcaattttcagccgcacatcttggagaagcatttttcctactataattcttaatcaaatcctaaaaaataaggatattatgagctagagatctacctttaacaaacgctccctggttttggccaatcaacaaaggaagcacttcaaatagatgcacttatgcagagtagtgtagtaggcaattggcctataatccaccgctttacaaggcacttcatttaaatcttttggcatcctcccagtttcaaagaattcaagaatagcctcagttatgtcatccacgactaatttccacattgctttaaaaaattcagaagtataaccatctactcctgggctttcagtacttgttatactatatatcgctttcctgacatcctctttagtaaacttctttattaagttcaattgaagctcaacactaagccgaggacccatctccatacatctgtcatcaaacttttgagacatagaactcttgctgcccatataatatttaaaatgagagacaaaatgttgaactaccttattgtagtcttccacagtttccccatctttattaatgaatgatacaatcatgttctcctgtctcattttcttgatgcaagcatgaaataaagcattattgtcatgtcctttggacagccaagttatcttgcttctctgaataaggaaactctgatacatagctacttgttgttgaaacgtagcagcatcaattttttcttgtaactaagccaaatcatttgttggagctgcttaagcattggttaaagcactctggtaatcatctttagcttggtgatagttttgttccacatctccaatttcctccttattaaggcttctgaggacatgtttaagcctcaataacttcctaagcacacactgaagcctagaacctgccataggttcattccaattagtagtcaccacctc

SEQ ID NO: 125307 - DNA, 1138 bp, Cannabis sativa
aaaagaaaaaaaaaaatcaatcatacatgcattaccatgtctttaaacttcttcttcatctatcataagaccattttattaaatatttttatgatgaattcttttctttaaaaaagactaacagggttgctaatttttgacaattaatattttaattacctttaatccaatttaagctcaattaaatagaaattgtattaataaaatttgactaaaattgtgtcttatgatattttttaccattttaataaacaaatggtcatttttatagtttcttaaaacaaagggtcaaattaaaatttagctaatttttttgtattatcccaaaaaaaatgaacacttttttatttagtaaattttatagttagtgtttcattcttaaatcactctaatattatgtttatagtgttaccgtacctaattattatttgaaaattactgaaaatttgtacaaactattattctttttatttatttatttttcttatattttattatattttaataatttataattattagttaattatgtttaaaacctttcgtacgattttttaatttcaaatttgaattctaatttttattttcttattattattctattttttttctcatttattattattaactaagtttaagatttgcccatatcaaccttggagagatgcacctcttgttccttaaggaaagtgtggagagtgacacaagccacagataaaggcaacctgataaaatcaacatacttcccaatgtattggagactcgaacaccccaaaagagcgtggaaagaagtctcaatctcaatcccacacataggacacaaggaatcggtcggaaccttatgaaacttcaaattatgagaagtgggaaaccaatcgagacaagctccccaaataaaaatcttaaccttaggagggatggaaagattccataaatatttccaccaagaagagggacctgaagaagatccatcttgacctctgtctaataaatgaataggattccaatatccactgttaattgtgtaccctccaaaattgttaggtcctttttggaaatttagttgtcaaaatattttttaattaatgtgcattttattgaacattcaatttgtttttatcaactctggacccttttt

SEQ ID NO: 125308 - DNA, 4861 bp, Cannabis sativa
  modified_base (4798)..(4825): a, c, t, g, unknown or other
ataataggagatgatactgagattcagaacctccgcaatgctcttggacgcatgcaaggtcacactaataccttgcatcatgatcaggaagagctccatgctatagtgaaccctttgttctaagagcagatgtattagttcatggaattgagggatagggagatggaaacattgaaggcccaacaggcagccatcgacgaccgaacaagacaggccaccgcacttatacagaaagcctatcaagtgtctaaccagcaacaaactgctacgtccagcatcccactgggtggcatagaagaaattcctgttgggcataccgcccagactcttaactgtcagtcgtccaatcctcggtcacaggttctgcctgtggctcaagtggtaggcggccaaaccttatcttgccattccttaggtggagttatacctaataactccatccaagctgacagctctggccaatagaccggccaaaccaaccaatcactgagacaacctgttgttatagtattcaacagactgagtacaacccacaatctcagggatgatttgaatagaaggacaggtctggacgaacaatatgttcaaccggccattcagcccggtatccaaatccaggacccaactctaagagatcctgatgtgatataggtgggccaagaggctgaactagttcacccatctatgcaagcacagttggatgaattgaaaaatatgttctaaggcctgggcggccaaaaactcactgatcttgagttggaccgtgcacgtggatcaccctttactccagagatcaacgttctagaactacacctcaagtttaagatgccgacctggaagatgtacacagggaaggaggatcccttgtcacatcttaagtattttgaaatgcagattgatatacaaggggtacgaggagatgtgaggtgtagagtattccctgcaacactttcagaagccacacaacaatggtattttaagttaccacgaggaaggtttaattcctggaaagccttctcctcggagttccatgcacagttctctacttctcgccaactcccattaaatttagaagacatggtcgaagtgaagcaaagaccaggagagcctctccgagcctatataaggagattcatgatagaggctacgaaagtagcacggttaactgaagaagggaggctggccacaatactgggaagcatcgaagtacttggaaaactgtggaaagatatcaagaaaagtggccccgtagactttatggtagatttttgagaccgagcagatgggtttattaagcttgaagagaccattcaacgggcagacgtcgagcctaagctgggccaatcacaggccccctcggtaggagcatttcctcaaaacccctagtaccctagcaatttaaattcgagcggtaagaggtctaataacaacgacagacaaggcaatggaaagaagggaaagttcgcaggcaaagctgaacaaacccctagagaaaaaccttccatgttcactgctttctctatcctaactaacaagttggagacatacatggcaactcaatttgtagtcccgtacaaaaaacttgctcccatgaaaaaggacataagcaagcaggacatgtccaaattttgccaatttcatgaagactatggccatgacactaatgagtgcaacaatctgaagtgagaaattgaattcctgataaggaaaaataacctgcacatccagaagtatgtcaaggccgaccacaatcaacgagccacccaagcaaacaacaaccaagatctattaatgcctccaccagtagacgtgcattaaaaagtcatcatagggggcccacatattgctggagatttgggcaaagctcgggagaggtatgcccgaaatttacaacacgaacaaaaggaagtagttgtagccgtagaataggaagccaaaaataccacgggtaggggaacctaccataaccttcactgaagaagatgctatcaatgtttgcttctcgcacaacgatccattagtcgtggaagtgcagatagcacacaaaatagtggcccagactatgatagacaatcaagcctcaacaaacatcctgttcacaacatcctgtttaaatgcatccataagaccaagaacatacaagtttctgaacagatatgggtctatactgttataaagtcatgccatttggtctaaagaacgctggagctacctacaaaagattggtaaacaaaatgttcaaagaccagatttgacgaaaaatggaagtatacatggatgacatgcttgtaaaatccacgaaggctggggtcatatagctgacctggatgaatgcttcaaagtcctcagaaaatacaacatgaaactcaatcccttaaagtgctccttcggagtcaactcgggtaagtttcttgattttattgtcaatgctcgaggtattgaagctaatctagaaaaaattcaagccctcctggatatgaaatcgcctacaaaaaccaaagatgtccaaagcttaactgggcggatagctgcactcagtagatttatttcaaagtcaacggacaagtgtgttcctttcttcaaaatcctgggagggaataagaaatttgaatggatagaggaatgtgagaatgccattcaagagctaaaaagataacttgcaatacctcctatattctcaaaacctctggacgaagaagaactaggaatacacctagatgttacagaacatgctataagtgtcgtgctgattagggaagagaacaatatccagcatccggtctactacatcaacaaaagacttgctgaagctaaaggacaatattcgctgattgaaaagctcacttactgccttatcttagtaataaggaagctaaggccttacttttaagctcatcttgtttcggtatacactgaccaattattacgccaaatattacaaaaacttgatgcctctggacaattactcaaatgggcagtagaattgggtcaatacaaaataatcatccaaccctgaacaataatcaaaggataggctgtagcagattttgtagttgagtgtacgggcaaagaagaaagcattttaaaaagtaatgtggagtcagtaacctgacttttgtatcttaaatattttgtaaaaagtttaacaatgggatcccgacacttgtaaatttttttataaagtttataaagtttcatagttaattctaaaagttttaatttgacacggttttcaagaaaattctttgattagcaagcactactattgaaaaatcactgtagcctgccttagctttagggcgttacataataagtcgacactcaactccctatcttccaccctaactgacatagacctaattcaccttttggagataacaaattccccgataggcggtaggtttccaaaccctctctcaataaaatcacaaggcctacctcattggttaattactcatgattccacatatgaatgtgtagccccagagtcatacaatacagtaaaataggagttgttgataagaagctgacctgtcaccatagaaggactggctgcagcatcagcttgagtaatagcaaacactcgagtaggtatgggttttgcctcttgcttctagtcctctttctttgcctgagggcaatctttcttaaaattcccaaccatgccacacttgaagcatgtttctcgattacactctctaagatgatgtttcttacaacgtcggtactcaagctaagaataaccatggcatccacctctgccttggttctcttggaacctcttgttctgtcccaaaccgccagatgctagggtagtccttcttttctaattagtggtggaatcaccactattcctaccatatctaggagtaggaagagcaggtgttccaccaacacttggagtctctcggggctcttgaagaaatttcaccgcacctttggctcgtaaagctctgtcaaccatctcaacataagttgttgtttcactcgtagtaattaccagatcacgtctaatctttgcatttagaccagccagatacttctctttcttactgaagtctatgggtactatacccatagccaacttggctaaacgatcgaacttcatcgtgtattctgttactgacatgccatcattctgaaccagatcagtgaattccttagctttgcactgcggaccacctcattataatactttgcattgaaaaaatcatgaaactcttcctaggtcatggtggtgatgtctcgggtgagggacactaactcccaccacacgagcccatcttcctggaactgaaaagtagcgcaagtcactcggtcatttctgacgactcctatgaacttaaagattctttcaatcatagtgagccactactcatccttcataacattcgggcctcccaagaagactggaggtgcttgcttgtaaaatctctcatataatggctccatatagttgccagcaataggttgttctattggcaccactagaaccatagcggcctgaacttgcggtagaggcactacaagaggaccctactatctcagcctctgaatctcttcttcttgcttgagaattcgagcttgtatttcctcaaacctttattaatttttatacaatgtttctaaaggaaccatgtatgagattaaggttgtatatgcctacaaagccataacatgattcatgtcgaggtcaaaagaggacagaaagttggccacccacttggaaccatggcctaggctggccagggttcccaagctttgagagggtttgcctgttggaattattttacaaggnnnnnnnnnnnnnnnnnnnnnnnnnnnnttaacatcctaaatatgaacttagatcggaagagcg

SEQ ID NO: 125309 - DNA, 1640 bp, Cannabis sativa
tagcaattgaatgtaaaaataaaattttttaaaaaaattggataggttaacctgaccaaaccgactaattttattgggttagttactattttttttttcttaattgaacggattgcacttaattttttgtaatccaattattatattggattgaataaaatgtagcataaaccgaccgacgtacactcctacttttgacaattataaatattgtctttcattggagatgctaaaaggcattattagtatctagcaccctcatcagtgtcatactgttattggtgcaattaaatatttagtctcatataatttcaaataatttttaaaaaatatcactaactaaatcgtaaagtaccacaaataaaattaggcactactctacccaatagcaattgcttaggagtaaagaggagagtgtgtggagcgcgtgaagtagctgggggtgcagccaggcagccaaagcgaaattgagtagcttgtgtaagcaaaaaataaattaaaaaattgagtagcttgtttaagcaaaaaaataaaataaaaaattgagtagcttggtgcattgcacctggactctattatggatcgtcatcttattcattgaaatttggttaggacaatctaattaattaattaattaactattctatcagaaaaaaaaaaatcattaactatatttcattttatatatttattccttgaagattgcacaccaaataaataaataaatataaagtgcaaaagaaaaacttcccctcttcttattttatttgatgacttctagtcacagttatatattttttttttcgttatttttatattagcagctaaattatttaaaatacacatttagttacacttaatccaacaaactcattttttaatattaaaactctccaaatttcatttttgttagctatttacttttattgttcaaaaaattatgttaaatgtcacaatatacatgccacaatgtacacaagtatacacataataaattttcattagtctacctcattataaatatttaaaaaattaaaaaataatttaaaaattataaaaaaaaaataagaacaaaaaaatataaaagctaaaaattaattaattaactctctcttttttttctctttcttataattttaactaggaaacaggccgcgcttcgcgtgcggcgttaaataattatataaataataattacacaataaaattatactttaaataattaaaaaaaattatcatacaacttcttatataaataaaaaattaggcaatttttaattaaaatatacattatggtgaagaaaattagaaactaaatatttcttacacaaaatagagatctaaaacagaaagaatataataaatatatagaaaattcatcatataattttaaaacaactatcattaccgtatctcatttatagtcaccattgtatttaaaattgatgtcatcaccgtatctaatttgtaatcatcattaatattctttctaataagtttgctttgtacataaaataaattaaacaatgatccctaagtacttacttttattatgtgagggaagagaggatgataaatataataagtttagaattttgatatttttggcctattagttaataatttcttttgataaatta

SEQ ID NO: 125310 - DNA, 824 bp, Cannabis sativa
atgcccacataggtaaaactgaggtcacgtgaaatacagccagccagtaagtgaacaaagttaccatgcacggtaattatcaatggttctaagagaatcaagcaagattaaacaatgagaaattgaccagccaaggaaccctagctcgaccatcccctggccggccaatgaattcctatgtgtcggccaggccctaaaaatagagttggtcagccaagcatgtgcagacagcctcaaagagaggctagaagaatggtgggttcacaagctaaattttagttacaaaacaatcccatgaagatagggattcttcctcaaactagtatctacctattctctagggatattacttatctttcttgtaatttaaatataagataggaagagtgatttttcctattttggaggaatatttacctatctgaatgatgatctattgtaagccctacattaggggtgttcgcagtgcggatggtgcggtttttaactattttttgaaaccaacccgcacatgcggttttttcaatttcccaaaccgcacccgcaccgcgaaactaaaaaatgcaaaaactacaccgcaaaaagtggtgtggtgcggtgcggtttatgcagtttttacggtttgaactatcgctaaataattaaaatattacaaatacaacaaagcttgagcaacacttgtcaaaaatacaataaggcttgaaaataaatatgaaaaaaaaaggttcaagtttacataatacaataatgagtgggctaggttggaccttcacatgttggacctaaataaatataaaaattggtatttttatattatgcagtgc

SEQ ID NO: 125311 - DNA, 1069 bp, Cannabis sativa
gaccctgagtatcagggttcgcctcttccgtgatctgagtgactattgaatcccccataggagaaatgccagccactttgttttccaacttcccttttctagccttggaatctttcttcactgctaccttccttctattttcttttgcgatgtttttcgaacagcttcccactacaaagggcgtagatccatccaatacatgggcttcttgtgcgtaggaaactggaatgttatagagatcttgatcctgaatttctttggacaagatcgtggccgatttttttagcttcccgtaacctgagtctccatagtcttccactattcgacgttttcctcggcttccatcatcactcctaccctgagtctcctctttcccaatgtcccctgccttcaaaccataatcctttagtaaagactttgaccccccttctactatctgctgtaagtggccttgattgatactcccgattcttacatctcccatagtaactagagaaggagaagaagaaatagtagtagtccttccattaatggttgtcggttgcttcatagtatcttctagagtactgtacttttccattccttgtctatttccttgtatgccttctcggaccccattatcaacctttagccattttccatacgcagcagtaccctcttttccttcctccaggataatgattggatcttggtgacaatctttatggctatgcccaattcttccacacttaaaacacatgaaaggtaattcgtcatattggaatgctatccactttttctttccttcccagggaagaggaaagccaggacacacgggtttgttgatagacatccaaattccgaatcggaagaagcgatctgctaccatcttggaaatatctgaattgtgcactcaaatcacttcccctgccttggctgccattcgaactgtgttgtttgtagtcaaaagatcaatcagaactccccatgcccgaccccgtattggaaagctagttaaatcattcatccaagattcattagaattttccattttccccaagattagcaccccattagataaataccatgg

SEQ ID NO: 125312 - DNA, 2012 bp, Cannabis sativa
gccacctccgaccgagacgactccgacggagacccacagaaccactccaatcgagacccacacggtaccgactctacattggctggattcgcgaaccgaacccacaatgtcaaaggtgtgtattaatttttaatttttttttgtgagaaaaagttagagattgagtttgtttgtgattgtgtatgtgaaacttaggattttgttagatttaggaatttttttttaaattatctcaaatctatgaaatgggtaaacttttgcttgaggaagaagaagttccgatgggttcgatgcatgtccgatgctcggaccgatggtcccaaaaatcgattttaatagcagaggaccgatgggtccgatgcttggaccgatggggtccgatggtccccaaaaattgatttttaatagcagaggaccgatgtgtccgatgttcggaccgatggggtccgatggtcttgtctcgtgtatgtttttcttgggtctgatgggattgggggtccaatgggcccgattgcaagcccgatcggccccccttttttagtattttcatttcaaatttttttataatgtctgataggtctgattatgggtctgattgctttgtttacttttcaaatttttatgttgggtgcgatgggcccaattgtgtgtccgatggggtccgattctttgtattgttttaaattttttagtttggatcaggccctgattgtttgtttaggtttaattttttattgttttattaattattattttattattcattattaattattggtttatttttaatttttttattaattattaattatggttttattattaattattaattattgttttattaattattagttatggattaattattaattattaattattgtttaatttttaattttttattaattattaattatggttttattatttattattaattattagttatggtttaattattaattattaattattgtttaatttttaatttttattaattattaattatggttttattattaattattaattattgttgtattttttattgttttattaattattagttatggttttattattaattattatttattgttttattttttattaattattgttttataattaattattaattattgttttattacttattattttattttttattgatttattaattattgttttattaataattattttattttttattgatttattcttggttttttttttcagagacctccacatctaataattcaagtgtcggagcattacacaggccgtgttcacatggcgcgatgatagtactacccaaagattaaggctaaatttgaagaattcagactatgggatagggtgagggaatcccctttcaaacagattttcgagagagagactttacaattttcaggagcattgattcatcacttgatgctgcacaaaatcaaatctgacaagccggacgaggtacatttttatgtgggaaggaagagatgtagatttggtagggtggagtttgacttggtgaccgggttaaacttgttgcccggacctatagagaaagacatcaaagagaaaggaagttcggaccgattgattatggaatatttcaacggtaatccttccatcagctttggccaactgcgcagagtttttgagagctgcatagaagttgatgatgtctacaagttggggatggccttgtttgttatgggcgtcctcactggtaaggaggagaagactgtcgttcctccttttgtcataagaatggttgacaaccttccattcttctacgagtacccgtggggaaagattttgtacaccaagcggatggaaacttgtaataaagactacgtggatgtgaagaataagatgctgaaaaaagattaaaaagggagttacacagaaggagtcaaaatactcatcttacggctatactgcagcgttgcagtattgggcatacgaggtcatcgtggagctgggcaatgagtatgcagtga

SEQ ID NO: 125313 - DNA, 1022 bp, Cannabis sativa
aatttctcaataaatccctttgaggaacacatggatgcagtctaccgaattcttaggtacctcaagggaacaccaagaaaagagttaatgttcaggaacactcaacaaggatctcaaaatatacacagatgtagattgggttggttctttcactgaccaaagatccacttctgggtactgctcctacatttgggaaaatctcttatcttggcgcagcaagaagcaacaagtggtagctcgcagcagtgcagaagcagaatttcatgccttagcacatggaatttgtgaagcaatgtggctgaaacgtcttatcgatgaactcaaaatcaaacttgaaggcccaatagatgttctttgtgataatcaatcaaccatagcgatagcaaagaatccagtttatcatgataagaccaaacatgtagaaattgatcgatacttcatcagtgagaaaattgaaaacaagatcaacaccttgaagcatattccctcgagacaacaagcagctgatatcttaaccaaagctctccatcgtcctaattttagggaactcagttcaaaattaggaattttcagtacatatctagcttgagggagagtgtagaaaatcaagctaattgtaaattagttttaaatttacagttaatgcatttttcatttactctagtattactaggtgttcacattgtattatatataccctttgtatatactaaaataaattatcagaaaaaaaaaaaaagaaaaccattttctctcatttgcttcacacagcatcaagagagggtatggaattttgttcaatacgaacttcataactttgcaataagtattgaacttcttgcagtgaaacaaaataagctcgacatgagagatgaacaacaattgctcatattctgtcccaaggccactcagaatgtaaatgatcaaatcatcatcttttataggctcattaactgcaaagagagcatcagcatagttttcatcttcaagatgtactcatcaatagaaaaaaaaaaaaaaaa

SEQ ID NO: 125314 - DNA, 585 bp, Cannabis sativa
  modified_base (554)..(554): a, c, t, g, unknown or other
gattgatttagaggtctactaggctatccacttgtgatacactcagacaaacacttagaccaatttaattggagaattatatagtgttgtcaatttaatatcattgcttaccattcaaaaaaaaaaaaaaatcattgcttatattgtgaggaatgttaatacatatattaatttcttgctattatattgtgtgttacattattacatttgtttctagtttatgtaagatagtataatagaattttgatatataaggacaaaaaggaattatgaataataatgaatttttttagagtacgccaacatttagcatgagtttgatttggaataataaaaaaaaaaatagaagaatcaaaatcacaatcacattttgaatagaaaataaaaataatagcattgaaatgcccttttttattattggaatagttattctccaaaagcttatttcgttttctaaaaaaaattgaacccaagtgtgagaggaaatttgaaaacaatcaaagtgaaatgaaaatgagaaaaaaaaaatgagactcattttcatacttagggantttatagaaatcatggtgtcctgttgcgatt

SEQ ID NO: 125315 - DNA, 1065 bp, Cannabis sativa
gggggggggggggaataattattaagtaataaaataaattaagggcgtatacctgacggttattctaggataaagttaagccctttatataggagagcctaaaccctaatttacaactgaaacccttagatatttacatattaaattgattaaatacaaaagactaaattacttcttgaaagtagatattttccatccagtttgttggcttgttaagggacccatttgcgggtagcttgcattctccggaccaggctgtatagagaatcatgccaggccaatcttggccagtcatacactgtaggatatgatttttctttccatgaaagtttagcaggttgaggtctgcccggccctactcctgctagggcctagcagatcacgtacctcctaagttcttgtacatcatgttcctgtcagttttacgaggaagaggccaggatttggatgtgcaggccagcctttggcaagtggaggatggctttgtacaccttcccgttgtacaggtcaggttcttttggtaagaaagtcactttttagctgaccagcttatgcccagatcttggttgcccatacaagcttaccttggccagcctataggcttctcttgggcgaccagacatgttggtacagctttttaatagctcacttcactccttttggttactgcttgacgatttctccataccttgtatggagaccttgtctcgctatgagcaaggctttgttccacatgtactctatcttagcttacatggacatcccacgtcaggtggacagaatttgggataacaagaataaatagtggagtactcatttcagtaattatattagtttagtgaaatatcatttataaggagctaactattataaggataaaatacattgaagggtagaaaagtaaaactgtccctactcgatgtagatcatctataaagaatcattgattatttggattaaaactgtggataattaatatcgtatctatatttggaacatatagagcgttctatgtaatcaagagtagaattctgaatctatagtggagtcatgaggaattaataa

SEQ ID NO: 125316 - DNA, 750 bp, Cannabis sativa
aattttaggactgaacatgccccaatggcgaccgaatttttcaggttttgaatctggatgggtcgagttcaggtgagttggagtcaagtttcgggttgaactaggcttttatatatatataatatcacttttttttttaacaaaaacactacaaaataatacaattatacaatatattatatacaaatataatgtacaattacatacaataatacgatatattattatcaatttctattttacacaaatacattacacacaatctattttttttttttaatttcttacaaaaaatacttatataattatatatacatattacataaactaacacattaatatttaggttgtagtcacactatttatcgataggaaaatttttagtttcaagtctaagtccccgaaaagtgatttagcatatcacttatcaattctacgtatgttatgacttaagggccagtacaccgtcgagcaacaatttcactcaaagttgaccgacgccaccttgaattcgaaatcaaggtaaaattagtataatgatatgcatatgtgataatatgttagtgtgttttgaatgtctgttagataacatattgattagcgatatcagtatacatagagttatattggataccgatgatggtatatttggcttaaatgttgattgatgctatcacatcagtacgattagagtaccgagtatatgctgatattatggtcaatagtattgtcgtatgaacgttctaaact

SEQ ID NO: 125317 - DNA, 1029 bp, Cannabis sativa
  modified_base (27)..(41): a, c, t, g, unknown or other
aggatgttaatgaaacatacatggtannnnnnnnnnnnnnnggtaaaatatttccaacaataaattcccccaaaacctcgtgtacacagcagaagttgtggaaggtttcaagaagatggttatgaaatcccccacaggctctgctagattcggagtaaaggtttgtagagatggaagctaggattcaatgtcaagatgaggagattcagaggttgagacaacaaggatctcctgacgtacctttacctcatatgccaatcatttttgttctattgttaccagcagaacaatgtatggctggtaaccaagtgggacctttgcatgggagaatttggatgcaaggacccctagccctttaaggagacttagatgtgaaggatgctgtttgggccgagagccctacagaatttgttttaaggtcttagaagattatagcagatggtgggatcattgttccttttatttccaattatggcagaggttgtagtgtctccttggttgagcaaaagaggaaacctgcattgacattggtgggttcaagatggaacaagaggtttcaggggaccaaaggtcaaggttgttcgcagggtggtttttggagacgttatacttatctatagagctttcactataagaagcatcatctaggagaatgtaatcgtaaggcatgttttcaatgcggtctggtaggccactacaagaaagattgtcctttactgaaaggagaggaattagaacaagagacaaagtccgtaccttctcgagtgcttatcattactcaaatagatgttgcagccagtctttcaatggtaacaggttagcttcttgtcaacgactcctatttttactgtattgtttgactttggggctacaaactcatatgtggtgtcacgagtaattaatcaattgggtagaccttatgattacattaatagagggtttggatgttggtattatatttatccaggatcttagatctattgaaattatgttgatttaacaacctaatattgaacttctaaaacgatg

SEQ ID NO: 125318 - DNA, 552 bp, Cannabis sativa
  modified_base (65)..(67): a, c, t, g, unknown or other
taaaaatctcgtaatacgcctaaggtagttagggtgttacaacttacttgaaggattgtagtgtnnntatttttaggtgcaagtggtgggacaaaaacggtaacaggacagaaagtgatgatttttttcactagtgtctgtgtttcccgtgaatggtaccaaaatgaatcattcatacttgtatcccaagcaaatttattatcttacattactgacctgaagaatggagttgattggaatcttgtcaatgtttacacccctcgcaatgtctgggatttctcatatgaggatgatgatgagacaacgactatacaagaataaaactcttcaggaatcccgttagtcattcaacttgcacaattggacgatgtcgaatatatctgtgatgatgttgacccaattgaagtgactaacagggatcgtgagcagcctaatcgtgaagatttagattgtttcaatgtttttagtgatgatgaagacactagtgatagtgataatgaaaatcatgtacctgttaatgatgatgatgatgattatgatgacttgtagact

SEQ ID NO: 125319 - DNA, 556 bp, Cannabis sativa
cgaataaacaaggtaagaaatcgtatatgaatgcacaagaatcttaccataaaagaaaaaatattttgacaactaacttgccaaaaaaggactttacaattctgttcttaatgatgttgttaatggtattaggaattcattgttgctgatggctcatcttcttgccaaaactagattaggattagacaatgaatgtctttggaatggttctctaccttccaacttcacttgaaccttgtactctctgttttattttaatggatttctggttttatctcaaaaaaacttatgtctaaattatattatattacataaatttttaaatgaacattaaaagagaaaaaagaaagggaaaagtttatttacaccccaaatatttctaggagaattaccttatatactattttttttctttttcttttaaaatttacggtttgagtttctaaagtggtttttatgcggtttgttatacgatttttaattacgattttggttgctctgctagttgtaatatgggtttctatgtagaattctgtaaaaattgaaaaaaaaaaaa

SEQ ID NO: 125320 - DNA, 1429 bp, Cannabis sativa
tcaagtggtaatgtaaatattggtgaggtgggaagtggaaaaagaaataataacgtgaaggttgttggtcttggaacaaatggcatgcatgccccaactaaaaaatgataagaggtgctaagaataacatgtgattctcaatacattcataaggacaatatcgataaaaagaaaaggaggttttctgaaaaggaagagtgcaaccttaatacaatcaaaaagaagggaggaagtgagatgggggtcttgcagatggttcaacgtttaattgtttctctagttttgcagtgatgttctcttctgggttgtaagaggggaataataatggtactagaaggcgacactcgattaagaaaaatgctcaaaaaataaaaaattgggaaggttttccaatccttctagtttttcagaggcttcttttgaggctaggtcattggtctatgatagggtggaaaagtttcaaagagtggtgggtcttctgatgcattagataaccatttttcttttataaatgaaatatcgacgagtcttgcatggcaagatccttgagatggaatgtccaagggattgagaatccctgtacattcaacgcccttaattccctggtgaaattgttggaacttattttacaaggatcttatttactaacacgtattttaatgctatggcaatgcagtataataatgtctcattccttcaaattatctaactctcaaatcctttttgtagtagggtattgccaagaacctgaacaaacttttgaaattcagatgaagcaattgttttctacatagtcttccataatgccctggctccctatgaaattctatacgataggaagtttcgttctccaattcattgggatgaaacaggagaaatgaagtatttgggtcctgagttagttcagaggaccaatgaagcgaatagacaagatcaaggctcgaatgcttactttgtaaagtaggaagaaaagttacgttgattcgaagcacagagacattgcattttaggcaggagaacatgttttcccgcgagtttcaccaataagaggtatcaagcactttggaaagtggggcaagttaagccctaggtatataaggccatttgagatactcgggaaggtcatcgctagccttaccaccagcgttatcaactattcgtaatgtattttatatttcaatattgaggaaatatgtttcagacccaacccatatctttagttatgaagctctagaactacagtcggagactttatggaggagaacagccccagttcaaatcctcgataggaaagaaaaagttcttcgaaataagaccatagctttggtcaaggtactctagaagaacagtaagatggaagaagccaccaggaaatagagtctggcatgaggactcaatgtccagagttattcaggttagatttcaagga

SEQ ID NO: 125321 - DNA, 3539 bp, Cannabis sativa
ttgctcaaatgtatagatggagctgagtgcgactatatactctgcgaagtgcatggtggcatctgtggaaaccacgccgggggtaatgcccttgctttaaaaataatgcggcaagggtattactggccaacactgcgactagatgccttaaactttgctaaaaagtgtgacaaatgtcagcggatagccacttatgccaaccaaccaccaagtcaactgaactctataacgattccctagccttttgcagtctggggcatagatttaattggagaattacccaaagggaagggtggagtaaaatactctgtagtcgtagttgactactttactaagtgggatgaagcaaaagcccttgcgactattacagctgttaaactgcgagagtttgtgtaaaattccatcatctgcagattcgacataccttacaagttgattttaaataatggaaagcagttcgactgtaaggaaatgcgccagctgtgtgatgagttcgactgagagagcttggcttgcagttctacctgctctttggacttctgaagattctcgagatctttgtctttagaattcgcatcctgcttcagcttcttgttgctttcttgaaactaagcgatctactttttcagaagattaacttctttggaacctacgacgaacgccctcgagaacacggtcataaactacgcggccagctccgcccctagtgatatcatttcctcggtaggaatcgcttccatccttgacacgaactcgccgttcatgaacttgtcctgcagagtcacaaagtcgcgggctctgacagccgggtcaatcatgaccttctttcccttgtcctgggaaggtttaacctgcttcttggacgagtcggcagcaggggtcacgacaacgtcactcttcctcttctgaggaacaataggagaagttgtcgcagtttcgggtttgggcttgcagttgagtactggagcctgcttcaagaaagtcatttctgcgaggacgaaaaaagttaagataattacaaataattcataattatataccacgtatatgcaatgagttacctgatgttggtcgagaggtttgtttggaaagatgcttgtctatcttctcctttagttttttagatggctctttgtataccggctcccgatgaaggcttgcgttctcaggaattagcttatgttctcgcaacttggaagttgtgcacaataatcgcctatcgcgttcttgaatagggaggctaccgagaacttcagcaacttctttgcggactgggtttagaataggtcgagccggtctatctgcgatcaatgaggaagtaaatgttaaacaatctcataagataacgtaaatattaactaagtgttgaaaagcgcagtaaactaggtcggcgattaaaatcagtcctaatccctggtactttgaacacgtaaaaccacttaaatttctaatctcccatattggaaaccatgccttctacctcgttgatttcagaagtggcccacttgctgaaatagtagaagccgttatggaggcccacgttctttatatcgtagaaataactgtaatcctccatcgaaggctccctatgcgcgtactccatgtacatcgcataaaacctaagagctatgcgatagctgtttggggttagctggaagggagatacatcataccgcttgaagatagcagtaatgaatggatggaagggaatcgataccccacatcgaagaatgggtataaaaacaaccacatcctctgtggggattattgcgggattggtaaaggaaagatgtggtctctgagtagagcgaggacacgtggtgccaagtcgcagcaaattcaacctcgtaaaagtggtgagatcggatttggtgactcgggagaccaggtcctcgcatgagaagggttcgttcagttgcatattatccaatgaatcagtcccacttccctcagcatcttcctcttctcttgactcgcagtcaggaatctctcagtcatcccccatctcctcaactttgacgtcaggagcatgcctagagtgaacaaggtgttcacgagcggacactatggattcgctatcatgaatcttgattgtccctggttcagcgagctcctaaaccattctttctatgtcctcggaggacaatggacctaaagtcgcagttctagcgactagggtttcttcttcagaaagtgaagccggaataaagctatcttctttgtcctgctcgtcagcgaaggcaccacctcctaagccgagcatttggctaaacgacaagtcgctcatctgaaagatagaagatctttttcagtgtggtgaaagtgcaaaaataatacaagtgatcccactcgcacgaaaaatacaaaaattttcaggttagctcggcctctcaagaaatggctgggtgtctctcaataacctaatgaccatgtagattacatgagtattaaggtactgagatacacccaccatttcgagaaatccagccaactctcccaaggtataaatcccacatgtgcaactagtagagtgcctcaaaaaatggatgggggtttcctagtgacctaaggggcttgcatctttaagcatgaccatggagttattgggaaacacccaccgttttgagaaatctaaccaatcacaacatgtgaacacatcacgcctatccaactagtagcatacctcaagaaacagttgagtagtctccagtatcccaaggggcatgcccttctcgcataaccattgggttaatggaaactcctcactgtttcaagaaaaccaactagttgaaacatgcaattatgcaagaaaagagaaaactggccgcacgtcgcaaatggctgggtgtatcacagtggcccaaggaacatgcgatcgcacgcatgaacattaagttacggtgatacacccaccatttgaaagacctaaccagtattcccaataaaaacatacagagaacacaaggaaattctaaacaatgggttgggatgaccaaatcccaaaaattcctaaggaatatatatgcgagtatttaaggtgttcatctcaatactcgcgagtattcaagacagcaagcaaaaaaggtgtgaatactcaaaatgttgctcctaaggttcacgattatgcaaatttcaagcctattttctcctaaaagttacccagtttttagcagagaaatagatttctatatgcattccctacaatgacatacattttccattccctaaaactcaaaatacagattatttctcaaaaatagaaagaaaattcacagaaaaagctttgaaaactaaccttgggattgatcaatgccttctttgattggtttttgattgcttctgaaactcaaaatttttggagaaaagagggtagaaatctggaaagaggtttcaaatctatcagagagataagggaagagggaagatgtaaatgagagggaaaatgtgaattgtgtttgtattatgaggcttaaataccaatagccctcactaattgggatcgtgacacgtggcagaaggaatgcctaaggtcatcccat

SEQ ID NO: 125322 - DNA, 1273 bp, Cannabis sativa
tgtgaccataccattcgcattccctgcattgaatacattttttattatttggaataaaaggtttagaaggactgttacttgaattgttacctcttggagtttttaagaaattgttttattttcaacaactttcatgcacttttgaattttttttgttaataaggtcatttcattatcaaaaacatcatttttagaaactttaaaagtaatacctttgtttttctcactcaagacgctttgtgtgctctttttcttgatttattgattgaactcaaaagttcttaaagaacccatgagttcttcaaccttcattttgccaatatctttggcctccttcactgctagtaatttcgtgttaaatttgtcaggaagcacacacacataatttttcaaaccaacacagattcatctaatttttcttccaaagtaagaaaattattagtaatatcgaataatctttcataaaaatcatataaagtttcagtttttgatttctcaattcatcaaattattgcaacatggtaaaacgtgatctctttacatcagcaacaccatcaaacggagtttgaaggatttttcacgcttcttttgttgattcataagatgatatatattcaataaagccttcaccaatatcattaaaaatagcatgcagagctttattattataaccagataatttttcatatttagtagtccaattaagttcaagttttaccttagttgtacattcatcgtcattttcagtagtcatgaccaacttgtaagtatagctcttcatgccttctcatcttgtgacttaatgaatgctctcattctgacattctaatatggataactcgaatcattcaacatgggtggttgagtaatggagcttccttctggaaacaatgacatctcacacaaaacaaattattcgaaataaaataatctcaaggtctcactaagagtttagtggcaaactttgataccaattgaaatttttcgtattttttattatttaattaatttcttaattaatgcggaataataaaactaatgctgaaatagtttttttgtagctacagaaggcaactatgtaacttcagaataaaccagaaaaacaaatagtgcagaaaagtaaaaaaaaaaaaaacacacacacaaggtttgtgtacgtggtgtcaacaatccttctagatcattactagtccacggggccacgtctagagataagattcattagatagatctaaaaaatacaaagtaattgacttatgcataaatagactcc

SEQ ID NO: 125323 - DNA, 721 bp, Cannabis sativa
ttttacaccctttagcttccctttttataaaataggttgaaaaaagggaagctaaaaacccattttgtcgtagtgacacaaattgtcattgatttaatttgagtcacaataaattgtgatttttgtgactaatatttttaaccacggactttttattcacaataatttataattagtcacaactctaattttttgtagtgtaaattaccttctaatatttaaccatatgagctcaaaatttactattatgtaaaggtattcacaacaattttacccatcaactacacccataaagatttttctcatatcaatcatgattaagcctatcaatggtcacatgtataaataaaataattgcggcataactctcaatactttcacttcacttgcacttaaccctaagaatctaaattttggtagccaaacctcccataactacaaaatcgttagcaatttacaatttttatctaaattttaatgttaactgttgaattgtccacatgtacagagtgtacacgtggctcatacttattggcacacatgattttgtttttttttttaaaaaaattaaaataaaaaattagaaacaaataaaaatatatattaactcatttaatttttctccaagttttcattctttttcttattcaatcttcgtatcatcaccgaaaccaccaccaccatccatagccaccgaaactaccacccaccacttctaaaa

SEQ ID NO: 125324 - DNA, 1237 bp, Cannabis sativa
  modified_base (45)..(69): a, c, t, g, unknown or other
attagtaacctgctattacaggttaaagaaaaatgtaaccatatnnnnnnnnnnnnnnnnnnnnnnnnnaatagtcacccatatatattatatgttaattcgatgtgtgtgtgatcaatacaatataaattaatggtactgcggcttattattagtttatatatataatttatattgatcttatatatatatatatttttggagtttatatattttattaatatcatgccaaacaaatactttgatctcttataactcgtgggccagcaacgcggatctaatttaaaaaatatatatttatattattccataagccttttggctgctttctagctaccttcacacattttagggcacgataaataaaggtataattttacaaaaatttatatttttttaggtttaaagtttttatttttatttttaaggtattttataaaaatacaaaaaaaaaaatcacatgaaaataacaaaaaaataatattaaaataacaacaaaatagcataaaaaataatatacaaataacaaaaaataataacaacataacaaatatataacataaaaatacactaaatgatcgtatttaaaaaactgtaaaaatattaaaaactccttacaaactgtaattttgtaatttttaatttattgtttttgtattttttttaaataatcacataaataaatatataatttttgagttatcctttttttattacacataattaattaaatataactacaaaataattttaattaataaataccttattttataatcaaaatactaaatatataatctcatataacttataaaactaaatataaattaaagagtaataaataaaaataaaaataaaaataaaaaagaagtatacaatataaattctttattttaaaaagtaagacatggcatttcctttgcacaaaaattgatacccaaatcttggcccaaactggcttaatttgatagtggttatatattaaattagatgatgatacgaaatgaataggtgagattatatgattaataaattaaagcatgcttatatatatatatatatttgttttgaaggttattggttggttatataattgattatgttatgtactgtgatgtgaagctgatgatggctacatgactagatcatattggtgcatgtgacagcatcttatacgtggagattatgcgcagtgcggttgagatatatatactttttatatatactaggtgattgt

SEQ ID NO: 125325 - DNA, 1160 bp, Cannabis sativa
  modified_base (1126)..(1135): a, c, t, g, unknown or other
gtccaacagggaattgtataaagattccatttttccgcttagatcgggctatataaaataacttgtaatattttgaaaataaattttacgggatcccagatatgtaactttaaattattttggtttaaagtaaaaatgtgtatgtttattgcatgttattcattaaattaagtttattatttatttcaaatcacttggtgtatagaccccgattaacgagattagtacgtttaatcacgacacgtggtgttcctctgcatatgacgttacaatttgatattagagcaccaaggtttttaaacttcttgaagactagcagaacatgtacaatcatcttcaaagacaagcttaactcatggtgcagtaagtgttgagagtaaatatttatatgcttatgtgattaaatatttattgtttttagtaatacgcatcatatgagcttctagaagataatttatttaatgaaaatcatgattattaaatgtgagtaataatttctatatttgggaaagaaattgtgtaagttagttagggttttggcaaaaagtgtgtaagtgtggatttggtgcctgactcgatgggattgatgatttcaaggttatttgaaagaatagatcctactaaatcaactaaatcactgagcgagtctgtagagcaggatgataatctagccaatccactggtactgccagcacctctgcataattctggcaatactgtagagatgaataatgctaatcctcttaccaattggtagtaaatgttcactaaaatgcaaaatgctatactctatcaagaagaagagttgcaccgaattaggcaaccgattcaaccaactttgatagagaaagtgatccctctaggtcttgccccagtggtagctaatcctggattagctctgcaaccacataaagatttagtttttaaacggtttattaagttgcaacctccaacattcttgggtggtactgatattataaaggtagagcagtggatgagtactattactaatattttggataatatgggggtattagaactgagtaggttaattgtgtcgctttcatgtttcaagaacatgtccgcacttggtgggagctagtgttagaacttattttaccaggannnnnnnnnnactcacaagtatgttatttaacacc

SEQ ID NO: 125326 - DNA, 990 bp, Cannabis sativa
ataaaacaaataaaatgcaccattatggtaggaaagctattagactttatctatgttgctgagattttacaaggattggatataaaagctggtaataaccagttactgccaagtttttctatcaaggatttgcaaggagggggaacaaaaattaccagggggaaaagggaaagaaaaaaggtaaaatactcaagtggagagcattgatgctacaaaagaatcaggttagcctacaatatcgcactcacagaggaggatagaaatacgaggacaaggaaaatccgaggaagagcaagcctccaacagtagcaactgtgccttgggagattttcgaggccagcatgctcccgccaaccaccgcaactgatgtacagatggtgtgtcctaatgttgctcctatagctactccgattgcatttttgtgtgtagccaactacaatatcaaaatgaccaacattaaaactgaaatcagaagagcatgttttatatgaatctgcttttaatctattctcttactgcaattgttgctatctggctacgatcaccccactccgcaagaaacgttaggataaatgactgcaatagcaaaaccagggaaatttcagctaggatggccagcataagactcggtaatgtaaaaacttgaggtctaaattcacaagtattctcatttgtagatcattcagaccccaaaatgaaagtaatctacaaaatgtaaaatgagtaccatacaactattatacctccaaaaatattggtgtacagaatctggaaaggaaccgtcgataggatgatttcccttgaccagattcgagtttctcctccacctaacattcaggaaagattaacttagcaaagtgaaataagcttaatagttacacccacaaacacacaataaaataaaaacatatttgtccaatatactaacaccacaggttattttcaaaaaaaaaaaaaaaatcaaaagaagatcaaatgagttagtaacag

SEQ ID NO: 125327 - DNA, 1483 bp, Cannabis sativa
  modified_base (607)..(621): a, c, t, g, unknown or other
tcatttttattttttgattttatttaagtcgggttcaggttcgggtttggggctggggtcgtggtccgagtccgaactggggtcgaagccgaagtttgggtcccaaagtccaggttagtaggggtgttcgtggtgcgggtggtacgggtagtgcggtttttgaccattttttcaaaccaactcgcacatgtagtttttctaattttccaaaccgcacccgcaccgcgaaattaaaaaactgcaaaaatcgtaccgtaaaaaatggtgcagtgcggtgcgatttttgtggtttggactatcaccaaataattaaactatcacaaatacagcaaagcttgagcaacaattgtcgaaaataccttaaaacttaaaaataaatatgaaaaaaaattaagtttcaacaatacaataatttagtgagctttgagctggaccttcacatattggacataaataaatataaaaatttgtatttttataagggcttacttcacatatacacaaaaacaacggaaaaaattataaaaatacggtttcatagaattttaaatatttttacgatttttttcattttatttacagaaaatacggtctttttatgctgtannnnnnnnnnnnnnntgttgattttttgttatctgtatgatattttttttttggttatttaaatgttattttcatattacttttatgttgttttcatgttgtttctatgaaaaactgtaaaaatgtaaaaaaaaaatctttaaacgtaaaaaaataattttttgtacttaagtaattattcttttttataatgtgcagtgcggagcagtttgaaccgcgtattaacaattcaaaaccacaaaccgcaccgcaccgcgaagtttaggaaaaattcaaaccgcaactacaccgtaaagaatttcgaactgcattttttttttttttttgcgatacggtgtggtgcgggcagtttgagcggtttgatgaacaacccaacaagttaaggtcaaagtccaaagtattgatttaaaaaaattgtttaaaaaaattttgaaagtgacttttgttttcaaaattttaaaattttgattattagttaaaatattgaaaagttaaaacagttctatagaacatatttttataaaatattttcacttttctaattaaaaaaacaaaaaaaaaaactgataaaaaagtgttaccaaacgtacctaattaataaaaattacaaaatatatttattacatatcaattttttaaaatatatataataagccaattaagttatataaatttttgttattattgcacattaatatattataattacaaggaataaatatattagatcattaaatatatatagcagtatttgatatatcgtagcactgaaaattaataagtaataaaattatattagtttattgaaatgtcatttataaaaagctaagtgttttaaggataaaatacattaaggggtagaacggtaaatttgtcc

SEQ ID NO: 125328 - DNA, 1893 bp, Cannabis sativa
gagtgtgacttagaagtctagtccaaatttctgagtcaacaatcatcatatcatcaacatgcaaggaaagcaaaatacgacctgcagatgtgcacttgacaaataaagttgagtcatgatcacttgaaacaaaaccgagagacaaaataacagtagagaacttctgaaaccatgctcgggaaacttgtttaagactatacaataatttttatagcttgcaaacctcgccttgcttatgaagaactttagttggaggaaccatgtagatttcctcatgtaagtcaccattcaaaaaggcattcttaacatccatttgagatatagtccattggcgaattgaagccattgctataagagtacgaacagtagtcatttttgcaacaggagcaaaagtctcctcaaagtccataccatactattgtgaaaaattcttagccactaattaagccttgtaccattcaatagacccatcagacttggtcttgattttatttacccaagaagaaccaatagcatgtttacgaggaggcaaaagtaccaaacccaagtataagtcttttgcaaagcaaagagttcctcattcatagtacgctgccaaagggggtcaataactgcctctttatacaatagaggcctagaaagacaatgaatagatgctaaaaataaagtaaaagaagcagaataagaagagtatgtaaaatttagttggcgagtagacttacaaatgcgcatagcagagcatgatgacaactttgtacgctctatgaaacacaaaataagtagaaccaaagactcttaaagaagaatagttaggaatacaaccatatagtttctctaaaggagacaaacctgaaatgatagaagacagaatcatattaattaggtgaactgcagttagaactgcctccccccaaaactggctaagaacaaaagatgacaacaaaagagaatgagcagtttaaacaatgtgcctaggctttctttcaaccacactattttgtttgggtgtatctgtacaagaagtttgatacacagtgccatctaaggcaagtgaattaacaaatttaattaaagtatactcatcaccttaatcacatctaaaacatttaatgtcaacaccatgttgagttcttacatataagcttgaaaatgatcataaatactataaaagtggtaacaatgtttcataagaaaaatccaacaaaaatgaacgtgatcattaataaaaaaaacatagtattgagaacccccttttgtaacaacaggagagggtacccacacatcaaagtgtactaaatcaaagggtgcaatagaacaagttatactttattgaaaggtaaagcataaagttttgcaagtttacatcgactacaatcagaattatcataaggttgcaaatttcctaaggttcctttagaagctaaaaatttgaaacgagactctgaaacatgaccaaggcgagattgccacaaacaaaaattagaagacaagggagacaaccgaaaagaagataaatcaacactaggagttacatatactggtaatctcagttcatctaaaacttataatcctctcgcctacgatcggtcccaatcagcttctgagattgtgtatcctgcacatgacatgaagtagaagaaaaagatactgagtaactagaatcacacaattgaccaacagatacaagattcaataaaagattaggaatatgataaacattaggaagtgacaaatttgaactaacaaaaagaccaataccagctaatggcatgggagtaccataagcagtcatgataggcacagatgatgtaggagtcaaagaaaaataaagatacagaatgcagagacatatggtgtgaagcaccacagtctaaaacccatgtagaagttgac

SEQ ID NO: 125329 - DNA, 777 bp, Cannabis sativa
tagttacaaattttgttgtgattacaagtaagatttttttgtagtggttcttatattagtggcaactttaatatttcttatagattattgactaagcatattcatacgatagacaataaactttctactcttcaatttttgtataacttttgttgcatttatattattttaatctttatcggttaccctaggaatgtgtacatttttttcatgggaatataggaccccacggggactttcttctaatgggaggggggattctctgtctaaatagagaatggagtggggacggagatgatactccccacctcgagagggatccatttagtatttgattttatagctctaattttgatattttataatttataatttgtgtttgtatttagtatgttagcatcatttttatgaattttaagttgtgttttgaataataattagtgtattgaaaaataattaatctgtaatattttaatttttatatagtttaatatttttacatatttaaattttcattataaattttatttttttattagggaattttcttctcccattaggagattctctgcaccattctcgatgaaaaataaacgggaatgagaattaaaacggcgataaaaatagaaaaatactctccgccaattttcatttcgtgtgcatccctagttaccctacaaaaaaaataggaaaattctacaatacactcccttaaaatagatatattgatgcacccctatctgttttagcatccgaaatgattttttagtcaaattt

SEQ ID NO: 125330 - DNA, 908 bp, Cannabis sativa
gaaagtttttcaaagtgaaattcagtgaccctgtgaaaaagtttgaagagacatccaatacttcaagatgttgaagcttgccaatatcttcaggaaaagtaccactaagcttattattagagagatccaacactctaagaaatgaaaagtttgaaaaattcgataattgccctttgatttcgcttctactcaaattcaagtgttctaaaggcttattgaaaagtgttgtgttaaggttattagtgaaattgttgtaacttagatccaagtaccttaaatatggaagttcaaccaaagaagggttgatttcgccactcaataagattgaatcgttatcattagaatgaagatcaaggctaataatatgatgagttaagttatcgcacctgatacctctccatgcacaacaatctcgtctagtacttgtccacgaggaaagacgattgccataatcaacaaagcctttcttcaagctgagaagagcttgtctttctgtctctatgcaataattttggcttgatgaactcaatacatgagtatttgtggctagcaccattagaagcactaaaactttggtcatcatattgagaattttaagtgagggaaatataatttattagtattatgtgataatatataatatgtaaatttaactagactatacctccattaattatattggcaaagactcttctgattgagaaaatctaccgaatttcgacggtcaagagaaaacagtgacataattaataataatatcgtcactgtttatttttttttataatagtattcgttatagttacaatatgattatttctgtaaatttttaaaaactttcaaatagtttacaatattgaaaataagtttatagttttttgaacatgtttggtaaagttgaatattaaaaa

SEQ ID NO: 125331 - DNA, 543 bp, Cannabis sativa
tttttttcttcagttatatatatttcgttttaatgggttgatgagaatatacatatatgtatatatatactgtatctttagtggactttgatcggtgttaattatttcagaattgatttgtattgatcattatataatatatatattgaatgtttgctgtgcggctcagttaatatatatactgaaattattttagtttgactactattttgtttcttttgttatatatatattgttttaagaatttgggtatacagcttcagtaggcttttcattatgcgctttggattcatttttttttttaatgttatattcaattaagtgtgtttgtttctattgtatggcttcagggcttttattttagaaataatatgaagcgtatattatacgatgatgagctttggactgttatttaaatatatgtattacatgttgttttcgtttttggtttagaattaatttcggtgtatatatatatatatatatatattttggtacaaacaatttaattcaaattttggtgttggtttatgactaatattt

SEQ ID NO: 125332 - DNA, 601 bp, Cannabis sativa
  modified_base (43)..(47): a, c, t, g, unknown or other
  modified_base (545)..(563): a, c, t, g, unknown or other
aaaaattaggccttagaaaaatgggggccttgtgcaatggccnnnnntgcccaatacttgggccggccctaattgtgacattatcggctaatcccttgagtgtttgctgttgctaagcataaaacataaaaatctcaaatttcatatataacatatatagcaaacttaaaactcaacaaaatttgagaaattatatcacaaatgtttatttctaataggaggacttatttttatattaacgcacatataatcaaaattatctaattgattaatagtaaattactaataatttattaatttttatgtctaatgatgcggtcattacaaaaacaatataattttaatataaaaaaaaaatgactccaaacttattgtgatatactgtatggctctccaagccaaagacaacgaattcgagaaagtgtggtgataagaagccccacatccagaacccattaatttgaaatttatttaggtgtgtttgctgtaccacaatatatcacactggactcgtttggaacgctgtattaggtcgtattgtattnnnnnnnnnnnnnnnnnnntgtattttatacaatatttttatgtaaaactatacgtg

SEQ ID NO: 125333 - DNA, 1120 bp, Cannabis sativa
  modified_base (550)..(550): a, c, t, g, unknown or other
cgcgccaagtgacatggcctgtgtaatgcttcaacagtggaattattagctgtggaggtctctgcaaaaaaacaagaaaatgaaagttagaaaaaatgaaaaattaaaattttggcaaggacatcgggccctatatcgggcccaacattggacgtatcgagcctattagaaattaaaattttgtggaggccatcgcgcccaacatcggaccaatcgggcaatatcaaaaaaatgaaaaattaacaaggccattaggcccattgggccataaaaaattttgaattctttacaaaggcattgggcccatcgggccataataaattttgtttttttttttacaaaggcatcaggccccattaggccaacaatcagacctatcgggcctttgtcttcctcaaattttttgtgacacaatcgaactggtgtcgggcctgcatcgggctgcatcgggcccaacaaaatcaaacccaaaacccactatttcgcccaaatcacaggtccgatgaaatcaatacctaaatcgaaccctaaatctaacaaaactcacggngcatacataaacacatacattataaccctaaatctatacatatcaatgctccaaatcataaatcacccaaaaattaatgacaaaaataattaaaaacaaaaagatcagaaggcttaccttcaacatctccgttcgaagctcggtggtagagggttggagtcacgtctcacggtggtcgtgggttggctgggtccgtccgttgctcggtggtctgggtaggcagtgatttggtgagggtgagacggtgagagaacaacgagagagatagaggaagagaaagagagttgaggtttgaaaaatgagaggggtatttttgggtttaatgtaaagtggtcatatttttaaaattttgaaatgcataagtttagggaattaatttcccccattagtatgcatatataattaaatttcctgtttttttggtttgctaagaggcaggcaacaatactattttttaattaggattttcgctccctagactttgacatgtaccaaatcatgccctttgaacttttcagatcgttaaaaatttcccctaaactattaagattatcgaatttaaggaatttt

SEQ ID NO: 125334 - DNA, 1241 bp, Cannabis sativa
tctttagtttggggggagggatttaaaagtttttatgttttcactgtcttttttttagtgggttagttagtttggtttagctttagtttatcatgtgttgataattgagccgatgataattgattaattgaactgatgttgtttatttgttcaattgattaaaatttaaaccgcgtgcttaattcctaaactttttggattgaattggataccttgcaaaaattttattttatatagatgtaaattattaatttttggaaagtatcatttttgttctactttggtctatggaatgttgcttgacatggaatagaacatgcgtgacttactctcttgaagaaaaatcattgatggctgttgcttggaaaatgatttaggtaattttctttggaccgattgagcctatcaagcttactgtaaaattttgtccttagtatacccaaagttgagccttagcctatttcaaaatattaaccacttaattgagcctagtgtgtttcttttaattacttttattcccaatgtatcttattatgccatatgtgtataattaagtttggggaaatgaagtgttatgagttggtattattttagaagtgggagattgaggaaagttatgtaaagtgaaagtgtcttcatcatcacaagaaaaaaaaatttgctaattcttctcaaaaaaaaatatatatataaagaaagaatgaaaaaaaaagagaatatatcaaaaataataaaaaagaaaaaaaaaataagatgatggtacgcacataaagtgaacgttctcaatctcttacaagtttgtgaaaatgtggatttgtggcggtgcttggttggattaaaatgtgtgtatggtatgatgtagcctaaatgaccttttatctacctttcacctaagccatgacatttcaaccaaaaaagaacttttgattccgagcaggggttattgacattagtggagagaggtaggtcatgcaagcttattgcacattggttggtggaacgttagtaagaatataatgattgtgatatgttttccaattaaagtgttttgcatctgcatatgtttttttctaacttgtgaatccgagttaattcctagagttattgaattgaaattctggttttgccaattgattgaagttgcacagctggcagtggtagtttaattatttggaggctcagttatctgtcgtgtcgttatttctttgtcttagtttttagttttactcgaggacgagtaa

SEQ ID NO: 125335 - DNA, 968 bp, Cannabis sativa
  modified_base (627)..(631): a, c, t, g, unknown or other
aactatacagaattagcagtcccacatgaccgtatctacgcgattgaagaaaagaacgaagtttttagaaaacctcccccaatcagagctaatcacgacataagagacccaaagaagttttgtaagtatcataaggatattggccataccacccaggaatgctggttcctgcacgacgagattgaggaattaattagacgaggaaaatttggcaagtataaaaagcatgaggaaagtcgtccccaagcggatgaccttgaagaaatgaacaatgcgagtggttcgagaaatcctcgcaacactgaaaaatcattagaggaccccaaattgtaggagactccaagaaattacaagaacgatatgctaaggaagcgagggcgaaactgctcactaatgtgaataacttaagtgagccaccagaaaaaccctttaagaaagaatgggatgacataactttcatggaaagtgacaccaggtgggttcaccacccgtacgtagacgcacttgttatcatcgctaacattggaggagataatgtccaccgcacattagtggacaatgcaaattcagtgaatcttctcaatttccaagccttcaagcaaatggggttacaggaaaaggatttgnnnnntgtagtctcgagcatttatgggttcactggagacacaattgtattaaaaggaatgatcaaactgccaatcaccctaggaaccgcaactgtcactgccaatttgatggctgattttgcagttattgattagtactcataatacaatgcggtaattggcctccatattttgaaggagatgaagattgtgacttctatctatcatctcaccatgaaattccctactccacctggggtagggtctgtgggaggagtccagttggattcaagagagtgctacaacgcagcactaaaactcgcagaaaagaagaagtctgtaaatatgatatacctattggaa

SEQ ID NO: 125336 - DNA, 1241 bp, Cannabis sativa
taaaaatgtaaaaaaaaaaaaagtcttaaaacgtaaaaatgtaattttttttacaaagaattgtgttttatgtaattatccttatttttaaataaaggttccactgtaatttgatattgatatttgactatttatgatttttgccccgaactatgatatatgctttattgtgcctttaaaattttcaactcgttaaaatggtcttcgaactattaatagtgttgtaaattggtcattctatcaacttttgtcacaagtggcaaatagaatattgacatggttctttcaaaaaaaaaaaaaaaaaagaatattgacatggttgtttagacaattgccacactaacgctacatgtgtaattaatttgaaaaaataagttatttttttaatttaatttatgtaattttttaatcatttattaatttttagtttaaatataatctttcaaaaatatattttaattttaattttaaattttttgataaccacatcattattattattttgtttatcacgtatgacaaaacttgacagaagacttattttataacactattttttatgagcttaaaaatttaagagatacaataattcatatatcataatttaagaataaatatcataaatagcatatttttttagaaataattacatattaatacgttcattttaaattatttaaaaatttcttgtcagtttttttattaatattaataccggaatgggcatactgagactattgttcattgtttttgtattttctctctctttctcatttcacgcactgtacatcaacatgttcttttttgtcttttctccattcacacgcacgcacatcactatttttttttctttttcaacttcttttttttttctttttctgcagcttttcaaatttacaacatttactacattatattgttgatattaaaaaaataatttttcttcctttttatcttttatatattaaataagttactaaaaaatttttttttttatttttatatttgtagattatataaaaataaatttatttttataaaaatattttaataagtttataaaataatttgtaaataaattaaatagtatctacaacatcaatcatacgaattacaataaaaaaaaataaggtaatcttatcttaaacaataaaataacataatatagtctaaaaatataaaaaagaaacaaaaaattttattttaatattaatcgttcttttatgtttctcacatattaa

SEQ ID NO: 125337 - DNA, 1060 bp, Cannabis sativa
tagttaatttaagatgtattatagtaacattgatgttgtttttattagatagtaatgtgattatcttcattctcttttgtaaaaagattcttttttaaaattgagtctattaaaactaaccattaataattgaatattcaattatgattagatagaagaagtaatttttgattagtcaattgttgggagtgcaaaaatttaatataatcaagcaaatcgatctaatttttatttaattatatttttatataattttaaataattaagataaattattataatttaagttgtactcctataaattataatgaattatgcttataatttagattgaattgtaatattttgaactaattattgccttttatgtatatatattgttttgaattatttgaatgagtaattaatgttttttatagattaaatgtatataaaaattaagtttaaaactttaaatatttttattttataaaaaattagcctaaataaagattccaaaacattggattgtgtcaatcaaattcaatagatacaacaacatatcaaatgaataattaaaattgattgattatctaaatctaacattccatagataaatttgattggatcaaatagaattgaaatatgaatataacactctaagcccaattatatctaaactgtgcatattatttattaactttttttttgttgctaaatttaacactatttttatattttgtattggagatggtttaataattttataaaataaaatgtgtgctaaatcattcacatactaaaagttaataccattttttttattataaaaaatgtctatattaaaaattaaagagactgcaagagttaatacaatagagtttgaactacactgtttggctagccactgtttgactaagttttcaactttaggattagcctctttggggtcttctaactccactcatggctctccaagtggaatttgatcattggtttcaatactagcgtttggtggccttgggggaagagctgtggataggggtgtacatcaaaccgctcaaaccgctcaaaccgcccg

SEQ ID NO: 125338 - DNA, 1401 bp, Cannabis sativa
gattttttttttattgcccattatatttcacatctgtatatagaatataattatgggtgactatatatattcattaaaaaaaataaaacctaaaccaaacaaaattaattatgtgatcaaaaaccatatatttgacaaatttcttggataacttaaactcgtatgaaaaacttctaatctcatctctttacctaagtttactatacataaattgtacaattattttaaataattagaaggtaaagtcaaacataagttggaggtacgtacttctttaaagctaattaaatggacagttctgttttctttcgttctaatttattgtcatacatagactttgtgatcaatggtatacattaatttaaagtttagccattcaatgtgacttgggcaatagtggagaacatgttattactacacaaaacataatatatattatttatcaaaatttttgaaaattaattaaataaaagtttaagaaattaaacaagtagataaataatggagatgaaaatttttatgtagtttgagtgttaattaattctaatttacgaatcaatgtattggtcgaaagaatttgttgtattacaatgggctcttatcctacatgttaagaaaccctagcttcttgctatattgttttccctctggtttttctaacttagagtagaagaaagtctagagagaatatgaaaggtttcgttcccctttcatgaaggtataaaagaatagggttgtatataaatttttgaaaaccgtcaaacctgaataacctgtccaaaccaaaccgagatagcccgacaaaagatacaaaccgagaaacctgacgaaaatataacccacccaatctttatattgaacgggttgaaaataataccaacccgcctaatcaacccgattaaaagggctttatatatatatatttatatatatcatataatttataggactatttaaataaatataaagttgaaactaatattttttttttatggtagttgatttgaactttgaattcaatctatatttatttgtctcattattataattaaataaaatataaataattgaatgtaaaaatgaaaaaattaaaaaaaatattagtggtcggttcggacaggttaacccgaccaaatcgaccaatttcattgggcgagttactattttctttttttttttaattaggcaggttgcacttatatttttgtaacccgatctttacattgggctgaagaaaatgtagcataaactgatcaaaccgaccgacgtacacccctataaaagagtatttataagctaggatccgaatcccaacatacccgtgacccgctaggcttattgtgcaaactaggcccactataggggtaaatactgttgtgaattattttaccaggatcttag

SEQ ID NO: 125339 - DNA, 1251 bp, Cannabis sativa
atcattggtggtagctggaattgtggttcgagttctcgccattgatgagtgtttgaatgtgcaagatgaagtttcttgaagcttcaatagtttgcatctgataccatattagggacaactaagatttgctcacgcatttgaatcgtatcaaagattttggatctaatcttaagagtatatctttgattatctcagttagtaatatgcattcgctcaaactcaaaggatcaacttttaatacccaattattcatctccatagctaaaacacacactaacgagtaaatagtagtgttatttatttctttcttcatatgatagaaaaatctaatatttaaattaattgtaactatatatattctgtaaaaaagatttaaagaattaaataataaaattttaatcatgaaatattagaccaacatcataatctttatatgcaaaagtaaatgagatttttgtattatttttatgatgtggtatttttttaaatagctttatgatcaaatatatgatagtgttgaaattaatctatttgtagtgattatgactacaaaagtaaatgattgtgatcttttatcattgccttttataaaaataatagagctagaacacatttttattatcaagtctttcattgacgaggagattcacattcgtttaagatcaatatttttttattttgtaaaagtttattatataaattagaaacaatacaatacattattggaatatataaaaatgcttgctaaccgagcccttatgtaattagcccatcttccgggaataagaacaattaaaattattgattttagtgtacaaattttggttaacaatatgtgagaaaaaaaaaacttgttcagctcaaatttgcattaaagcttaaaattgactattccaatgcccatcatcaactcatactgatttttctactgattaagagagaaactttcaactgattctttactatggaaacataatcatttttttcttataggtatgtggacacttagaggttgttcttgaactcattttctcttctgaattggttcacattttagtttctttaaagaaaacaataataaagtttggttatgatgttttgatcctgttgcccttgaattgatttttagtgtatgtttgatatcataattattattttttttaaaaatttttaaaaacagaaaattattttttgaaaataatttggcttgtttggctttgtttttacaaaacaattttcagaaaacaaagt

SEQ ID NO: 125340 - DNA, 815 bp, Cannabis sativa
accttgttgatataggtagtaccaatcaatctatttaaattctcttcgattgtgtagtctcatacatgcagagtctcagaatcatcccacttgacatttctcaggcgatgcgaatcacgaaactactgactgttacgtaaaatttagatataatataagtcatgttgatgaatgtttgaaaaaactaatatattattccaaaaaagtattgatctctctctaccaaacgaaaagcaatatatagtgacgcatttaggcatcttttgagttacgtcattattgtaataatgcatgggtcatatatatttttctatttgttgttttttattgttggaaagttatgtttctatgtccctttttttttcttttttttttttaaaaaaaaaaggtccagtaggtttggggtttggccattcgggtttgggttcggaacgagtccaggttttggcttcggggttggggtcaggtctggggcctagaacaggtttagggatttgggggttggggctggggttggggtgcgggtacgggtttaggttcgagtccgggtttgtggtctatggttcaagatgggtttgggacctagtctgagtttgggtccgaggtctggggcgggttcgagtctgggttgagggtccggggcgggtacgggtccgggtccaatctcagtccattttccaagtctgggtcctgattaattgagtcttgttcatataggagtcactacaagaaatgtcacttttaccagcacagtttgctaatgcgctggttcgcaaactgagctggcaaagagatcaaagttttaccagcataca

SEQ ID NO: 125341 - DNA, 1611 bp, Cannabis sativa
aaactcctacttgcactaatataaaacaaaaaagttcatttcaaactctcgagtcaaaagttatggcaaaaacaaaaacccaaaaattcccgagaaagtagggcctcgctacggcgagcccggtcgtggccgtggcaagggaccctgtaacccaaaaatttgccatttttacaacttcgaattttcatacctaaaattcataccaacatgccaaaaccatacaattccaatacaaaatcagttgatcaaaagaagactatatgaacacatcctatgctcaaaataccaacacaaagcacacgcacaaaagcatgccataaatcaacataacttctccaatgcacatgcttaaacataagaccttcaaatccttcaagcaaatccagaaattcatgctcaaaacttagagattcaaaccttaatttcaaccctaataacaaccaacatagtctataagcactacacatccttcttagagctcaaacacacaaaaatttacaaagtatagcctcaaatcaacaacatgcatgaacactcacaaaacttcaagaacaccataagaaacatcataaataccaaaaatttaaggtgagaaatggataaagggattacctcaagctccaaatacaaaaaccaaagattcttggcttttccttccaaaatggttgaaattgaagaacaaagtgagaagagaaagagagggaaggggtcagccaagggtacaaacccaaaattctagtttttcccaattaatcaacaaaatctgatttcttttcctttttgttaaaaatatataatatggtcaaatgaccaacatacccctaaatcattaataagcataactataaaatcaagggcaaactagtcatttcatcacacacatatataacacataatttcagattttacatttgtcacattaataccaaaaataaatccctaaaaatgcattttggatcctaaacccgattcggccaaaaatacccggttgtgattatagcgcgctgacttgtgagaaaatgcatgtagatagacaaaatgcacatactatatactaatgtagccaataagcacgatatatcattaaatcacaattttaccattctcatgtcaaaattacgaaaatacccctagtacactaacagggtcttaaaatgcaatttaacaaagtagtttcatatattaaattatataataatataattccatattaatacataattaaactagttagggctgctaattcggttccataaaccttagggtattacaattatcctctccttacaaaaatttggtcccaaaatttacctgaacaactccggatatttctgctacatatctgtctcgacttaccaggttgcctcttctactttactgttcctccataacactttgatcagtgcaattttcttgtttctcaagactttttctcttctgtctagcacttgcactggttgttcctcatatgaaagatctgactgtagctccaatgcttcataactcagaatatgtgacggatctgagacgtatttctgaagcttgaaaacatggaaaacatcatgtacaactgccagtgttggaggcatagccaacctgtacgctacttgc

SEQ ID NO: 125342 - DNA, 1907 bp, Cannabis sativa
ttttctaaactcttatatgtttattttcattgttttagagatattcatatttaggatgttaattcagcatacttgttagtaaatctagatcctgaaaaaatattgccaacgtcaccatcatgtaatgagagctttactggcattttgacaggacttagcaccttccatgtgtaacctaactagaagatcaatgatatattttgtctgagagagatacataccagtgttatctgtgtaaatttcaacccctagaaagtaatgaacctatcctaaatctttaagagaaaaagacttgttgagatcagagataagctcggatatcattgaatgattggggtctgttaagtatatcatcaaaatataccagcaagattattagagatgaaccagagccaacaataaagagttaactattagcctttgaaccttgaaaaccccgtgagacaagagtttatctaagtttctcattccagacccttggagcctgtttaagaccatagatggccttgtttaacttgcaaacatgtgtaggatgtgtagtgtcttcagaccctggtggttgattcatgaatacagttttagataggttaccactgaggaaagccttcatgacatcaagctgtatgacatcccaggttcagatcttgatcatactttgcaatagaaaggatcaagggttaaagatctgaacgaaaggagtcatattattttactgacatcattgtaaagattacgtaatctctaatgtgtttatttatcgtttttaggaattttatatttaggatgttagattatagaattataataatcaacatacatgcatgttagtaaatttagatattggtaaaataagtttccaacaatttgtgcccatgaattgctgtttttcctctagaatggcatattacccctttttgatgaagatggattcgatgcaaaagtcggatctctgatcggacacttggaaggtgcccatattgatagattgtctacctgggcactaggtggttggggcccggggactcgagtgctcaaaaatcaacttgcttttattctaattttgatacctcaaatatgtctgtggtatgtctagctgatgtgccgatgcaatttttgaccattttgtactaagacgatcccgaaaactgaaaccttagttgaagatatcaacttgggcgattggtgaaaccctaggtgcccaggttggcttttgggttatagtttcgtgtaattttagctcccagggcttagatttgctccatgtcttcatggtataccatactaaaagatagtgagttgaattcaagttgttgaagcttgaactttcatcccagaaatcccagagtcaacttggacgcagggctagggtctcttcccaggtcgagtgctatgactcgggtctacttgatttcatgatgtcatccttcatgccacgtgtcaaacattgatgtccaaattactaagaaaaattttcaaattaacatcgactttatataaaattaataagaattaatatcaatatttctattaatatatacgatgatattcttaaagtttgggtatatattttgagattcataattggatctctgatttacatatatatatattgtgatattttaaaattaatctaattttgttctgattgtgtatgttgaaatccagtgagatagacgtataactttgtttaagctaagtaaatttgggttcttgaagctttctgcatatgtatattttatatatttatatttatcattagttaaagactaatacaatgaccctattacacattgtcatcgaggcttacactatatttggtaaagaaggagggatgaataaaggaagagagaggagagatggattgagacttttccttcaaatacacaattttcaatccctaaaaaaaa

SEQ ID NO: 125343 - DNA, 1425 bp, Cannabis sativa
agaagtacttttggtatttgcacatgggctctttttgttttgtattagtgatttttgtgactctttatgtattcaggggcaggaggattttcttacttacatgagcctttatggtgggctgggatgataactagtaagttttgctaactgtttgtttatttattctggtaaactttgtaggtattttactttctttgatcatgtaattacagagcatattagaaatattaatccacccatataaatttagtcattgaaaattttgggacgatttcatcctagcatctttgtgttcatttttctttcctaatacaatacaatgcaatcctatcttactcaccatgtaatcgaaatggttgttttatgtcttgcttttcaagctataatttaagtacattttcccttgatcatcatcatcataaataaatacaatacaaggttctaaagcttacaaaattattgctgagcaaaaatatggtttagcgaaaatgtcacattcacagaaaaaaaaaatcttgtactttaaaatcacactcatccccattcttcatcgttataaaaaatcaaactaaccttcagattcgcgcacaacttctgggcgcacgactggtggcagcctgggtgggcgcacaactggcgctgagctgaggcgaggctgactgagatgagagtgaatcgtagggtttttttttccggagaaattgtggctgctgctgctttactttgtgtgttagggtttgaatagagagaaaataaaatgatatatatatatatatatgtttagggttttttttatttggactgggttggggccggctggtctagtgtatataatatatgtatatacttttatttttttttgcttgggctgggctgaacggtgcgggttgggttcattgggttagaaaaaccccaggccgaaatcaacccaatagcagcaggttgtatttttatcaacccatatgtatttcggcccacaaaaaatgaccatggttcggaccatttcaggttgggttggccgggttggtcggcccattgtcaacccatgctcaaccctaatcaaatcgaccactggtcatataaagaccatactaattctaccaaaataagactgactattatggccatacaaaacgataaacttaactaaagtaatcttacaacatcaagctactcgaaacgataaagttagctatagtggccttacaatataaaactaatcatacttggtcattccaacatagggccggtcttgagggtaggcaaaccaggtgtgcgactcagactctcgaatcttcagggtctcgaaatgtaaaaaaaaaattattaatgtatagataaagtatcaatatatataataaaggaatgcacaaaggattcctatgtggcagcttatatgagtttttttcctaatcttctttttct

SEQ ID NO: 125344 - DNA, 1193 bp, Cannabis sativa
atacttataactttaatttaaaattattacacttagttatttagttttttttatttaaatatttaaaaagtaaaaaatggaataggttgaatgtatttccaaaaaaaaaatggctaaactcctccatcttttttatagggtaaatggcggcaaaactcccaaaacttttattttgatttcacttaacccccaaaactcaaatttgggtgataaaacccccaatactcacgttctgttagcaatttaacatttccgtcattttaagtgttaagtgccatgttggactgtccatgtgtgcatctacgtggatacagtgtacacatggcacaattctattgttccacgtaaaaaatttaaaaaattaaaaaataaaaataaaattaatttaaattaaaaaaataattgcaaataaaaaaataatttttttttctttttctttttttcgtttctgttttttttttcatttacagttctctttctctcccccagaaatcaccattacctaaccaaaaccaccagcaactcaccaaaaccacctccacataaacccaatcaaaattcaaagctcacgtgaaacaaaaaaaatgcaaatcacaaaatacaaccccattttgccgtccctgaactcgcaaccccccaaaaggacaaggaccccatacaacccattacttattatgcttagacaacttcaatttcccagctttcccagctttcgaagaccgctgccaagcttaatggtctggttaaccatggctaagatatcaagaaccacatcaccaggaacctaaaaacccataattattcatgttaagtaacgataccgaagaaaaataaaaaaaaaataaaagctaagaactgcatatacaggtaatgagttaactggaggaagaataaagaagaggaaaaatacttacaactaatttatcaacgaaggtctccggcgaaccggacagagtatctgccattgttgtagaaatcttgccttgacaaatatatcggtggttggagctggaaactatgcgagaaaacagggcaaaattcatgtatcaaaatccatgataactgatatggaaagctttaaggatcggcaaggaaatcgcagccacggtctctccttcatttcaaccgagtggctgcccaagggttttgaaaaccctaaattgggactaaaggaggagagagagagagagaga

SEQ ID NO: 125345 - DNA, 678 bp, Cannabis sativa
atctattcaagtattttttttttatgtggaataaggctccatattttttaagagaagatagctaagttgggagcttcctattggagggactacaatgtatcgtcttgtccaaaagctaaagagactgaagcttgttcttaaagatatcaataaggttcagttttatggtattcaacagcaaaatgacggtgatttttaagagataatagattgccaaaaagaactgcagaattctccattatgcagtgaactaattgaaaaagaacattaagctcataagaattaccaaatcattcataaagctttgctttcttttctccatcaaaaagttaaagtgaaatggctcaaagatggagatgaaagcactgctatctttcatgccttaatttgagctcgaagaactactaacaaaattcattcaattatggatatggcgggtaacgggaataaccagctagaggaagtgagtaaagcctttcttaattattattatgaattactgggcaccaatttggagagtagaagggcaatgatatctagtattattaaacagggtccgattatttcagattagcacaagcatattttaaagtcaaattttgttaggattttatgccctaaataaattcatttctatataatcaagtttactaattaataaaagatcaaaaatcattt

SEQ ID NO: 125346 - DNA, 1252 bp, Cannabis sativa
  modified_base (44)..(49): a, c, t, g, unknown or other
aaaagtattacctttagagaattttgaaaaattctttttgtcannnnnntttttcatgtatttctaaaagtttttagttaaaacattcatctcatcatcttcttcattatctgaaatttctatttcaacaacattaaaagtaatacctttacctctatcaattgtggccttgggtttgtctttttacttgatttgctgatttagttcaaaggtacgtaagaactccatcaacttctccacctggatcttgttgaaatattttacatcttccatggccaataacttagtatcgaatatgttaggaaggactctcacaatttttccgactaccactgattcatcaagtttttctcctaaggcaaaaaatttgttagtaatatcagatgatcttttataaaattcagatatagattcattatcaaacattataagatcatcaaacctagtttgaaggattataaatcaagatcagttaacatcaattgttccttcaaattgggtttgaagaatttaccaagcatctttagcaggttcacaagaagatatgagcttaataaaacatttacctattccattaaaaatagcatgtaaagctttactattgtaagcagataacttatcatctttagtagacaattcaagttcaggttttaacatagaattaccttcataatctacaataacaggatgagaccatcctcaaagaattattccccatgctttctcattttgagattgttgggattttatgccttaaataaaactcaatttcattataatctcatttaatttcaataaagataaaaaattatatctgtaacaccctaactaacttaggcatgttagcgtgatttttaacgtactgttcagctcattgctaatcaacgaggttatcaaaaatagtgattaattaaaatttactaatttaattagaaacataaggtaatacacttataaaattctgggatcccattcacaaaaacatttacaaaagtttgtcgcctagcgactatacaaggtaagccctggtgttccaaagatcgtacgctccaggcctaactgctcgacatgtacagtcttcatctgctcgctctcacggctcctcagccttagccttgcccttacctacacatagaaatggcactgtgagtcaatagagtcaataagaaaagcataacataaaacataacaatatcccaggttataatcaagcgcccacacacccaaccataaccctatccccatgtcccac

SEQ ID NO: 125347 - DNA, 555 bp, Cannabis sativa
taactaaaaaattatttcggatgctaaaatagataagagtgcatcaatatatctattttaaaggggtgcattgtagaattttcctaaagtatatgccacaaatactttttttgttaataattttcacaatttacttgctatcattttctttttaaaaataataataaaaaaaaaatagatgtagttttgttggtaaaaaatgtggtttttcaaagcttgtcgctaatacaatttgatcgtcgtttttgttacttaagtctgtgagtcgttcaatattaatccttgtcgtttttgtctctggaattatgacctcataattatgatgtggttgcatcgaaaaagtaactgataataaaagcttcaaatgaaacacaatgaatgaaccttgtaagtcgtttactgtacgccacgtgtcactctcccattaagctgttccaaggaaatgttctagtggctgacaccgccattaatctggaatagtgtttttaaattgtttattataatcttaaactgagagagagagagagagaaatgaatgagagttttttttagttt

SEQ ID NO: 125348 - DNA, 2318 bp, Cannabis sativa
  modified_base (2186)..(2191): a, c, t, g, unknown or other
agtcaacaagctaattttcagtcataatatgagttactacaagcaaatcaacttatacaagaccaatttatctcagaaatttagacaaaataatttgagaccaccttcaagaggcatccgagataaccacccaattggaccaaaactacctacaaaataaataaatataggaatgtggattagcacactatacaacgataatattataaatttttaaattaaagataaaacacaattattattttgacgagagaacttatctttgaagtcttttttcactcagcatgtcactattatacagaaactaatttgttatgtacaactattagagcaaaatcttccaaggtagaaatatactagtcaattaaacatgtaccatacataaaatttaaagataacaaactcaattatctaacaaaaataataaaaataatgataaaataagagaaagaatatttttcaaaattattaaatataattaaaagtaagatttaaaacttatctatgaaaatttgtagtagcactctttgaggttgtattcgttaccaaacgagccaacaacatacgataaaatagccaaataatatggcacaaaatatccaaaaaaaatagtacaaactagccaaaaaatatagcacagactataaaaatataacacaaactaacaatgataataattatgaatttaatcaatattaatcaagcaatactaatacaagataattgactaaaaatataaaataaaattaaataatattaaacaaacataaataaatttaaaattctaccgtaaataaatctctctgtatttagaaagaaataatagttgttaactagaacttacaatttgatttcactaaggtaattggaaaatcaaccatagaacatcatgataaagctctctgcaaggcaatagagtctacaaaaataggggttatattgctataaattagagatgagcaacccgcaacaacttgacctttgcaatttttgagaactgccccaattcttatttttcccttcttaatgtcaataacaacatctacatttaatttaaacatacatagtggaggaaaaattcccaacatgggatgttactagcagaaagatttttaaacctacttgcagacgtctcatgattgatctccaatttactatcctacttcaaagcataatcatgcaaataagatcttacccaccactcaacattactattgttagacctattcttttgaacaatttttcattatgattgttctaaattgtctagacaataccaaactacaataacaactcctctttattcagattatcgaaatcttattaacaaatattctataatatcacaatttttgcttttataatagatttttgtaaaagatgtttctttctaaatgtatttagctctggaacactctaatagggcatgagtaacagtttcaacattattagagcgtaaagaacacataagactagggataacttttctcttaaaaagactcaaaactaaatgtaacaccctactgtttaggcgtgctacaatgcttttttaattactgtgcaacatttgctaatcaaaggatttaatgaaattcgtgatttaaataattttttttaattatataaattgtacaacatgtttacaaaaatttgggatccccttttatattttatagataaatacataataaattatgagcccatgttatcgggaagatcagaacactccaggtctaatcgctgagatatgtacaatcttcactaggctccagactcactaataatcagttcaagctaagtttttacctgcacatcataatataacaactgcaagtcaacagactcagtaagaaaagcacaaaacatatacataatcccgacttatatttaggtgctcatgcacctatttacaagacttcagatgataaaaacgttcttaacaatggtacgacctctgtaccacatgcactacgtaccactactatgttgggttttgtgccctaaataaaactcatttcaatacatcagatttactaattaatataaaatcagaaatcgcttttatgttgcatggttcatatgatttatttcatgattatgtttaatgtataaattctattaagcccagaacatatatatatttgttcatgattatagtatcgttagcacagtggaatataatcatnnnnnnatgttcaaaagtttaattctcatgatttgtcaatttactggatttagattgatatgataatcgctgataaggtatactttcaccttggataagtgttatgtcatttctagggtattggcaaagttta

SEQ ID NO: 125349 - DNA, 1768 bp, Cannabis sativa
aaattgtgatatgtaagatgaatgaactactcttcccatagccaattggttttgaaatagaacctcattcaggcaatgtagtttttgtcgcggataaaagccgtcagtattgacaatttttgctagcgtggaaataatcttatcatccacataaagcgtttcagctataagttattgccaacaatattttagaagaatttttgggccagcaaaagttatcaagttttattggcgcaaaatgaagcaaaaatgcaccaataaaaacccatatttttgtagtgcaatatgatatcaaggtagtgtcgagcattgttaaaaatataaaatattgttaatgcaaatgggttttggttaaatctttataatggtctttactctttaattaatggcattcatagaatccactcaaaattctttgaccaactttacctttcatataaatacatacagaattattatgatgaaacttcatttgcttacatattaattaactccaatttgtctatgcctcgaaagggcatcataagataacaattttctcttggaatgtggatgatgaggcagagcaggacgcttgaaaggcgccgagtgatcatgaccatgatcatgatcatgagggttagacctacacgggagaaaagtaaaccaagatgggtgcaaacaactccttggtttcatgaaaaataaagcacactcttctattgatctctgatcagataaaccagcgccatggatacaattattcttcacatcaagaaccccattacttatcaacctcctacaatggggtccaacgtaggtaaaataattatcagcaagagaaaagttgtttaacattcccaactcacaaatcacctcaggtactttaccatagagtaagtttccagcaaagttaagaacctcaatattctctaaacaccccaaagaacagggcaaagggcctgtcaaaaggttgttactcgcgtcgaaaagtatggcgtttcttaagaacccaatctcgtaggggacacaaccggtaagcaagttgtttaacaacaaaacttctgttaaactcgtggcttttcctatgcttctcgggatcggtccgatgaacttgttgttggccaagacgagaagggttgttggtgttgagccaatggattcggggattatttgaatgaagttgttgttgtttaaaaacagagcttctacactctgttgaaagatctgtggtgggacaactcctgtaaaggaattataacgtaagtctatgaaagttagacctgtcatggctaggagaacagttgggaaaggccccccaaagttgttgttgcttatgtctaactcgtagagatattgtaaggttgcgattttcggggaaattatgcctgagaatttgttggtgttggcatgaaaaagtgctaagtcagggatttggtctatgaagccatctagagttggtgctgccaagttgaagccgttgaaatcgatggaggagacggtggtggcggtgagattatcgggcgggttatcgcagtagaagccggtgtagctgcacacatcggatccaacccatgttttggttactccaaaggggtctgaagtgattgtgttcttgaatgtttgtatgattgggtacaccacggctagtctttggtcgaggaagcttagtattacttcgggtattatttctggtggtgcgcatgaacatgttgctggggcttgagcttgattattgttgtggcagattacttggttattttttggggaacatatgagaattagagag

SEQ ID NO: 125350 - DNA, 4077 bp, Cannabis sativa
tatttacccttttaaaaattgaaaaagccatataaaatattaaaaatagaatctgaatttaagatttattatttttctcgttttccacaaaatatatatgattctctctcttctatgatacattacgattctctctctctagtacaattctttctctgattccacattcgacaatttcaaaactccagcagtataaaatctaccaattctagtaacagcaggagcaatataagaagatcggcaccggaaaaaataaaagctctacttctggcagcaatacaaacataatctcgaagcaccgatcaagctccatacaaagattttaatcaacaattaaaaaaaaattctttctgatcatccctgccaataccggtgataacaatgtcaggtaaatatataaatatataaataaaaaaatgaaaaaaaaatacactatgcatttgaaaattgatcataataatataaatatatatataaattaaagatgaattttagacaaaaattatattattttgtattttttgataatgagacgtgaattaataaatattgattgagattatgaagtttcacaaactaaccacctattacactaaacaatgtaacattatgaaacttttaattttaaacatatacactcgtaataaaaaaagttattgaataatatgaatcaaaaatcggttactataatttatctattaaacataaacaaaaagaaaacttattaaaaactagtttcttacctatgtggtgaaataaaaatatataatttgcaaaataaacaaaaaaaaaaaaaaaactaattggtttcataataaatcataatttttaactatttattttcaatattttacaggaatagactcaataatgtgtgtggttcaatgtgaagggcaatgaaagaggagaaaaaatatgcagactagataatgagtgaactactaataccaacaaattgtatcctaaacagtttgctagaattattaaagaatgaaatcaaatgcaacactccaataaaaatgcattaccagttataaccagggtcaccacaaatgaaaataacaagtaacaactcactgttattctacttagaactcagaaagaaacagaatgcagttagtgagtctccactttacatcacaactatagatgagacaagattccaaatcattactcaacaaacatcagaaaatgaagctataacacaaaacacaaatgttcaaaaattggttttacaaataaccaaccagccatcatgcgacggtaggcaatacaataatgaaacttcaaaaataagcgaggtactggcattaccaaacatatttcaaatagctgatagtgtggttgattgtatcattgagaaaatacaagagaataagaggaaaatggaggaagaataaagagaaataataacaaatcataaagtcttcaaaattgaaaaatgacagatttacaaggacatgaaaatattgaaagtttgcattgtggtttttttttttgctatgatcaacaatctccaatttaaaaccaaaagatctgaaccaagagagtatgtggtcacttgtgtggttgaacactgtaattggtttctgagagcttcaaagttcaaaaaaacctcaacattcaaagtaagaaaatatgtccaagatcacaactgctcattggatattataatgggagaccacaggcaggcaaattatagcatgattgcagaaatgataaaaaagaaatttttgtcaatcaagagagatcatagaccaaatgatattatgatagacatgattgataattttgaagttttaatgggctatcaaaaagcatggagagcaagaaaaaaagctttggagttagcaagaggaaggcaagatgaatcttatcagcaactaccaaaatatctacacatgctaaaagtagcaaatcctaaaacaattgcacaattggaaacagataagaaagatcgtttcaaatatttatatcaagtatttttaaactcaatagaatattagaaacattgcaagtcagtcattgtaactgatggaacgttttaaaaacatcgtttggaggaactctattaactgcttctatcatggatgcaaacaacaacatattcattctagcatttgggataaaagactcagaaaatgactgctcttgggaatggttcttcacaaaactaagggaaacattcggagatagagaaggtacactattaaaaaaaactaatttcgtttgatctaattcaagctaaaattttaactttatatataaaacatataataattttcatgcattttgttacaattacagacaacaatgatagaaaataagtgttatctaataacaaataaaaaaataaaaattggtttttactaaataaaaataaatgatgatgcttcgaaaaataattatttatcatacacttacctactgatctcattaaaactggtttccatgagcaggattgacaatcatatcagacagacataaaagtattgaaaaatcggtgagcaatgtctacccaaactatttccaaggagcatgcatcttccacctgctaaacaacatcaaaataaactttggagtgcatggagatgatttgacaacaaacttcgtaaaagcagaaaagaagtacaagctgacctcatttgagcattacatgacagaattagatataattgacaaaagaataaggtcatacttggaaaaaattggacatgatgtttggaccaggagctattgccctacaagaaggtacactatgatgacttcaaacatatcagaatcaataaatttagcgatcctagctgcaagatcattacctattacaacaatgatcgagtgctttagaagccttatgcaaaaatgagtatggaaaaatggcagtgaagcacatgaaatatttactgaagtatcataaaaaattaaagcactacttagagaaaatttggtttaggcaatgagataccaggtaataaactaaaacataaaaaagatcaataattaaaaaacctgtttcttgataattttccaaaactagtttctaacacattatttatttttcaataaatcaacaggtcatagcaatcacaacaaacctataccaagtaaaagtctaagaaaaaggaaattttacaatcaacctactggacaaagcatgcaactgcagaaggttccaacaagatgagataccatgtgcacatgcaatagttgtatttgcaaaaaggggatggaggccttatgactatgttgccgactactacaaaactgcaacagtaaaggcaacatatgaaagaactgtacatgttctaccaaatgaaagagaatgggatatacctgagagtctggagcagacagtgttgccaccaaaatcaagaaaaccagcagggaggcctcgaaccaaaagaataagatcaaaatgagaaccaaaagttgtcataaaatgtacaaggtgtggaaaagttggacacaatcgtagaacgtacaataatccacaactttacaaatttttgaaacagaataaaaaaataaggagtcaaagaagaagcatcgattaaatttgagaactctagtactttttcaataagatacttacaatatcatttttacatttctgaactatgatctggttaaataaactttgctttaaagattttttcataatttcatttattttagtaattaaattcaattcagttagttttatgaagataaagatacatgaaaaacatgaaaaacatttaatcttacataataagaaaccaattattgataaaacaagaagaaaataaaattcaaaactaatttacctagaaatataaataaatacactgaccattgaatatatcatcacaaattgttatttttaggggtgagcataaaatctgaaaaactgaaaaaaaaaaccattcaaaccgacctaccaaacactgttggaatcgaaatcgacgaaaccgaaaaccgaaaaaaccgctaagggtttaaaccgccattgaacggttggtttttttttagtaataaaccgaccgaaaaaattgaaaccgacagttatacatatatatatttattaatttattaagt

SEQ ID NO: 125351 - DNA, 2087 bp, Cannabis sativa
caatcaatgtaaggttttcgtatgtgtgtttatttcatattattttatagaattcatatttaagattttaatcaacatacttgttagtaaatctagatcctagtaaaatatgcccaacatatatatcccacaaatcacccacaacgactaatatgggaaaaaacttagtagctacccgttaagtttttgaaaacgtataatcatccctattttcaaatatttttttcaatacacattttgaaaatagattgttttccaattagataaaatgttggaaactattttatcgaaagagcattgctattgggcactagtggtgcctaccaccatctagaggtgtcactctacgattgattaacgatactttttaaaagttattaaattaaaaagaattgctaaaagacactattggtgcctagcactctcttcggtgtcataccgctattggtctaattaagtatcgaatctcatttaatttaagaaaataacttttagaaaatatcgctatctaatcaggagcgacacctataagaagtgttggacaccattggtgaatagtaatattctaaatcaaattatatggggtttaattcttaattgcacttataaagatataacacctaaaaaagtactaggtacactaatattttttaacattaataaataaaacaaaaatgacatgtaaaaaaggataaggaataaataaaagaaagaaaaagaaaaatgacatgtatgctgtcatgaatagggtcactgtgcacatggttatgtatccgtctcttatgcaactctcccgtccagtacaaaatagaggacatcatatgcatttacttaggcatgtataactccattacatttttgttttctttcgtggtcattgaatatactttatcatctattggagaagtgacgatcattattgaaatgtgaaccaaaaaaattagttgaagttgtaaaacaaaataatggaatataataacctctattatttaagaataacttctatattatatatatacaatatatattagtttgaatgctgtgtttttataaatattattgtgtttttataaaaattattgattagattttttatttggtaaaataacaaattaaattatgtattttaaaaaatagtactaaatagtatttgagttgatttattatccaaataaaatttaataataatttgatataaaagtgttatgacgaaattggttacgatttttatatttgttcatattaaaaattatctttaagttggttataaaaaaattatcgaaaattgagagtttactattttagaaaatatagagtcttttttatcaattaacaaaatagagggtctaatcggtaacttttgtaaaatacaagatctaaaaacagtatttactctaaaaaaaattaagtctccatttgtgctagatataaataaaaataacatctattttataattagttatatattttctaagtcctatattaagaaaatttgatgctatataagaataattatatcttagtaaggtacataatttataaatttatgtatgtagaattaataattatattacaaattgttatacatatataaatattatatttacttaataataattttattatgatatagtattaaggattgtttattgttattattgttacatttaatattttttggtattttaattttttttagtgtacttctatttagttataatctataagctagaatgtattttttttttccaaattgcaatctattgtcggaaaattttagacaacaccaaataaaataaaattctaattatttaacaaaaaaaagcgagtactcaacctagaatggcgagtatgttagattttgtgtcctaaataaaactcatttcaatataatcagagttactaattaataaagatcagaaatcgtattttatggctcacatgatttatttcatgattatacttaatgtataaattttattaagttctagacatatataattaaaaaatatatttgttcatgattatagtgttgtcagcacactgaaatataatcatgattatatgttcaaaagtttaattcccat

SEQ ID NO: 125352 - DNA, 1841 bp, Cannabis sativa
  modified_base (475)..(476): a, c, t, g, unknown or other
caccaacgaccatattgatttcaccatccaagccataacaaggtgattttcttttctagaaaccctcccactataacgaggaatcgtggccttctaaacaggaacatttgtggtggatttctcgattgtatcaacttgcattggttcaactgagggagtgggattatcctctatagttggagttatttttgaaagcatttcctccaatactactttacgacttgaagttcttaatatagtcatcttcaaagaaattggcgtttgtagaaacgaacactttatcatccttgcgattataaaatagtccacccctagtctccttagaatttctaacaaacatgcaaacttcggtttgcttttctagttttccatctttctttcttaagacatgagcagggaacccccaaattctgtaatggcgtaaactaggtatacgaccattccataattttaaaggtgtcttagggactgattnngatggaacaacatttaaaatgttagttgacatctgaatagcatatctccagaaggacgtgggtagagttgtatagctaagcatggacctaaccatttccaaaagtgtgcgattttttctttctacaactccattttgctgtggagtcagttgggattcaattccaagttcaattaaatgatctttgaactgactatccatatattctccacccctatcagtacgcaagatccttaaagttttacccaattggttttgagcaaatgctagaaattcttaaaacttctcaaatatttcagatttcttatgcataaggtaaatataaccatatctagagtaattgtcattgaaagtgacaaagtactcaaccacctttagcttttacattcagtggtccacaaagatttaaatgcactaaccctagtggtactttggcacgctttccctttgtagagaaagaacatttttttcattttaccttctaagcaagattcactaactggtaattcacctaaggtgatatttttcagcggaccatctttggttagaatctttttctctactaacagatctcctgtcacgtttaagattttctgttcatgaatctgaagaggctttcaaaggttgtccctctcatcgatcaactcattgacctgtttggtctcattctcaaggtcgacctctagcttgtcaaccttaggcatgtcagcaagttgtttctccaagtcatcaaccttcttgatcaccttaaaacatttcttgtacacgtcggccaaagttgtctcctcttttggacttggtccttaaccttcttcagctcagaactttccaaagacgcctggaaagcaaacgccctagctcaggaataaagatatccgaacttgaggttcatctgaaaagaaaataacaagtcaaaaaaactagacagctgtaaccgaaaaaaaatattcacaagtaaatttaccctggacaggcgctccttgagcaagtctcttgtcaggaccgccaccgacatctcgtcagctacttgcacctactcgatcacatcgggcataacccgatcacagtagcagtcagtcatgtatcgagccttctttgcctcatgggttatagaaattgtagtcttatcccacgatttctcgacttaagacgaagaaacagaaagtggacggccagaagaagtgcttttcttcgagtggatcaatacagagagtagactattatcattatcaggaggccgaacctctataaattgttgtgtttcttattacttatattattattattatttatttagtaattgattgttagacatttatatgtataaactgaaacatatatgtttatgtataaaatgcggaattaa

SEQ ID NO: 125353 - DNA, 840 bp, Cannabis sativa
gactattgttaggcacacttttgataaagttccacccaagcgtaggatgctgacacggactaaacagactgttaggaagtcttcattaaatgacctggacattgctcgcctagccagtctgcctagggcagaacaggcccgtcctgctactgaagaggaggacactgccggggatagcaaaatcctagatgtggaggactagggcgaggtctgtcctgccactcctcctgatgctcaaggagatgaggaagagagagtagcctgggtgctaccatttggtggctacaatgataaaggagagccatgttgttgcagaatacatcgaggctattcctttgaggaggcaaagttcatcagcagattgatggatttccccaccatccgtggtgaccatgatgaagttgattaatctattcgattgtggtctctttggggatgtcgaattcttccttccctccccaagccaactagccactgaccctggagatggttattgtgcttggtcgggagctgacaccaaacagggtgcaatgctacctctcctcccatagtttaagaaaatagccaactacaaccacataagttcgaccaagttcacctccaagggccttaagtatttgttcgccctgatcatactctacgcctcacaaggatggggtgagctgtctccccttgataccaattgtcttttttatctaaagtcaagccccaagcagaataggtcagggtacttctatttctctcagatcgagaagtcatgtgtaaaccccaagttcttatctaacctatctttttcatatttagattgattttatcttgatttaagcttaaatataaaaa

SEQ ID NO: 125354 - DNA, 1952 bp, Cannabis sativa
taaataaataaataaataaacccccttcaattctgtcaaatttatttttgattataattatttagtaagataataatatttttatacaaaaaagaaaaaaaaaaaaagagaattttatagggggtttatggtgttaaaaaatagaattaaaaataaatgcattcgcatattaataaaaatatgcagtgatttagagactgtttgactgtgttttcagttttcaaaattgtgttttcaaaagtgagaatagaaaacaattttttgtcatttagaaatttaatggtgtttggcacaagttttttaaaactattttaaaatttttttattactaaaaaaaattcaatgttgtacaccataccatgacatgaacccatcttatcccggacccaactcaaacctagaccttagctcgaacccaaacccggaccgaaacactggaccggattaccgaccccgaacctagacacgaaccttagaccccggatctagacccggacccggacccgaacccatgaccctaaacctcagaccctaaccctggactcggactcgaacccgaacttggatccaaaactcgaggctaggtccgaggtccttggtcgggtccatattcggtaggggtgttcatcaaaccgctcacaccacacaaaccttccgcaccgcaccgcaccacatcacataaaaaatacagtttaaaatcttttacggttttaaatttaataattgcgattcaaaccgtagtgcactatatattacaaagttataatttttattatttgctttttattctttttttcatataagaacaaatatatgtatacattacattattttttaaaggcaacttaatataatgacttaatgattagtatatatattatgatgttaaaattttaataagatttttttttgtattgttaaaactttatagattgatttttaaaattttattataatgttcgataatgatgatagtgtaaattgctcaaactgcaccgcaccacactatattttcgcgatgtagttttttgtagttttaagatctcgtagtgcggttgcggtttgagagaaatttgatgaacacccctagtgtggtgtgagcggtttgatgaacacccctgcaccacccaaactgcgaacacccctagtgttcagggtttggggttcgggtcgggttctgaggtccgagattcgggtcgaggtctgagatttgggtctggggttcggggtctggttctggggtttgggtctaggtccagggtccgggctccgggtccaggtcatgtgagatctatgtccgggttcgaggttcggggtccgacatccaggtacaggtctaggtctagcgtctaagtctgggtccgggtctggggttgaggtccaggtacgggtccggtatttgagatccaggtccaggtttgggtcaagtccagactggggtctgggtcaaggtttgggatctgggtccatgttggggttggggtcgaggtccaagtctggggtcagggtctgggtcggggtctagggttggggttcgagtccaggttcaagtctggtttcgggtttaggctccgtgtatgtgagcataaatgtaaatataatatgttagacaaaaaaatttattttgaaaattaaaaataatattttaaagttttctatttctagttttttaaaactttttttcttttttaaaactaaaaataatttttaagttatgaaaccaaacacaacttatattttttatttttttgaaagaggaaacttccattaaaaagcacaaaactaaaaagatcaatacaaatgttaaggattagactattagagacaaggtggtaaaccatgccaccaaacacgagtaattagagtgtgagtgtgtttggaaagccacagtgtaattgaatttgtgtgtaattggaggtaattacacaatttggcatgtttgtctgaccatg

SEQ ID NO: 125355 - DNA, 1277 bp, Cannabis sativa
ttctaactttaaaaatgttactttgtttagaaaacacacatcagaatattacattttttattatatcacaattagtaaaaacaatcaaattttaaaaaaaaaaaaattacaaaaatcgggcaacatcgggcaaagcgcagcttagttccctagtttttaaataatatggagatgatataggtaagtttatatataggatgtaatgtaaatatgtgagataaaataaaataaaaatttggggttttttttttttttaacttttatattttaaaatagttctttttttcttttttgtatttttacgtacacatagaaatccacatagtaactaacggagcaacccacataagaatcaccggagtaactactatcgaaggaacccaaacgataaatttagaaaacaaaaaagttaaaaaataatacatgagtcatttccttaaaaaacaacaaaaatattaaaaaaaaaaataacacagcatacacttactattattacaaatataaactagctagaaacatatttatttgtttattaaaaaacaacaacaacaataattatattgtatgttttaaattaatgataattaaattactattaattaaatatatttattaataataaacatgtcttaaatcctaaatattaattattacataatattgatgaataaagagaataaaaaaagaatatctttgataaaattgaaagtagctagtgatgggagatgaaatgatactttaaagtgaataaaaaggttaaaaaattgaaggtaaagatgatttaaagtaaaattaagattgaagatggtgtaattgatggcagcaattatgatatggtgtgaaaatagaaaagtaggcatatgtaagatccctttccataaggataatgccaattgcaaaatcagtggtgcagaattttagatctagtcttgcagtattgaataatagaaaagatgaattaatgcatctacaactacccagtagtaatgaatcacgtgtgaggaactgaggattgtactatctgtctctcctcactattgttaatttataattattagtaataataaaaaaatagataattgataaaatgtaccattagtctttaatatttttttccgtcttaaattattattgttctaattaaatattaaattttatataatttaaaaataataaataatagcataagtacttaaagtgttgagtttgtaaacggcataaacctaataattttttttagtggcatacgtacccattatttataaaactgtattttt

SEQ ID NO: 125356 - DNA, 1388 bp, Cannabis sativa
caaaagcctatatatatgttacctttttcttaattagaccccccttttttacactaaaataaataaataaaaaaaaaacaatcataatatagtggtaattaattttgcatatagtcagaaagtaattgtgttaaagtttgtgatatttgcagggggttacaatatcgagctggctcccttgttcatgctattaattttgtctaaccataatgaattaattatgttttttaaggctaattgatcaaaattgggctcatattatttatatatatatttacataccctaaattaaattatagctagacaatataatataggataaatgtagtacaccccaagaatgtttcgacataactcttatctattttgatatataataaaaaaaaataaaaaattatcactttatacgttataattatttaaaattattacctgtaaatatttaaaaattttcgaattgtttaaaataccgaaaataaaatttacgtattttattgtacgtgcaactattttttttatacgcggtagtgattaaataattgtttaaatcttattttcagtactataaattatttaaaaaaatttaaaatttacaaataattttaaatagctaaaacatatgcgatcgaaaataaaattatactaaaaactatcctaactatcaaatcagataaaaacttctaccaaaataattctttaagaatttattacataaatttggaataatatttaacttattcattgtaaaaactatatagtaagaagaaagaaagaaataaaatgtggaggatagattagaattttggaaacattgggcgccaaaagaatcttatatatagtactaataagaaaaaaactgaaagaaagaaagaaagagagttgatagagacatagctagaaaaagagatggggcagcccgaagatcgaggggaagactagctagtaaagcttattcatttggttcatgatcaggatcagatcaaacggtcctgatcattccccactgccccaactgcccgctcccaccctttcttcccattcccatgcctaacatcttctgtcgttttcccccatctgcccctgccccccctgaccggacccatcaaactcttaactctctcccgctccggacggcacgcgcgcccgctcacctaccttcccaatactcttacactactactgttacactattactattagactagtactaccgtcaacttctccgttacaatttcttaatcaactttcacacttgaaaacatatgtcgaaatatttttattcattttttttttcacaggtgtgttcgttatgcttacaacatcttcactataaatttttaaaaattttcgaatagtttatagtatcgaaaatacgtttgaagtttttt

SEQ ID NO: 125357 - DNA, 1259 bp, Cannabis sativa
ggttgacctcgaggacaatttgaacgcgcacaaagaggaggtgatcatgatttttatggtcaaaatcaaagtagaaagcggaagcgggttttataaaaaaaggttttacataaaactgatctgaaccgtaatcccaagatctcaacataattataacatttacctcttgatgcctatcaagggatcctcaattttttttttttttttttatattttaacgatcatccaatccaatagcaatatgaactcgatgaagactttacaccatagctttctagatcaatgcttaacactcaagataagagtgggcttataagattaatacatgggatgcattttctaacacaatgtgtactcaactcataagatactgtgttatgagattgagagattaagcgaaccaatcactagagaaagagaggcatgagattggagaaagagagagagtgaaagtgggggcttgaactagggttgatagaattgtgtcactcaatttcttttttctcaactatatattatatcatatacaatgtgatgtatatataaatatattatacgtatatatcacatatatataaatataactaaaaatttataaagtaatccatttaacataaagatgtattattctttatttataatttaaaccataaaaatatctgtaactaaataatcatattcagttatacctttatttaattagtcctcctaattataaatattttatccaacaaaatatttaatttgataattaatagataaattatttatttatttttattaatcttatttaataaaataatcaaaacaaatacgatgagcttttatatgtcaccctacacgtgtgggccatagtcccacacctgtgaactatattttaaagcccaaaattattttatcagttttgtcttaaataactttactatttattttacaataaataagatgattaattctcattaatcttttattaattattttttgaaattctatattttaatattaccaatttattttttaattaaatacagaacattaaatatggtactaaaacagttattctataactacaaaatataattttgtaattgtagaataaaaaaccagcaaagaataaaagtgcagaaaaaataaaaatacacaatgttttcatatatggaatcaacaattcttgcagattgttagtattctacggagccacgtctagagataaaattcattagatagatctaaaaaatacaaagtaattgacttatgca

SEQ ID NO: 125358 - DNA, 1404 bp, Cannabis sativa
ctctctctctctctcttatttagtcaaaagcctataaaatcgaaccccaagtcctctcaaggaccaaccttaatgtttcagcaacacaaaacacaaggcgactagattttctatcgctcttgctaaaaagcaaaaacaaagtagaaaagaatagaataaattgtttttatttatttttattttttcaaaaaaaaaaaaaaaaaagaaaagaaaactagttgtttcagatctgtaatgcttcttctcctactcaatacaaacaaaggggcttggactaaagaagaagatgatcgacttattgcatacataacgactcatgatgagggttgttggcgctcactatctaaggtgtggcaagagttgtaggcttcgttggattaattaccttagacttgacctcaaacgtgaaaacttcacaaagaagaagaagagctcatcatcaatcttgtacgatttttgctttacaattgcacccttttcattacacagcttgtatgattttttcagacttgaaatcgtgccttagttgagaacaaaaatggaggagatggggaagtttttgtgcgactggaaacaaaggagaaagaggaagaagaagactgttttgttcagtccatatgtttgaaaaataaaagttttcattttctttttttgtttatttttccatactaagataaaaaaaatcttgtacgatttttttacaattatgcccttatctttacacaacttgtacgattttttcagacctaaaatcgtgctttggttgagaacaaaaatggaggagatggggaagttttggtgcgtttggaaacgaaggagaaagaggaagaatgggactgttttgttcaatccgtatttttgaaaaaaaatgttttcactttcttttttgtttatttttccatactaagataaaagtgtaagttttggatctaaaatgcccataaatattaagtttacataaaaaacccaaattattccaaaaataaatatttttaaactttattttatttataaacacatattttaaaaaatcaaaccaaaattattaaaaatccaataaataatttaaacaaactaagatgtgaagaaaaaatcaaacttatttatatttacaaactcatatcttaaaaatagaaaaaaaaaattgaaattcaatgaaaacttaaaattattgttttaaaaaatttagaaattaaactaagaaaatattatgtttacttaaacaaatctagatttctggagaaaaatataaactcaaacttgtttccgtaaaatttagtttttacaaaaattaaattttgaatatacttttttatgtctaaatggattttttaattaaaaaaataattttttaaattgcttaatcagttttaaaattttgatttcttttttaattttcttaat

SEQ ID NO: 125359 - DNA, 940 bp, Cannabis sativa
ggcatatatgccatgcactgtagtatatacagcaaattggtgaaggatttagtgttaccttggagaaaaaatttacaccatattgatgttatagtgtttccttggacttgctcttaaatgacaagattaaggatatatacatatataacattaaagaagtataatacaacaccaaaaaaaaaaaaataatattaaaaatagttatccaatcgtttgattcttcaagtacttcaagcacagtcaaagagagaaaaaattaaacttaaataattatcctgttatattacattggggttagaatattactctcttttgaaatctttatagctcaataccttatagatgctaatacttagtagcttaatcagaacattaacaaatactatagttatttcaaaaaaaaaaaaaaagaagttcagtaccttgggtgatctatatatattttctatatataattacaggaataaaacactaaagcttggaaataccaaccattgaatttccacttggaaatatatataacacatcgaactttaattaaacaaagcaaaatcaatcgaaataatcatatttgaacaaaattatatcaaataaattagaaagatcttacataactcaccattaaaattacctttgaaatgttaaaaaaaaaataattaccttatcttagcctttcttctttaactttagattgatttaaaggtttagtttgtccaccttatataaatatatatttatatatataataaagagctcatttagtttgtgccatattcaacatacaaagatggcagttcacaaatcaaggtttgtattgttgggatttcatgccctccataaaactcattttcaatataatctgaatttgttatcaataaaagattagaattatttatgtttacatgtagttttaatgtttatggtttaatgtatgcaattt

SEQ ID NO: 125360 - DNA, 1826 bp, Cannabis sativa
ctattctttcctatatataatactcctatcccattacaattacacatatgccctttttatttatcctaagacctatcaataatggccgctcgaaattcaccttgtcctcaaggtgaagaacatgaagcttcaactgccaaccttgctcgtcctctgtcacagaacccagccagcaatgcgtattgttgacattgtgagacaaaacgccaagtttcagcaactcgcctccacctgcccgatttcgtgttccccaaaccaattatcctgtcgacccctatcgaaaaaccagtctagtaaatgcgatttgcacaacaatttcttatcatgcccctgaatgttgaagatcgtgcttgttggagtaagtgggttgttgtgactaccttccaaatagaatacatcaagttgaactccactttgctccctcactaaacgaactaaaccttctgctattttgttgaagaagttttctgcaataggaaatgtctccctgccctttaaaatcttcataagccaagttaagcttatcccattgctaaaaataatattcagcagccttgatgaccctccaattgagaactacaaaagtataccatgtatatatgcaattatggctggttctacaagataattcttggggccaaaccagtaatacttgccataaatccccatcagtgtaggaagagcacccgagattgaactcaattgtgtaatttgtttgatttctacagtcattctcaataaaaaaaatagccccacatatcaccaatgagccatataaaaaatagaaaattgtctattctgttcaaaatacctggcagtatcaattgatacttctcaattttgctcttggtgatatttcccccattgtgaaggagccatgcaataagcagtaacgaatcatctttagtattaacaaccttcaaagaaataaactccaaaagtctcttaggagtaattagaaactcaagttcgcaattttgcaaaaagaaatctggtcttgaaccatctcttgaatttagagcattagatgactcccacaaacattgcatcagctcttttctaaaaaatagcaagtatgaaagaggaataataccatgttcttctttgaaagtgatagtttccctctgtcaaaaatccagcgagaaaatggcttccccaactcttcgtcaattaattccggccaagtacgtgccccttcctccaccgtcacggcgatccccacacttcgctcagtcgctggtggttgtgaatcacaatcgacaagtctcagctcccaaagaagcttcttgcgattaggagaagaagaagaaattgtggaaaccatttctggatcccacttcttttgcaacctgtgacctaaattggccattgggcttttagtattgggcctaaaacttgggctgcctctgagcagttgagggaagtattgagcccaaatccttcaatagagaccaggtccttcgtattgtgactaaaatcgcagtcatacagatttggtggtttctttaacctctccagcaccggtcggcagcacaactcccatgagcttgacgtcgacagtcgaccacgctgctcctccaccgttaagcggtgtcatgtctcacccatccaactaagaacctccgaccaacataaatcgggtaagacaaagaaggtaccgatgttaggatcctctagttgagcgcctatcatctcctttagctccggtgaattggggttcgacttcgacaacgtatctcgacgagccatcttgtggtgtttagctgaaagcgtttgcaaggcgcttctcaaatttgaaaccgtcgttgctacgcccttaccagatt

SEQ ID NO: 125361 - DNA, 1059 bp, Cannabis sativa
aggtcgagtcagggcctgactcggtgtgagactcctgccctgctatgcttgggttcgggattctgcccccaccatgcaacactttctttcgggttggaatcgagccgccccagttaagttgttaaggaaaaaaaatacccaaaatcaaaaatcaaaatctctaattcttatcgatttcaaaaacaattggtgaccaaattctctcgattggcattccatttaggttaggctccaacaacatccttttcttctaaggatcaagcatgacttccccaaattaacctgcaggttccctttctgccgagtctggatttctctctttttgctaaaccaaccattgttggtcaatagtattgattttggtctgtttttcaaccccttttaatactttattccaatggttttgtcaccatgtttttctgttccagaccatttgtctttatgtgagacaataatgggatggttgggcttcaagtgctcaaacgtatcattatattatatatttatttttattataaagtttcaaattttaatttattttgtgaatgttaaattgtaaatattataaactatatgtgaaaaacaataatattataaattattattatttaattaaaaaaataataattgaattttgtatgatattgtctaatattacacaataaaaacattacaaacttaaatatatatttttttgtaagaataaaaaaataaaattaaatacattcaaaacttttatagtaatacgtatcaaacatagtcaacattcgaaaatcgaaatgtattagttgaatacttgtggggtgaatatatatatcgtaactttataatatttttttttgtcatagtaattaatctttatcgtgatttattatttttctttttgtaaggttattcccatgatttattatttataagtcatgttagacaaaaaaaaggagtgaccccaaaattttgaaaaaaaatcaaattaaattaatttttaaaaattactttcaatgtatatatatatattttttaaatttccttttcacattatttttatatttttttaataaa

SEQ ID NO: 125362 - DNA, 1174 bp, Cannabis sativa
aagtataaatattaatttttaaactattaaaacatattacattttgattatataataatgaagcagaaatttaagttttcacctacttaactaaaaataaatataatttttttattatattaaaaatatatttaaaatctaagttaaacttaaattttctaataatacttatttgtgatgggtaatatcattaaaaatgcacctatatgtattatataacatattctttataatctgccgatgtcacatttatcacttttgtttatgataaattacgtaataataactagttatattcttaagtatggactaggatgctttagtaggtatatataaccacctaagttttcttataaatcaaaatcttgtttttttatataatataaattataattaaataaatatatatatcccatattgaaattgtaatcgtcagtttaatatatattttatataatatttctttttagtggattatgtactacttttcctttttgcttttctttttataaataaattaatgtattttttttgttaaattatttttattcctttcttgctcctgtctatataatagtgccttgttatacaattcccctatgcgttgtacaagataatactagaaagtgcatttttctttcttttttaatttatatgaactaatacgttaattaattacttgtggttagtacaatttggattatttgcatcctatatatagaccaaataatatatatttatttatttctataccataatatttaaatttcccatgccctcttcacaaaaaaataaaaataaaaaataagattgtgccccatttatcaaaaattggtaattgaaagtgtctaaataagatttaaaattatataaatatataaatagtaatttttttaaatgtattattttttaaaaataataataatagttgaggtatagaattataaagcctatattttgataaacagaataaaaatatttaaatagtttatttaagtttgtttttttacttgtttaatattttaggatagttaatatgttataattaaaatatatattgtaagaaagggtagatttatttttgagtaagagagatataactatacatacaattttttcaacctaaaaactagagtttaattaaggggaattaccttatatattatttttttaa

SEQ ID NO: 125363 - DNA, 782 bp, Cannabis sativa
attagctttgctcatcaccacctaaagaatagcatcttgccattgccattagttattatatttcatataaattatactattaaattatataaaatttaatacttaattatatttatataaatataagattgtgaaaaatgttcgagcttttcagcatttcttatgatacttattaagctacgaataaagatcttcagttaaaaaatagtatatcataatgtattaaactaatctaaatataacacattaatttatttgagaggattttaagaaaaaagaatattatctacatgatgaatagtatcaaaaaaaagtagttaactgaattagctcaattgtcttggtttaatacgtgacactaatttttttacaagtaatcttaattcaacaagctactaggtgaaaaactacaagcagattgacaaagaattagggttggcagtctctcccaaaaaaataaattaaaaatatataaaatgtattttagtctgttaattacaatatatatttaattaaaatcaccaactaataacaaatatttacttcacttcaattattaaactagtttatatatatttataaatatatatatatctactagtaaaaaattacgtgcgaggcacgtatactaaattttatgttaggtataatctactttatttaaaagtgatacaattaataattagaaaaaagtattattaattattaagtgattattattatgtaaatctaaataatgtaatttataatgttgacaattaaaagtaaatactgaatgcaat

SEQ ID NO: 125364 - DNA, 1686 bp, Cannabis sativa
ttcgacggtcccaaaaaaaaaaaaaatcgtttttaggaccgtcgcgaattctaatatttatagtagtgtaatcacatcaaacaaaattaacaattaataattgaaagtttaaagattagggataatttttattggaataataatagtaattaaaattaattaaaataatagaaaaaataataaaaaacataaaacaattgtacagagccaccttatttttgtggtttttttcttaaaccaaaccacatatacgttttttttagtttatcaaaccgctctgcaaaatcttcaaactacaaaaattacactacaaaaatataatgttgtgtagtgtgatttaagcaatttatactatcatcattatcaaatattataataaaatttaaaaatcagtataataaatttttaacaatacaaaaaaaaaattattaaaatttaatgtcatattatatatatttattatcaagtcattatataaaaagtactctaaaaaattatgtaatatacacatatattacatatatttgttcatataaaaaaaaacaaaatgaaaaaattgtaaaaattgataactttgtaataaatagtgcggtgcagtttaaattgtaattattaaatttaaaatcacaaaccgcaccataccgtacggtttgacaaaattataaatcataaccacactgcaaaggattttaaattgtattttttttttgcagtgcgtgcggtgtgtgcgactagatgaaaatccctatcacctaccctatcaacacaatatatagatatagttatagatagtagttaaatgagcattgctattccgcaccttaaatgcctaacaccgtactgatgtggcgtgttttgaatggttggtagttttctgtattatttattaattaaaaatatgtaagattcaatattaaattccaccaataacattatgtcacattttgtggtatttggcaccttaaagtgttacttagtatttttttaattaaataagaaaaaaagaagataagccatattagagcaattatagagagccatctcacctacccttacaacacaatctatatatctatataaaactaaatctaagagttgtgatgaggcattttacatttttttctaatcaatttttctaattttgtgagtggttatcttttgctcaaagattaaatatatatcactctcaattcttcaatatacaaaagttcattgaaaaactatttataggtgcttaatataaattaagcttttatttttttcatattgatttgtcctaatattaatttttaatctatgggtaattgattactatcttatccaattagttatattttatttagttttccttatatatttatttgaatttgtatagtgagttgttttcaaaaattaattttaaatttaaattttttaacaatttaatagtaattatttttaataattataaataagttatttcattattgtttttatttttaattattaattaacgtataagtttttgtaattattatttttatattaaatatattataaattaattttagaaaattaatttttattatttatataaataaaaatttatatgtactttaagggaaaaaataataatatttttctaaagttttagtggttcaaaagttaaatatttatatttttttttttgtaatttatttgtaaata

SEQ ID NO: 125365 - DNA, 823 bp, Cannabis sativa
  modified_base (28)..(35): a, c, t, g, unknown or other
tgtgtttttatttatcgttttagaagtnnnnnnnnaggttgttaaatcaacatacttatgagtagatctaaggtcctggtaaaattaattccaacacatacaacaatagaatcaacatggcataaaaaaatcatcaagctttgaaacctaaaaattcaaagcacaaaacccaaaaattcaaggtgttttctccataaattaaacatcaaattccacgccaaaacctcccaaaacaacaaagatgcatcaagcataaacacaaaagtataaccataccaaaatcatcgcaattcaccttattttcacaaacatgcaatcaccacacctaagaacaccataaacaccattataaagcttaaatccataaattcaaacaagcaaaagagattcaagatagctacctatgttcttcaagctccaagcaagataacacacaagatcaacactagatttcaagcctttttcccaagcttgtgtttgaaattataagatagagagagatatagagaaagagaaagagagtttggacggtttgggggtttcaaacccagaaaaaatgcttctctttttggctaaaaatttagtattaatgaaaatagaattatttggccaaaataccattttgccactaaagcacacacataagcataaacacatataagggcaaatttgtcatttccactcatatatatatatacatcacataattcatactttctcatttaacacatataagccataactaaatcctaaaaatatattttggaccccaaacccggttcggcctaaaatacctaagtgtgactataccgtgtcaacttgt

SEQ ID NO: 125366 - DNA, 1029 bp, Cannabis sativa
  modified_base (965)..(967): a, c, t, g, unknown or other
aaaaaaaaaaaggtggcatcgggccaccatcgaacacccatcggaccaccatcactatggatggaaatagtgagtatggatggtgaggttagaagagaagagactggagaagggtattatgagtattaatataaagtgtgcatatttttttaattttggtaagcttttgttcaaaaatttaatatcaaccaattgtatgcatataaattcaaattttccaataatttaataaaatatagcgacataattgttgtctctagtacaagtttcttattaggcttcggcacataattaagcattgttatgggataccaaaatacttatagagccgaccctatgccgatcgggccttaggcaaaaataaaaaatggggcctaagtggaaaagtgaagttgtcgaggtttgagcggtggggggcctaaggcagctgcctccttcgtctcacctcaggaccgaccctggatacttatgatcagttttttataatctttattaaattagtaaaataagtgggatctgatattgaattgtacgaataacgatgttacacatcacaagagtactagacaccataagtatttttttaatatttctctaaataattttatacgacggtataattatattaaatatggtacaaatttttaagaaattttgaagttgcgaatgtatcagccacgaacacagcatgttttccgattttcaacatatgcatatgtataatctcaattttgttgtagtgaatattcaacacttgatgataatcgtcgagacatgtacattattagggcatgcagcgagtcgcgcaagggtgtagttctaagcattctcttccatatgtacactcctcacgtccaagaacaatttattcaactcgtcacaacatcttgaaacaaaattaattaacattttgatttatcagtaattaaattacatttaaggtgcgtttggaagtaactgtgtannnactaggtagggtaattactagggtagtaattacacattgcagtaattacactatattttaaa

SEQ ID NO: 125367 - DNA, 1473 bp, Cannabis sativa
agacttacttcaacaatgttgctaaacgattcatttccaacccaatatggaaactttttgcccgggtaatgaagaatcttgagctccttcaacgttgtgttaggtgtaagcatttcaagcacactctttccatgctttggatcaattgatctatttaaataactccattccaaactcaatttctcaagtttcttcttatccaatacattgattagatttgatggtgttgcaacattgaccacattttctaacttcttaatggaaacttctccatgtagacttgaaagttgggccaactcttttatttcagcaccactatcctttcccacgacgaacattgtcaatgtttggagatttgtcaatttacttatttggcttggcatctctactaggttagcttcactgataataagatgtctcaaattaatgaggtgatgcatatttttaggcaaagtttcaagttgacgacaatattctaactttaaagtctgtaaattgtataacatagttagagataccggcaacttcacaatctcagtgccagaaagatctaaaaagcgaagatgtttaagctcaccgattgaatttggcaactcaatcaaacatgaataacaaaaagacaaaactctcaaacattttagcttcagtaacaaattctgcactagttccttagaaatactaattttaggataccgtgaacctaaagttaaaaatgttcgcaggcgtgtagcttcaaaactgttagacatcttgtgatctagatacaagagttttgtgacacatccaaagtggcgtgttttcttctccaacttaacaatgtcttcgttgtgctctaataaacaagagtatttcccagaaacaattctagccaaatcaacaataagatcatgcatgacaaaataagatttacctgccaaggtcttggtttttgtaaaaaatgacatagatactaaatcatcaaaatactcagcgcccacttcttccattgttttattcccctcggaatgcttcacaagattttcagccatccatagtaagaccaactcttgtctttgaaattcatagccttttgggaatattgaacaataagcgaaacatcctttcaagtgtggtagaagatagaagaagctcaattctaaagcagctggaagaatcttgctcctttcacgtgtcagctcccaaatattgttctttgctatttgttcccatctgttagcatccaacgttgatctcaagagtcctcctagaactttagcagctaaaggtaaaccattacatttcttagcaatttctctacctatgctttccaatttcgggttctcaataaactttctagaattcccactggaagagtgcttgacaaatagtgcccaacagtcatcttctgataattctctaagacggtgtgtaccaacagttcgaatgctatccgcaactttttcatttcttgttgttactattattttgctgcct

SEQ ID NO: 125368 - DNA, 3273 bp, Cannabis sativa
tgtctcagccacttggccattttcctaaataaaaaaaaaagggttaaaaaccaagcctacattgtagaagacttggataaatcttcttgttccacctcaacctcttcctcctcgccaagttcttctctcctggtcttctcgcataaggtaagcatagtatcagctccttcacccgaaagctgaagtccatgtcagggttagccaaccaggcctgataaatggtccttctgacaatgctattaaccctgtctttggtttcagcttccgcctctttgagctttttgtcatgatcgccatggagggacttgattgcatcctcaagttccttgattgtcttctggtcaacctgatcttgcctttcagcctcctcctttgcacgagacacctcggccatagagtcattccattttttggccagggtgtccctgtgctccctgctctagcgaagctcaacctcatgcatttcagaccgctgagacgacctatgatgggtagcaaaggaaagaagaaatgcctgcgagaaggaagcatattaaaagaagtaaagataataaaatgaggaaaagtgagaacaaggagaaaaggaaactaacttgatgcatgagttcataacccttttttgccagatccttagagctgcctcgcgtgagaagctcccagtcggtagacctaagactctggaagtgacgccaaccattggaagcgtgcaatgagcagagctgcgagccttcagtcccgaccatgagggtttgaggagaaccatctctagacgagggccaaagaacttcacttggtgcattgacccagtgggttgttcattgacactcatcgcagttgggacctccttctatggagatttggttggctcgatggtgagttggcctgatgatttcttcttattggtcgtggttttggtccttttgggtttcttggcagaacccaaggcatcaccaacttgggtagctcttttcttagacttcttgtcgactgtgggaggactcttgaacatgttctccaaaccgatcaggtcggagcaacgaataaaacaggttgaatgtaccgatcaggtctgattggggaatcaagaacaaaaatttcactcagacatggaattttcaacccagttgttcaaaacttcgaattggagtttaattttcactaaacccttaatggataagtgaaaatggatattgtaaggttaaaaatgaagcgcacttaaaatcagacgtcatggtagttaagcacattcaagatttctaaacttcaaacctagaatttctatgggtatcctagaacagttctagaacaggcaagattcatggccagaaacccaaaaattaagcatgcatttcattgaaaatgtataaaagaaggaaataaagaacttactcactagtttgaagcttcttgttttgctcggatgatgttgtcgagagtgttcctgagaatccttcaaataatttaagagaaaaattcgcttaagaattttttgctctggttttttaggaatgaaaatggctaaaaggatcattggaggttttcgatcctatttataagcagttcaaaaagggaaataatcatttcaaaaatttaaactcctcgaattccccccccccccaaagtatacattatgtactcattacaagcagagtaaccgttagcacgcgcagacatcgagctatgatttgaggtaggactgtcagttagcattaaatgagccaaaattgaagagacccctagtcagggtcacatctgttcctcattcgacgcctaggacacagatcacccatccggacaagactctgaactgagtgaagtcctcgtgcgaccaggaaggtcccgcgcaaacttgggggggtaaatattatccagttttttgcacattgacgtggcaatagatcaaataacacgtgtcctatatttctgatacctgagcagaggaaaatgtccttagcagcctgcacctgactggtcaacatctttaatagtcggttatccaagcatgattatggagaagacatctgattaggtagaagcgtgtttgagttgagcgacttacaagagacaacaactttagagaataatctcgttgtgtctagaaacgaagacaattcctataatcgtgggattgagtcagaaaaaaatggcaacctattatagtttcctatttaatatattgtaattatagaattattgtgatttcctattttgtgcatcgcaagcaaaagagaaaccattcctcatatattaagcccatataaacagtgacctaacttcactatgaaagggattgaaagaattaccccagagagatattctagagagaaaagagtgatctaaaagagaaacacactcagatatcagttgtaagagcttttaagaagaagaacactttgttccttctcttaagtcaatacaatacaaggggagtaggctattactacacttatggggccaaacctctttaaaatttggtgttcattttactttattgtttttgttctctttcacttacattacttaatcgctttattatttgactcactgtcgttggctaaaagagaggtcaacatatacatattttaagtttgatttatgatttatcagttggagaaaaagataggtaggactatattaggttgagaaagaggagagagtgagagagataactttggtcatgccagtcgtgtagttgaagtttttaagtttttatacatacatgttttaattttttaagttttttcatttgtcatatatgatttgtgtttaatttaaaattggtattgttttgtgttagaatctcatagtatatttttttttgaaaaaaaaaatctaaaagtagtattaattatttgtactaaattattatagttaatatcataataaattataaaattttcttcgaatcactacaactagcaaatgagagtcaaatcaccacgtccatgttcccaaaagaaaatttatttttcattaatttggtgtataatttaaataaaagaaattataaaaaaggtgtttcacgtccaacacactttgactagagtggggttcctagtatgagtcttaatatcatgtccatcaattttagactagaaatattgactagaaaaataccttttttatgtccctggatattatgtccaacacaaaatggactgaaaatacttatttagtccaattttagtggacttaaaatggagtttttgtagtagtcagctaaacgtggagagagagagagagagagagagagagagagagagagagcacctt

SEQ ID NO: 125369 - DNA, 905 bp, Cannabis sativa
  modified_base (651)..(652): a, c, t, g, unknown or other
aaacgtaatcgttaaatttaacagaatattcttttatttttaagtatattctgttaaaccaagaaatgttgttagatagacacttttaatatataaagatatggacgcttcgttaaataattgaatatatattgcaaatactttaatgtctcctaatgtttttgaagattaccaaatattatctattaacaattataaagcctaatgtaaaatttattatttattaagtgttttgactagaaatgtacacattaatatttatgtaatgttttgactagaaatatacaaattaaggagaattatttcatatatactattttttttttttaaatttacagtttgagttactctagtgatttttttgtgggttgttatatgaatgttggttacgatttaggttcctctgttatgaatggttatgttaatttttgtaaaaatgcaggaaaaaaattgctttaaaatgtaaaaacgaaaaatcctttaattttattatataaaacaataaagaaaaaatataaatacttcatataatttaatattatgactataaatacactgataaaatgaagtaaatagcataattatataatgcaccccctaaaaaggattataccgatacatctctttctgttttagtatccgaaataattnnttagtcaaattttttctcatggttatgtaaattgtagttatttaagacatcctgcaaaattttaagaaattcagaaaagtttaacacgccgaaaattgtgctcaagcagtatgttgcacgcatgactattttattttatacgcatataaaattgaatatttgaatatttttttttctacattgtaaattattttgaatttctcaaaattttgtaagatatctaacttatacaaatatgaaaaaaaaaattaaa

SEQ ID NO: 125370 - DNA, 867 bp, Cannabis sativa
  modified_base (573)..(575): a, c, t, g, unknown or other
tgaaggaaagagttgtgtgcaattggatacactattgctccaattagagagatgtgatgtagcagatgacatgtacaagcttggtcttatcgcttttattgagggtgtattggtttcaaacgaaggcaatatccaagttttgccagggatgtttgaatttgttaaggaccttgatttcttcttcaagtatccgtggggtgagcgtgctttttggaacatgatgtggtctatgagtaaggacatgatatgttacaagcagaacgttgataagaaaaagagaaagcaggtttctcaggaggaaagtatatcgtacatagctatgtacctaccatacaatattgggcatatgaagccatagtgaaagtgagaaagaagtatgttgattgtagtgacaccaggttccctcgggtgataaatttgaaaaccaaggagggctagcaaaaataagacttgaaggcaattgacatcgcacaactattctattataccgaaaattcggttggcacttcggaggatgacacgtgtcaaccttggagaatacgaatcaacgaatataatggcaattatattaannnatattaaaatgaaataactcattaaatgcagagttagtagaagtatatctataactcgctgattgtatagtcttaagcgagacaaggatgtacgaactattggttcacgcattggcgagaaaccatttcacatcgggagacacaatcataaggatgacatcagtaatataaagcgaggcaccaaactcgctacgtataaaaagctggacgaatataagtgacagatagggaggcatccatctcgctataggaaggcatactcatggtaccttcactaatcagctccagatat

SEQ ID NO: 125371 - DNA, 915 bp, Cannabis sativa
cagcttcagttcctgatgggtctggtgttgacccacttgcagcgtcacagggtcctcctgttcccccgtcagcttccattcccagcacctccacattgcatattttttgtacatctaagaaaagaaaggatagttctatgtgatttcatatatgtaaaaataattaaaattaaaaattaattaaagaattaatactattttcaatttaaattatttttaaatatgtaaattgttggagtgttaattacttagagctttggaagaaaaagagaatgaaagagactgtattaaataataataatttaaatgaactctttaaataaaacattttggagataaagtgggtcccacaacaccgaatttagcacgttgcatattaggcatggcgtggtcccacctgccctgaaaatatcgtttttggataactatgaacagaaagttctcgacgatgacaggtggaaccaatggaaaacctccacgtcacatgctcatcaacttgagggaatcatgttagttgcacctgaataaatccttttctttttccctggctaaaaggaaaaaaataaataaatattttggtatatatttatttgttttggtatttaaaggattttttttaagtttttataaaaatattagattttgggtaaaagtttataattttactataacacggaattttttataaaaatactaattttttataaaacaaccgtaaaataacaaaacagtacgattaaaacaacagtggaacaactaaaaaataatcgtggaataacattaaaatttaacacagtacacagtataaaacttacacatgattttcaaaaaaaatataatatttttgaaaaaaattctaccccacaataaaaaagaaaaaaagttaaaaaattcagtatgtagtgtaaaaatctc

SEQ ID NO: 125372 - DNA, 601 bp, Cannabis sativa
  modified_base (541)..(554): a, c, t, g, unknown or other
tacatttcactgtatgggtaattaaatgcacatttggtacctagtttgtgttttgttaaaatataatgtgtttttatctaaatacaaacttggtactttctaatcaaatttgattaaaacctttttataaatatgaccaaattgcacatgattcatgtgggttttgacttaatttaagtcagcttacttgtattaataaaatttatttattaaatttagattttagggtactaaacatgtattcaaaataccaagcattattaaaaataaattagtagcacttgttgtgtcgttgtatggatgcctttgctgacattttttcttgcttgggtcaaaggatttgaatcccaccgtagcccctttttgaagggattatgcttgactttttgaaaggctagtttgttttagcggtgtcatgggatggaaaccatgagattatcgtttaaaaaatggcgactaattaaaatttttgctccttgaactttgacatgtactaaattatgcccgtgaaaggtagttaaaaatgccccatgaactattnnnnnnnnnnnnnntaaggacttttgtttaattttagtaaaaaaatctaacatggatgaaa

SEQ ID NO: 125373 - DNA, 1035 bp, Cannabis sativa
tttcattgttttagagaatttatatttaggatgttaattcgacatacttgtttgtaaatctagatcctgataaaatatttcgaacacttggaactagaaagtggcacaagtcactcggtcattcctgacgactcccatgaaattcaaaattatttctattacattgagccactgcttggccttcatgacattcgaacctcccaaaaagactggaggtgtctgcttgtgaaacctctcatacagaggctccatacggttgccaacaataagttgttctgatggcactgctggaatgaaagaagtcggtacttgcagtggaggcactggaggaggaccctgctttctcagcctctaaatttcttcgtcttgctggaggatttgagcttacatttctacaaacctttgctcccaatctggaggagcttagggttgattttcatgtccaccaccctgaagccttccacggcctttaccgcatccacggggattcagaggattttgacctccccgaccgcctttcgtctcgaccatgttgccacgacttctcatgtttcgctgggcattcatatgatatgccttagcctgcgaacccataaatcaggtaagtcagacagtgatcacatatgctctatgtaccgcactttatagattttaaggcaatgcatttaaataaataatcataaagtattatgcttcctaacatgattttctaatcagataaattactaaacaagtaaaggcttattgaaccgtgagtcgagcttatctctgacggtgattgtacatgtctagacgatcttcggtagaaaacctggcattctaataccattatcaaagcgttgacctagccaaaagcttggtcgacaaggacgtcagaccccaaaaggggggtgattatgacagtcagagcctcgtgatccaaaggggaaagaccgggagctatacaatcccacatcgcctgagaaagttcatgtgtgatgattctaagactatgtaggtatgggactacacagttgaagagggcttaaatggatt

SEQ ID NO: 125374 - DNA, 1588 bp, Cannabis sativa
  modified_base (223)..(242): a, c, t, g, unknown or other
tctgtgggtgtaagggcccaatggaggcttgaagcggggacattaaaactgtatataataaagattatatatgagaaggatcgatatgaatgatgtgtttattaacttgtcgtttattataaagacctaattcatatcataacgatgatcaatagtagatcggcttaaatcatgagttatcatgaactcatatattcatgttagtttctttgattcactcgtnnnnnnnnnnnnnnnnnnnngattcttacaacttttattttggaaaatctaataatatggatgactgagaacatgatctacaattatggaatcctaacttttctaacggatcgaatgttggttccctttatgtgttaattctggtactgaaaagttgcacgcaaattcagatgggatcttgaattatacttctactagtgaattgatggaactaaaggataaagaaataattagaagagtaaaatagtattttgaccaaaactaattacgaaccaacacatggagagctaattactggaattgattataccaatgcacactgcatttaaactcagtaaatatgactcaataattattaagagtgcaattctatatctattgtagagtaatcatataattaacaaacacgggactatttacttaatgagactcaataaataatctagtttattgaaacttagaattataggtccatggtccccgaatcgccacgataaagagttgtataaagatgttcagaaaattttattttaagttggaaaaatagtaattatttattttttaaaattagtcaaatagagaaaaatacaaaatttgttaagacaaaatttgtcaagacaagatttgtcaagacaaagttgtgaagacaaaagacaaagttggatagttttttattgtgaatgtatgagaagtgataaattgttaattatatggtataattgggtgtagaatttattgttattattttatagaaaataatgtaagccaatatggagcataggaattctttatgtaatttatttattttttgaaattaaattttacttaaaaattatttgttgtaatgttcatagcaggggcgaattcatatagtggcgaggaggggcagtcgactcctgagaaaaaaattgaaaaaaaaatgtatatatattttagttagttacagcatatatttataaataaaagtgatatttgtaaacataatacaagctttgatataatagtaaagctattttatgatatagtagaggtcatgtattctaatctcaataaaactataaaagtaagtttactttagtatctaaattttacttttttaacttttactaataagacttgtatttagtgtcttaactattaaacccaacatttttattgttacttcttttttttactttatactatatttaatactaaaatacaaatttgcattaattttttatatgttatacaatgtgggcccatttggtacgcaggattggacgggcctgtttggtacgcagcactggattggattagacaagctaatttgtccaatccagtgtttgggcatgttagaagtctggataactaatccagctaacct

SEQ ID NO: 125375 - DNA, 2596 bp, Cannabis sativa
atttttaagttccactctataacattctcaagccaataactggtcgcccctaactgttcccactccagagtgcgtaggaaattttaaggacaagtgttttatcgagcttactaccccagtccaattaaagccagacaacccatcaacacattatgtatggaagggatgttaacaaccaaaaactcttgcatttgtgtcgcagacaatggtagtatccccgtagttaagggaagctcgattatgcctcaactcgccaccgtcgcttctgaagccacacaaatttaccatacaaggtcttaattttgcctattctaatcccatcttcttaaatgattccttgtgaaggatattgacagagcttccattatccaccaatgctctcttcactcttctattggcgagttaaattgttatcatgataggattggcatgtgggtaccacacatgtttcaaatcttcctcaaagaagacgataggaggttcatttgactttactttcttcgaaggttttaaagcgatttcacttcattaatgtatctcttttgtgcatttttactatttcctgcgaggtgtggccctccagaaataacaaagatgtcctcaccctgtacgaggggagattgcaatctcgagttattgaggttattgggctgattaggctcatttccttgtgttctcacgcatttcctaaagtatccctaagagattagactttcaatttcatccttcaattgacgacattatttggtggtatgcccaatatctttgtggaaatagcagtacttagttgaatcctgatgattgctcatgtgcctcattagtaattggtctgcgaaatgtgaccctgttttcattggtgaggtagatgttctcgtgagtttcattcaatttagtatatattgagtaaatgggtacatacttctcatattcttttgtttttcattcttggatatatcctttgattcatcctttctcttggtatttgatacgactggattttccacctttgttgtcacggtgttcgctattatagtactagttctgggtttgtctcccacgatagtctttaacaacttcattttattccgtgcttcttctttatgcacaaaaatttgtgttcttacatttaactcattgatattcctcacaggacgaccttgcaaatcatcccataattcacccctacagtagataaatcagttgtaattccaatttaaagggctgttagctgaatgttatcattccagtttctaacttttgcagcagctgtactgaagcaactcaagtacgcttaagagactcccctggtttttgcttgatgttagtcaaggatgatgcctctagtagacaattctcgcagcctaaaattgctttttgaaatccctcaaaaattgttcccaggatattatggaatggctggtaaatttgtcaaaccaattgctcgcagctcttgtcaaggaagttagagacaatatgcaacgcaaattgtttgaaatattggttgctcgcattatggtattaaaattgtttaaatgggcgactggattagtggtcccatcatattgcgagacatgtggaatggctcagtttcttcgtctgagttgtatcctaacagttttccatattctccatcttgatatttcctaaatttttcttcttattgtgttactcacaactgaatggtatacactggctgttggtttacattttgattcagttggttacacaaatcaggtgtattttgattcaaatgctcgcggaggtctggctgccttcaatttaatctatcacgaaaatcaggttcatgaggtctttgctcataattactcacagatgtagtccccgagtaaatttcagtccggtaattacgtgagttacttatactttctcgatcagtaaaataatgtcgagacttgctcctatctcgcgtttgtttatttgtttcaattgacctactatgcccataggatcgtgattctcctgtacttgaactagcttaatgcatttcatttcgtgttggtcttctttgaaagagatgagatacacatctcctactcaagtaagtgtgcatgttctctctatctatgcgagaaggcctttgtggatgtcttggggggcgaccaccaaatctaggttggtttccaagatttcttccatcattacaaggaatttcctagttttatggccgtggttgcctcgcctctgtattcaggcgagatgtctcaggtatatcagtctattcattcctttagttcgtgaatccatgagaagttcctgaagcatcatgtcgatgttcctaatttcttgtattacttgggttgggttaattttctctatctattaggatatcccttacatttttaggttgttcttcctgagcatttatgggattcccctggttattttcttgcctcctggtcttagagcctcgaggtcttcctcgtggtctccttacagttgggtcaggttggttttgaggaactgttctctgtgcagccctgctgtaacgtccccgcttcaagcttccattgagtccttacactcacggaatgaatggctcttatacacgagtgcgtcactctggctgcttcatgga

SEQ ID NO: 125376 - DNA, 581 bp, Cannabis sativa
catagcattagaagccaaaggaggctaggcaatcaaaatttatatatttacaattttcttttagaaatgtctatataagatgttctccactaattctttaatttccaaaagttgtgtcagtgtaaatatatattaataaaattaaattaaattctaagaagtatcccattaaattttaaaaattggcctaaaaggacaagccaaaatacaagctaaaatagccgtttatgtgcggaaagagtcacttgtgattgagacatacaaaattggtgaataaaaaaaaagtagtcattattttgaaagggatgttaaaaaatctctcattgataatgtctagaaaataaatatggtacataagatgcataaactactccttttattgtcaattaactttgaaataaatctctatgcatcttacaattctcacacatatatattcaatttgaataaggtatcgctttctctcaataattaggagttcaataagttaatcacaatcaaaaaaacaattctattactttggtgtagtggtaaaatttttaagggggtttttcataaatattagattttaaggtatgttt

SEQ ID NO: 125377 - DNA, 1385 bp, Cannabis sativa
caaatttaaactaagcggtctttatattttagctctttgcttccaataggtttcttttttaagcagaagtatatccaaatgggattgcatagttttaattctttgaacagtgttggcatcccaattaggtctgctcttaacttgatcaagttccttttccagggtactaatttgttgtttgaaatggaaacctaacttgtggttccaattattgagattgttgccacaagtagattgcgtagccaccgcgttggtaagggcactagaattattcccatgatttgtccaaaacgaaaccagagttttggaccaattaggattggtgagccagacattttcaaagagaaaccttttggaacttcgatgagaggattgagaagattttccttgagagtcaaaaagaagagcccgatgatcagagccaaaaaaacccttgtggtggaggcaagcctccgggaaaatagtcatcaaaggggcattggctatgcaccaatccaaacgctcttggatgtttctctcattagcactgtgattttctcatcaacgtatcacttggagggtcgatcttttcgctccgctatgctagggaagattgctatttttgtgggttagttggaaaacttaacatccttcttcatccacgtgtcaaacctaacatcacactttaagatcaagctttattgtgggctgggcgtttgaatatgggtatgacccaaaaggcatggattgggcgtggcccgtagcccatgtgagggcttaccggttccttgtttctgacttataagtgggctttgtaagtacttcgatcgttggaccttttcgttgagcttaaagcaatttttggccactacacgtatcaagtatatttggaaaagcaaaaataaaactcatcaactttttgaaaaatgattatatcaatctattggtaaagtccaataacaaaaatcatgggttgaattttcaaacgatgataagtgaagtagctcattttcttataaatattttattacatttgatttatatgggcatcatctcatagtggttctaggcaccttagtgcttcatgctcctcctaaaatggtagttattttctgctcaccaatcttgaatcaccgtatcataagtggtcatttactagcttatttttgcatgggtctcaagtgactctttgcactatgcagatcttgtgtaatgtatttttctttcttttctatttagatagatgttgatcaaatactcacaagaaattttatttgttgatgagtaaagtagcttatattttttagatgacatatgtgggaaaattaagactaaatgtgcagaatcaaaataacaaaactttaaacaatcaaacaattagcaatgacaagattaacaatcaagaa

SEQ ID NO: 125378 - DNA, 1844 bp, Cannabis sativa
  modified_base (176)..(185): a, c, t, g, unknown or other
cctcaagttcaagtccctttgagtaaaaagatacttcaagctcttatgatctgagtataactcaaactttacaccatacaaataacatctctagattttcaagacaaagattactgtgataagttctaggtcatgcgtagggtagttcttctcatgtggtttcaattgtcgagaannnnnnnnnnccaccttgccattttgcatgaggatacctcctaagccaacacctaaagcatcacacactaccagaataaagcacttttgccggcggagtcaaaacacttcgccggaaaaagataccaaaattattccatcaaattcaccttatgacggtaagttaatgcgccagtaaaagtagcttttactagcaaattattcttatcttgccggcaaaaggtggtcaaccaaacgctaaaatgtgagaacttttggctgttcaatttcacttttgctggcgaaggaaagtgtgccggcaaaagtgaattaatttttggcggtttaatttcacttttgctggtgagtaaatgcgctagcaaaagtagtgaaaattttggcggttcatttcccgctcagtgaaaatgtgtgcgaaaaagtaagtaaaaattaggtgaaaacttttatcggcgcactatattgcaccggcaaaagttttcacaattaataaaacgatgcgcttcattttaaggtttatttgtaatacttttgacggcacaattaagtgcgctgacaaaagtttttgtcagatttaacttttgccagcggatcaaaatgcaccgacaaaagttgaggcagaatataattgaaccccgaacctcctccccattttttctctttctctttctctttcttctttgttctctctacgattcaccatcgcccaccaccctaaatcaccaccgcccaccactattttcaccaccctcaccaccatttttaccatcataatcaccacaccatcatctctctctctctcatccatttcatctttttttttttgcaaaataaaaaaaaaaattgatccaccgcatctctggcgaccgctgcctgagctttcgattttagtgttacatttttaatatttattttaattttaatttgtgtatataaatttgggttttattaattttatttatttagatttgggttaaattttatgtatagtgatttgtgtttatttttgtgtatagttagaatttatatgtatatttatttgtgtatatatgaatgtttgtgtatttttgtgcatatatgtctatgtatatatatatatatatatgtatgtaaaaatgtatagaattatgtatgtatgtatgtatatatatatatgtgtatgtatgtatgtatgatatatgtatatacgcctgtgtagatatatatatatatatatataaatgtatgtatttatatgtgtgtatatatatgtgtgttttgggggaatttatcatttttgtctggcctgatgcagtttcgatgtaagcccgatataggatccaatggtaggttaatattgggttgaaggttgaagaagatagcccgatagatccgatatagggtccactagtgggtctgatggttcttataattttaagttttattgttgcccgatagatccgatatagggcccgataagtctgatatcatgtcaacattctgatgatatattcacacttaaaaaataacaacttataatacaattatcgatatcatgtcgatattatgtcaatataatcacaattaaaaaataacatgtgatataattgtcgacatcatgtcgatataatcacatttaaaaaataacaaaaaaccatagaattgttgacaaaatatcgacaacccatcgacat

SEQ ID NO: 125379 - DNA, 940 bp, Cannabis sativa
gtcgtcaagtcaaactttctaactcgcaagattaagtctttgtaggaaaacaattcatctaagggtgcattctctactaaatccgcctcattttcttcatcatctccttcacatccaggagtaggaaactttaagtcttcattcctcgagattagcatctggaacagcctatgggtgaatgaaactcccctaagaagatacagtggacttgcttcctcttattttgatgcgatctagaacatcttgttcctatagctcatgcaccatgcaatttatcttgccagtagatcacgagccgtctctatctaccctcgctgggactttgtcttccaaaagagatgttgggataaagctatcacttttttgggattcatccatgaaagccccatctccagattcgtagaattggctgtccgagaaatcactcatctgaaagatagaagatcttttcagcgtggtgtgagtgcgatttaaaagattagtgtcgtcaccagaataacagattttaaattcaacaaaaacaacaaaactaacatctgagcctcaacaagtggttgggtgtatctcagtgtcttaagaattatatggaaatatgaacattaagtcgttgagaaacaccccaccacttcaaaactcgattagttctaaattgcgactcaataaaaaatgatagaaaaaccaactccaaaatagaaaggagtggtttggtgtatcatagtgacctaagaattacaagaagaaataagcattaaatctctgtgatacacctaaccaatgccaatcttaaatttggagacaattgagcctaagtatgcgagtatgcaaagaagctctaatgaaaaaagttcgagcattgaaagtttgtcatgaaatatgcaagaatttaagttacatgaaataattttccagattttttttttttattttgccttaattcact

SEQ ID NO: 125380 - DNA, 2912 bp, Cannabis sativa
aattttactttttttaaaaaatatgtttccttattgatgttagtaatgtttgtattagatatattacaagtcaacataaaattgatcagattaatataaatatataaaatgtgactatgtagaagaatttttaatttaacggtatttattaaaaattattatgttaattttatcgaaatatactatttaactaaatacttttttattaaatttgtaatattattatatgtatttaaaaaataaaatatatttttaactttgaattaaaataagagacagtatagctaaaaataattttaaaactcaaaatctcaaactccattttaaaaattaaatatatacgtattatacttaagatcacttaattaaattaaattaaaaataaaactaatcataggatcatgtaacatcaatttagtataactatatacaaattttacttataacattcataaattttagtgtatactattttatagatatagatataatgataagaaaagaagtttttactggtttttttctttatgtaattttgttttttttattagtttcttactttctataatgtaaaaaattaaagattaatttacgatataaatatttaagtttaactcctaattataaataaatatttaagtttaattaagttatttaatggttcgtacctacaaaattctaaaaatataacttagtattattattgtcaaaaattaaatttatatttttttacgttttaagaaatttttttacatttttacggtttttaataaatcaacacgaaagcaacaaaaaaattacataaaagtaacatgaaaataacatcgaaacaacaacaaaaaaataacatacaaataacaaaaaaaaaacaacaacaaattaataaaagtacaacataagaagaccgtatcttctgtaaataaaatcaaaaaaatcataaaaatatttaaaattccgtaaaaccgtatttttataatttttgtgtatttgtgaaataattcaaaaaaaaaatacaaagaacaagagtataaatataaaaatatttacaaattaaattataaatgtaaaaaaataaaattaaaaaaaaacataaatattaaaatttcaagataggcttaggccactcctagtcttatgctgggtccgccattgcacaaaaatattatttatttatttttatttttaacaaaacattataaagtgcaactagacagagtatattataatctttcaaaaaaaaaaaaaaaagacatattatttctcttctattaagtgattttagatgcatagcataactaatccaaattccaacatggaagtagtttttattaattggtagagttattttgttgttcaaacacagttgggcatggctagtgcagtgcagactgtgtgtggacaagcatatggagctaagcagtactcagcaatggggatcatatgccagagagcattaatcttgcatttgggggctgcgcttctcctcacattcctgtattggttctcaggcccaatacttattggaatgggccagtccaagagcatagccgaacagggccaggtcttcgcacgaggccttatccctcaaatctatgccttcgccttaagttgtccaatgcagaggttccttcaggcccagaacatcgtaaacccactggcttttatgtctgctgcggttttcattctccacgtggttctcacgtgggtcgcggtttatgtcttgaactatgggcttttgggtgctgctcttaccctcagcctctcttggtggcttcttgccattgtaaatgggctttacattctgttcagcccaagttgtaaggaaacttggactggattctcttccaaagcctttaagggaatctggccttatttcaagttgactgtttcttctgctgtcatgttatggtagttaattgtttgttaatatcatttaaagaaaaaaaaccttttttttgagcaaaaggatctctcatttttttaattgatgagatatccatgttatgtttggttaatgcagcttagagatatggtacagccaaggactagttcttatatcaggacttcttaccaacccaacaatctcactagactctatttccatttggtatgtccatttttagctatctacactttttgttcatttgaatgtgtaacaagcaatgttgctgacaagttttatttttctgataatgacttcagcatgaattacttgaactgggatatgcaatttatgctgggcctaagtgcggctgctaggtctgtgattttgatcatcttttggtgttaaaatatgacttgggttgggaattaatactgtttttcctgtattggtaattgcagtgtccgagtcagcaatgaattgggtgcaggacatcccagagtagcaaagttctcagtatttgtagtgagtggtacaagcatccttataagtatagtcttcagtgcaattgtgttgacattcaaagttggattaagcaagctatttacaaccgattctgaggttattgaggcagtttctgaattgaccccattgcttgccatctctgttttcttaaatggcatccaacccatactctcaggtaacctatgataagctacactctattgtctctctctctcacacacacacacatacacacacatatatatatatatatatatattaatcaggattgtttaaagtctttttgttaacaatttgggataatatatatagctgttttgaatattaggtgtggccattggaagtggatggcaaggtgtagtggcttatgttaaccttactacatactacattattggtctcccaattgggtgtgttcttggattcaaaactagtcttggagtagcagtaagttggaatctctctctctctctctctctctctctctctctagatcggaagagcg

SEQ ID NO: 125381 - DNA, 688 bp, Cannabis sativa
aaatttgctattaattcaatatataaataagatttgtcccccctcccaaactatgactcttgaagagattttcctctaaacttttctctgttataaaaatttcccttgaggcttgaactataaaaatcgttggaattacatccttgcggttgcattctactcgtttatttaaataatttgttgcttccaagattgacgactgaccctgtaaaccaacacgagtattttcagcgtgctttgtcctcactcgcacgcttcctataaaaactttcctgaaggtcacctatcccaagattgcatttcgtcccgaaatttcaatcttgccatcccaaaatttgaaattcgagcattgtagtactcatcaagaagaacattgtgaggctttatgccacaatggatgatcttagtggtaagtaaaatagtcattcaccaatcccaacagcaatttgagtccttaggatccaaatttttttaagacagtcaaacagatagcttgctaaagcgccattactcatgaactcaagcacaaacagcatgtcattattctcatcacaaaatccgatcagccaacaagattatattcttttgatgagtttggtgtataacaatcacttcaactcagaattctttatctgatcacaatgtgaaatgattctactatacctcccactaccacaccactacaact

SEQ ID NO: 125382 - DNA, 1096 bp, Cannabis sativa
  modified_base (57)..(59): a, c, t, g, unknown or other
  modified_base (1044)..(1050): a, c, t, g, unknown or other
ataaaccaagaattcggttatatagacacactttatattcttatatatatatatatnnntatatatatatataaaatggtataataatagagacttggtaaggtaataagattgagtaatatatggtgtctagtaattcatttattagcaaaacttaatctacaacatgattattcttatttattctcctaaatgtgattgaacaatgtaatgttggccaaattagtgagggtgtttggtattgatcaataagaattattccttttcaaataaaagtttgagtgagatggtggggtttgaatattggaatatttattgttacatactaccactttgtctttgtgtatataaatggaatacaaggaaggaaggatccaatgtacccaaaatattggagttgtagtaggctagtaagattcttataacgacaagtaatctattactcaaataatattatatttgtaacatgagggaatattattattattatgtatttttttattcatttttataataataataatcataataatggtggaaggaaaagaggtgtgattttggagcaatgttttattagattagtgtgattagtggataggaatgggatattctagggataagtctctacgtgtacggcaagcaaataaattcattacattgcaaaatgcacctcacttctcctcctcaaacttcaacaatttattaattatattttattttgtcgaatagttaattttgacctcgttgttagtaatttagaccaaaatgatttcattcaacatttttttttttttgtatagaatgtgtttagaagtaattgtttaattattatacatcaaaagataatgtgtaattattagaatggtaaatataaaatttagtaattacactgtttgaatataaagaaataatacaaatttttatatttaatttagtaaaatagttaataattacacgtaaaaataatattttttaattattaatgtttaaaataaaaaaaaaaaatataataattacacaatataggtggcgtttggtaacacnnnnnnnatcagttttctgtttttaaaagtgaaaaagtgaaaatatttttcaa

SEQ ID NO: 125383 - DNA, 994 bp, Cannabis sativa
ttgatgataggagatcgagaagtggccatgtcatgttcttaggctgcaatctcatatcacgatcagccaagaagcaacaagttgttgcaagatcaagcactgagagtggatttcgagcgctagcaaatgctgctgctgtaattcgatggcttacatatctgctaagtgaattacaggttcctattgttaaaattcctatcctctgggttgacaactaatctgcaacatctttagcagccaatcatatgttccatgcttgttgcaacacacatagaaattaatctccatttcgttcgagatcaaatattagctcatcagcttgcagttcaatatgttccttcgctggaccaggttgcagatgttttaaccaaatcattaataacagagacagatttaactatctgaagagcaaacttcaaatgacttcttcaccatttcgtttgaggggggatattacacatatagttaaatcagttagttagttaattgtattggttagttagttttactggtctctgttaatttcttgcaacttgtactgtacttcaaaatccttataaataacagatcaagccaactgttgtgttgagcttttttggcaattcttattctttcttttctttttggtttctatctctggttttgtaccttcttgttttgcctttgctctagtctcacaatggtgtgtccaattgtgaagcaaatatatcacataataaagtaatttaaatttagatcacaatatagcacggtacaaaatttacattacaataaatactatatttttatatatattatgttatttttaatgttttattattaaattttaatcaatatgctcttttgcattgaataacttgcattattattattaaattttatatttatatttttttattatttttacagttcaaactatttttttttttgtaattttacgaaattttacatagaaatctctattgcaactagcgctgcaacctaaattgtaaca

SEQ ID NO: 125384 - DNA, 1350 bp, Cannabis sativa
  modified_base (1308)..(1317): a, c, t, g, unknown or other
aaaatatttatattaatttcatataattatgtatataattaattaataaaagggaaaatggagggaaaaagtgaggtatcccaaattcccaatggtgacactcaaacccatttttgtgccattttcatgaaaagggataaaatttgaaacattttgggcagtgtgggtcagggacatcagatattgagaatgaagaaatgtggagaaggagaaaggccgaacactgcacctgcacctccacctgcacctgcagctattgctaaaggaatggaaaagaagtaaattataaaagagtatgacaaaaatgcccaaagttttgttcttcccaatacagaaatctcagcaaatattgaatatgaataatagtgttaaatagacgttaagagagtttggggacattaatgtcctcttctttgacagagaccagaccctctctctctttatctcaaaaagatcatttcatgaaagagagtttactatagtgagagaattgtgagttgaggagtaacttggggttttggagcctattgcgcaccagtggcgctaacactttttataagtgtagtcttataattggttagtgatattcgctacaaattattttattaagttatataaaattccctatttaatggtaatactaaagagggtagtaatgttctttagtaattctctacaaattaaagcgtcaaacactacaacttattaatatattttaattctttaaaagaaaaaaagaatattaatatattttaatttaataaataatatagaaaactgtgttaactatttacaatgcattatatgttgggcacagtatgaatgctgggggttaaatgggatcctcactttttgagcctctctgatgtgaatgtgaagagagtgtatttattaagagggtatggggggacctgaacttgtgtctgtcaccacttgtaatctgatgtactgaaaagaataacagaagaagaagaagaaggaaataatgaaaaggggtatgccctactactgcaatacttacttgtactatagtactattagtattactaaccccttttccttggttgtcgtttggtgcaagtgccgaggctcaaaatcatatattaataaccccacaacttttactatttcccctttctaacttttctcttttagcttcatctaactactgttaaatattcgtagtttagtcaacgttgactaaactactgttaaatatttccagttgattttatttactcattaatttttttagggtgcgttcggaaagtcacattgtaattggatttgtgtgtaattggaggtaannnnnnnnnntgacatgtttgtctgaccatataattacactat

SEQ ID NO: 125385 - DNA, 3793 bp, Cannabis sativa
  modified_base (95)..(99): a, c, t, g, unknown or other
atgcaaggtttctcgaactttatacgtgtttatttcatcattttagaaagttcatatttagggtgttaatacacatacttgtgagtagatctaannnnntggtaaaataatatccaacaagctctccatcaaagttaactctgctccattcctagagaggcatccccataagataaggcttatcatatatctttaaatatgagttaatctcagcccaataaaagtgggatactcacagctgtgtggattataaataaaaaacgcatttacttagcataatttgtaatcaaatcccatgatttgagcgaataattgctgtaaagattactataaacttttgtaatttacagcccactatgtaattataaatagtggcagaaaagatgaaaaaggggacgaaaaaactcatacaggggagtacctgaaaaacaatcaaaaatctgaataagattgactcgtagattatgtagaagtttaactacaaaaccacgtaaaaaactcggtgttcatacttttattttagtatcttttattttttctgtctggagttactattgtgaggctcaaattttagttaacgaaaatctgcgttaacaatgtatatgtaaacatatatatcatatataatatatataaatatatacactatacatatatatatatatacaaatagtgtgtttattataatagtactatacttattattttatttacttaatattttttttggtaaatagatttttagtgtccctttgcttagtgtttggcaaaaatgacacctccttatattggcaggttaatatgcttatattatatgttatataatagtaaaaaacagtgtttatttgaaaatacacatgttagtagagtttgaatatcttatatattcatccatagtgaagtaagttttgtgaaaactatattgcggtcggatgggtgacaaaaattaacatgtaaactgtagtgatattatgtttgtgatttttgtgtaggtgttaaaaatttaggaatgatcaattgtaaagtgttatgctgtcaaattttcggtagcataacatttttaatttgataataggttacattttaaaataattagaacatcactaatatcatagatatcataataagttaaatttaaaaaattagttaatactttaattataacaaaaatattagtaatatgttaaatttaaaaattaattagaacatcactaattaaatttaatttaaatattggtaatttaattataacaaaattcatttaaataagttggtaattttaaaatattacaaagttaattgttgatattaaataattagaaacattattaagttaaaaattgataaattaaaaagttcacaatttctttgaaaaaattcatttaaataagttaattggtaacttttataatgttaataattaatttgatttttttaaataatttgaaactttaaaatgttaaacaaattgttaatttaaacaaattagaaaattgaaaagataattaaagatgttacaaaaaaaaactatgtttatcagtaataggttaaatttaagttttgataaattaaaaattcataatttaattgaaaaaaattgaattaagaatacaattcaactttaacaaagtggaaactttgaaattaaaaaatatgtgttaaatttattcaaatataaattaaaagttaaatgtgatgaaattattcatgaaaattaattgcaaaatattaaattaacaataaaagtttataagtggtacataaaatagcataagatattttaatatagcataaaatgaaattcttatctagatttattttttttaattataaacgaaagatagaattgaacaatttttttttttttttgtattatcacctagtgataatttatttcacatgcacattttttcttagacccttttggagaggctgagtcaataaagactctgaaatacgcttctccaaattatctaggacttttttatgttcacatagatagtttgggcttgttgtattcctatagtgtgatctattgctcatttaattgtttctttgttaaagattgcggtacatcatctcctgcatgttcttgtaagttggcatacttgttaatagtttgcttacttatgagaattgtggggaggtcctgccaaaattttgagaaaaagaagcaatcttaagagaatagattgcactatatgtatattacaaacatgaatgagatatgttctccacccttttagaaatggagtgagaaggtggagtaggacactttttcaactttaatttaaatttcctatttttatattgtgtagaaatatagtgagcgacaaaagctggatgactttaaacagataatctgtagagtttcgtaggggtgtggatgagtttgttggagttgctcgaatgcaaataaatactgctggtgttacacgatacctttgcatgagatgtctgaatgtgaacatcgagactcctgataaaattagggtacatctgtttatgcatcgcatccaacaattgtacacaacctggtattttcatggggagtcgttcacgcaaccagctgtagaactattagacaacgataaagaagaaatggcagatgtcatggctgatattttaaaagaagatcctagttttgacgatccacgttctaccactgcttccttcaacgagccacctatgaatggtggtagtaagtatgacgatttttttaaggatatggaaactgaattgtacctgggttgcaaaaaatcagcactcaatactttggtgaacctgatgcaatgcaaagttctctataagtggagttaccattcttttgatatgttactcgccatattcattgagttatttcaaaagggtacaaaattacccaagtcccattacgagtcgtagatgaagttgcgtaaccttggtttaggttatgaaacaattgatgtatgcaagtatcattgtgccttattttggaaagagaatgaaaaaaaatgtgtttgtcctatttgtggcgagagtcgttggaaaaagagaaaaggagacgaaaaaaagttgctagaaaagttttgcaatactttcctttaattccgagattgagaaggttatatagttcaagacactcggcagaggacatgcgatgacactcctctaagagacccaaagaggatggtgtgcttaggcacagtgcagatgcagaagagtggaagcagtttgacagacgccatccatcctttgcacttgaacctagaaatgtgagattgggattggccactgacgcgttcaatctgtttcgtaacatgagtaactcttacagtatgtggcctgttattttagtcccgtataacttaccccctgggaaatgcatgaaacttgagtcgtttatgttgtctcttttggtttcatggtgcaatgcccttggaaaagacatggatgttttcatgagaccattgattgatgaattgagagagttatgggattcaggtgtccaagctcgagatgcttacaacgggactgtgtttacaatgcgagctactattttgtggaccattaatgacttctcggcgtatgcaatgatgtctggttggagcaccaaaagggtacaaggtgtgtcgcacctgtaatgaacacactcagtccattggattacgcagcaagattggttatgtaacgcgctaaaaaaaattaggcacgccacccaagttatttacgaaaccctaatcccctacatgggattactaatcaaaaatagcgcaaaatttaaacttttgtaataaacggaatgaaaataaaa

SEQ ID NO: 125386 - DNA, 612 bp, Cannabis sativa
ttttttttgaaaaaaaaaaacagcctaattttaaaattttgcacaaggtctctaaaatacttggaccggccctggtcttactaaagaaatgtacctaattaaatatcaaattttaccaaaattaatataataatttttataaaatatcattaattatttttaaaacgcaaatttatagatgtattaggcaccactatagtacctaaaagcctttaatactctcttttcttttccttttttttgaaaaaaaagaacttttagtaatttaccataagaacatctcttcatatttaattagcacaaaaacaaggactatatgaaagacacaaagactagccaaatcatggccacatgtttaaaatgaaacctggtatatttgtttctttatatttgatggttttttttttaattattataattattattacatgggcatcttccaatttatgtgttcggatccacatgcatatcacgtacaattcattactgaaatttcgattttttttcattatgggatgaatatttttttaaaaaatttgtataagttttatactgtatactgtgttaaagttttatggtagtttcatagttattttttagttgttccgttgt

SEQ ID NO: 125387 - DNA, 1382 bp, Cannabis sativa
gtccgatggtgtttagtttcttttggggtccgattttcatgtgggtctgatgggtaccaatcggacccatcggacccgatgcccttttttttttaatggctgggtcaaagtcgcctgtgggtgtggggtttcgggttcggtcagaggagttggggtcggactgggttgctccgtgggggtttcgggtggtggtgggatgtgggtgtggtgctttcgtggtcggcagagaggaagagagaggcttgagtttagggatttcaaatgtgagggggatttttgagaaattaacaatgtggtcatatatgaccaattttaataactatacatttaaggaaataattttaaggtattgtaagtataaaaattcaaatttcccttttataaaagtacacacgtgacgctcttatgggttagggcgttacaacatggtatcagagcaactaaggtttaaagatcctaaaaactgattagatatgtacatcgactgtgaagactcgttcgactcatggtatagtaatcattacttatttaaaatggttaattgaatatgttatttgtttatatgatatacatgtgattttagaaaattatgtaatgatattgcctatatgtaagcttggaatgcttattatcattagtgttggttcgggaagtctgatcggtgttaagcctatgatcgcaagtatattaagttatgcctctgaggcgatccgaaagacttcagcgtgagctggatgggctcggtgctgatgacgatgggagaaattccccaccctttccaaattgggagtagatgtatgctgccatgcaagagacgatatgattgcaaggaaaacacattagagagctgagggagcagcaagctcgacttgatcttgttcctaatcctttgacacctttgattgtgccaccggagatgggaaatcggttgaaacctttgtatgaaagattcaaaaagcagaattcgcctgtgtttgagggtggccccgatccactgaaggcagaacattggatgagtatgatgacatccatcttcaactttatgtgagtcgagggtaatgactgggttggtcgcctaatattcatgttgcgggaggatgcttgcatttggtgggagatcgtgtcccaaggtcatgatctgaatacattaacttgggatacgttctgaaccctgatttatgaaaagtactacaacgaatctatccaactgctaaggcaaaagagttcatacaattggtgcaaggtagtatgtcggtgactgagtataccaccaagttcgaccgattggctaagtttacttttgatgaagttgtcactgaggctactcgaaaggccaagtttatccgagaggtttggaagaacatattgttgggttttatgcc

SEQ ID NO: 125388 - DNA, 927 bp, Cannabis sativa
attagattataatagatgtagtcataagttacaccaataataataataatagtaataataataatattgctcatttccttctctatttttctacatactattaccaaagacattctagttattaattagcaggattttactgagtcaattaatgctcaaattagtaggccaagtcaagaataatactcctcatcatacacaagtcttatttttttaatggtaaatttatacacaaacttcacatttaaatttatgttgcaagtcatttttaataggggaatttttaaaaataattattttctacgttttatttaaaattttacggttcaaaatttttaattataaaaatattcttgtaaagttttaaaattataaaaatacactttgttcagcaaaaagtaaaagaaaaaataactaaagaacaacatgaaaccaaccacacgacaactataaatcaactataaaacaatcaaaaaataaatctcatgacaactataacacaattataaataaactataaaatacctaaaagaacagtttttttattttcactgaagatgtatttttataaataaaaaaattcaaaaagtaaaaataaaagattttccatgttgatatatttttataaatttttttaaatttttggtctagtatgtaattttttttttaattaagtgtttttttttttttaaagataaatggaaatttcattaataagtgtacataatccattacatgcacatattacttatcaagcataaatcaacaaaatagacaaattaaatcatttacaagaaggaaaaaaaaccctaacaacaatctaacaaaataaccaataagccgccagctgtgaagtatcaaaatgaaattccgtgttttaatattcccagtttgattatttaattaagtgattaattaaatgcggaa

SEQ ID NO: 125389 - DNA, 1062 bp, Cannabis sativa
  modified_base (71)..(76): a, c, t, g, unknown or other
aacacatttttattttttaaaaacaaaattttaaaaacacaaattttacttttgttttttgtttttaaaannnnnnaacaaaagtgttaccaaacgccccttaaactatgcgagaaatccagctacaccaatttaggatgtaagataattttaatacatgcttcatgattgtactcttttatccttttcggaggacaaaaataatttgaggaactttcttcggattgtcttattaattgaattattgaattgatggcagacatctctagtggattgacatcttttcgttgctaatgtgttggctctccctatttgttttcaacaagtcatctaatcctcagcaatctagtattgaaaaatcttcagagcaaataaatgaacgacatcatcacttacaagtgaaagataaattttacaacaaacaaatatcaaacagcttcattgatcatattcatattcatacatatatatatatgtcactttcttgtttattgctggagatactgccatattaagctatgagtattattctgcatcacacgatgcacattttcttttatgaggctgcccttgaaactgcacagacggggagctcaccgttgatgtgtagagtgaacatggttctgtaagttacttttttagtgtcatcagctaacttgaattggaaaaaacgaagaagggcaatggataatatcttcatctgccggtatgcgaagtccttaccaagacagatacgaaggcctccctgcaaaccattccaaaagatgaacaaacaatatttgtagtatattagtttgaagtactagaagcaagcaaggtgtcacatatgatgatgacaaacacacataatggtacgtacatgaaatgctataaatttgaatggcgattcgggctgaaaaattccattgacaagccatctttcaggtctaaattcttcagcatcttctccccaaagatgaggcattcttcccatagcataggaaatatagtaaactccatctcccttttttactttaaagccatcaggaagagtatcatctatatctgcacatctcccattct

SEQ ID NO: 125390 - DNA, 855 bp, Cannabis sativa
gttcataatccattcttatgattcagtgctagtaactaggattactataatccccctcacgaaatttttctcttaattcaaagtaaatgtatttatgtaggataggctagttttaggtgcaatttataaaatattttagaggtgtgttttaattatttataattattttgtacggaattacgcttgtgtttttatttatttcaggtttaaatggtaaaattcataatgtgaattgaaaatgaaaaaaaaaaatgttaaatgagatgaatgataaattatcatgaatttggagttccaggatataagtggtgaaaaattataagttttggatgctcaacacgctttgtttgtgatcttcaagtgaattttttactatgatatgctttcactttcaagaaaaatattgggaataaaagttctagatctctctttcagatttccaaaatatttagaatcgtctaattcttaaaaatattaaaagaattatggctaaaatattatcactcattgcactaggagactcactaccaaaaatcgagctacaagcgccacgacccgcctcttttaattgcgaaaaaaattaggattttatctttttttagctatataaaagctatttttcaacactttttcaaaaaacaatgaaggagggacgaaatctgaaaaagagagtgactcactaattaatatgtgaaaaccaataattttgaaaaatattgtgtatatatattccaagcaaaattatataaatatatggacgtatataaacgtccttccaccttgccaaaaaaaaaaatcattccaaaaaatataggataaatactattttgaactttatattttgcaaaaattatc

SEQ ID NO: 125391 - DNA, 1193 bp, Cannabis sativa
ccagttctctcatctctgagctccttctcctccgattctctctgcgttttatttgtgtactttttccactcttgtacttggagagaagcaaatttcatctcttgcttgtcttatgcccttgatttttcgcccttgtcgaagctcatccctgaaagaaatcaggttggtcatggatttttattcctctatcaatttattctaacataaatatataatggaaaaatacatacgccctctctataatgtggaaaaaaaagtgatcatattcatattgtatacataaaaagatgtgtgtaaatatgaatgtatgtgagtgtattgtatataattggtgtagggaataggtggtactctatttttcatgtcttggggtctcttgtttggtcctctgtttttgagtcaaatgtacttgttttttaaggccttcattgtgtttgataaatttcctgagtgaagttgaagctagctcatcataatgatcaatgtgtaaatgttgtgtgacaactgaaagtgatatatttgataattgcttgagtgagtttggttagcttagtcaaattcttttcataaaaaataattttatttaatgaaatttacccagaaaaactataaaatatattttttcttttattttattttaaaagaaaaatgtgtgatatatggttaaatatatagtatattaatataatgtaaaataaaactatcattaatcaattaaagtatatttaagtaaatttatcacttcatttgggatttaattttaaatttagtgaaaaatactttcccactttttcataaattgaaaatctaaaataatagctttcaaaaaaaatcaaatataataaatgtaaaattgagtttttttatatatttttttttagataaaatcaacaaaaaccccatttcaattagaagaaaaaaaaaactcaattttgcaacaacttgtttgaattttgttttttttacacaggaaacattaaaatctctcaaaaacctacaagaagtaaactataacaaaaacgaaaataaataaataaatgaatcctaattaaaacgcataaattattaaattgtaacaatacaaaacacttgtacctaaacaactacatgttatattatgccagttctttctctttctttcttttttttcttttttttcttttttttttttttttttttcgttcaattttttt

SEQ ID NO: 125392 - DNA, 869 bp, Cannabis sativa
aacctccacatgttcaatttaagagattagtgcaagctttcaccatgtacagcattctgaaagcatgggggtaaatgttatccgcgattgtgtcattagacacgtggattctacgtcagcattcaagacccctcgctgtgaccctaatcaaagataaattgggccgagtccacctagatatgcccatttgggatctatcctaggtccatgatcgcagagtcttctgccctcggtaaatcgaccctggaatacacctccagtatcacaaggtgagaggggtattatagtgccttctcagaagacccttctagttttcctatttattcccgcacatacataaggaaattccaactgttagatcacaccagaatattgcatcatgattaaagggagaacttctcataataagtgttgtgtagttaattcagaataatcgcccaccattagcggacacggtgttgactcgatcaaattaactctaatctgcatggtcaatagattgtattcatcatgggttggacttcatgagaaagcccaaacatatcgattaattgtaaactcccagaggagggaaaagggaaaaccctaatgtaattctccaactactataagtactccattaatctcatggattaggatttgaactctctcatgtactttgctaagtaaaatagacaaacatacccattgtgtatatcttatgggattgacaagtaagcagcttactgaataaaaattactccttgactaagcctagttaacaccccaaccacgtaaaaaattgtgtctctttttatactttctctttcgattgttatttctttagttcttattattttcattctgtttttgaaaatctcaggaaatat

SEQ ID NO: 125393 - DNA, 948 bp, Cannabis sativa
aatatttaaattaaaaatctctttaactaacttagacaaaaaaaattactattttcacttgaaattaaggttaaaattacattttaattatgtaaattgaaagacaaaaaatagtttaagttggtctacatctaatatttttagatctatccagattcgatccgattttaccatctgatctgatctaattagatcggttatatcatgtatttcaggtatatatttattagtttaatttggattcaatcacaattgaatatccaatgtttaaagatttgttgtaattgcatctatctcataaactagtgatcaatgtggagatcttaacaatatatctccttttagagcccacgtcgatggtagctcatgtagtaatctattttgggcctaatctaacaatcgctctttcagtggcatctgttcctatttaaaagtgtatgactctgatactatttgatacaaccaattgaaactcattttgtaaagttagctcgaagagggtttccaagtggttgtaaactattaaccaatctcattattgattaatgtgaaatcttaatattatttttagtgtaatttaatattaagttttatataatttaatttagtaactattatgacaaattattgacttctcataaacaccgctatataatagactaatagcgttggggatcgatgcataagtaatattaatatattttgtcattcgaaatccagacaaaatatcaaaaatcaatttgtcatatatttataatgaatattgaggacacaaaacaatgtagctaattaataagattattttacaaatacacaaaattaacaaaaaaaaaaaatacaaaaatacagttgtacgaattttaaaatatttttacgatttttatgattttatatacagaaaataaagttttttttaatgttgtactcttattaatttgttgttgattt

SEQ ID NO: 125394 - DNA, 914 bp, Cannabis sativa
aatctaaatcgcaactaaaatacacatagcaacccacataaaaattaccagcaaccaccaaagtatctcaaaccgtaaatttttttaaaaaaaagttaaaaaataatatatagaataattctcttaaatttattcattatttaacataaatttttattgatgacttaaatttattttattattaatttttaatcaacaaaagaatgataaacactcaaacttgattggaaaactatacaccaaataaaatattttaagatatataaaaagtaaaaattattttaaatatttattagaatgataataattattatattaatacaatattaatttatcatgtaattatcaactatcttatcaaacttaatataccctgaaaaaaatctcttatgtggcgtgtcaaaagtttttgattattattgctactataattgtttttttttatatatatattattaattaatttagaaatgtcaattattcgtctgatcagcatatgaatatatgcttgaaagatatatagaggaaaatagaagcttttatatgtatcagtttggttgggtagtttggccccccgacaagaaagatcactaccttgattatatcacacatttcgctacaaaattttaaatcaaatttataatatgttttatggtgtatttgttaagaacactctaaattttaatttagccctaattaatttatgaaaattaaataataaaatatagattagcagaagcgtactggtatccataaaattaatttttaaatggtttgatcttccgatttgcatcaaaaacttgctctaaaagttttttccttggtaatagggatacaagagtgaaaagatacgatataaatggggaccattaccgtttatattaccaacagacaaaactgttagtaatatttat

SEQ ID NO: 125395 - DNA, 804 bp, Cannabis sativa
cttgagagattttaatttggctatgcttggcaaataagcttggagactcctcaccaggccgaatgctttggttactagagtgttcaaggcaagatatttcccttatagtgactttctttcagctacgattggatctaatccgagcttcgtttggaggagtatctgggaatcacaagagatagtgaagaagggagttcgatggtgtattgggacgggtcaagatattcctattctaggttctctgtggctgcccgatgctattaatccatatgtcatctcgaatcaccctgctctttcgaatgctactgtcaacaatatgctcatggttgatggctcgagttgggatgcggaagttattgatgacctttttatggatagagacaagcacctgatcatggcaattcccctgcaagtggatagtgtggaagatcattatgtttggtctaaggagaattcgggtctctatacagtaaagagtgcttacaaccttctcccaaagcttaagggtggatggtatgatgacaatgattcgaacttctggggtaagctatggaacttaaagttgcctcccaagataaaaaatttgatgtggcgcactgtagtaggttgtcttcctactgtgaatcaactcagaatcaagcacgttgatgtaagttctctttgccctgtttgtcgtatggctgatgagtccattacccattgtttagtcacttgtcaagtgatcaaaacttgctggaatagggtcgggattggcactttaaatgccccgacttcctcgttcatggactggtgcagctttgtgtt

SEQ ID NO: 125396 - DNA, 1875 bp, Cannabis sativa
atctataaatataccaaaacttatgtatctataaacaaaaccaacaataaagcaaccacagagattaaagagacaccaagtaactagcattattacatagtgtatctataaacaaacttatgtatcataacatatgatacagttttattttatcacttaaatgaaagaagcattattacatagtgttagtaactaaataaaatcataatatggagggtaaaatataggctatatatacactattatagtaccaaattacattaactaaaattaatatttaaaacaacagtagttaagaatcagtttatattcaaatttatttttatttaaattataatcaacatactattcaaagatcatagcaaaaatataatgaaaaaaataaccaaattatatataagaaaaaataaataaatatgtaaacagtaacaaaataaaaatcaaaacttcttatacacaaaaaaatattacatttattagaaaaaataaggtaaaaaaaagtaagatcaagacctgagtttatcatcaccgagaacaacgaactccagcacctaagaacaatgaaacccagcctttggctgaccgccgatatgcttacgaaacaaaaaaaaaataagatccagtttcttttaacatagaaaaataaatgaaaaagattagagaagagaagagaaaaaaatcttacaagttgaaaacttagttggtgagtggtgaggctggcgtttggagagttggacgatggtggttccaggtgcggatggctggcgtggatggagatctgaacggtggttttggtgaggctagggttggagaacactggtggagcaggagcctagatgagtggatgggaggcacaacaaaagggcaaggagatgagtgtgagagtgactgagtgagagagaagacagctttggaggtttgagtttttttttcaaaaaaaaaaaaaggctaagtgagagtgacggctgggtttcttgttggagagagaggaaggatttatgttgttgtattaggtttagggtttgcatttcaaaaatactatacatatattattttgttttttaattatttttagttgggttggcctggtcggccaagtttgggttgattgggttgaaaaaccatcagcccgattatcaacccatttggtgcgggttgggctcttttcaacccatgtgaggttcggcccactaaatgtgaccatgtttcggcccattttgggtagtgtttgctgggttagtcggcccatttccaatccatgctcatccctaactgcgccgacttgtcaaaaaacacctgcaaaagaaaaatacaagtatactacataacaatatagtctataagcacgcaattaaattaaattcataattttacccttcttgtatcataattacgaaaaatgcccctggctcaccaacagggtcttaacatgtcatttatcaaattaattcacatgtaataagttatataataatataattccataatgaatacatacttaacttgttagggttcactaatctattttcttaatcttaggatattacaggtgaagtattgactggtgctagtattagtcgatggagctaagactatttcctttggtgttagtgttctctgagctgctttccttgatgtagaaagaggtgtcttctctatcgtcagtgatctgcgagctggcgtcatcgccataaattgaaccgaaatcaattacgatctacctggatataaaccctgatgtcccaaagaccgtacgctctaggcctaaccgctccgacatgtacaatctccatctgctcgctctcgcagctgcctagcgtcagccttgcccttacctacacatggaaatagcaactatgagtcaacaaactcagt

SEQ ID NO: 125397 - DNA, 1313 bp, Cannabis sativa
aataatattcgacaactagcaattcatttatttataaaatatttttatcaaattaaagatgctaaaaatagaattaacaatctttctctttggcactttgattgacaaagtgttttaattataagaaaaaaaaacatgcatgaagtgttagaaacaaacaatagagaatagaaaatattccacgtgcatgaaagtatactaacacataaaacatataactttttaaagtaaaaagttcacaaaccataaacaaaataagtcttccataaaggtccagagttaaaactaacaatctaaaaaataaatactactccttttttaatctatcaaggagccgaagataacaagaacaaataaacaaagttatgatagttcaataaaacatagataataagcaaaaagataagataaaaatgaaccacttaagcattcgcattagattgaaaaaacttcatcatgttgtccatcctcatgagaagtaggacttgatttgtctccattcttctcaattacattagttgaattaaccatttctgtaggagtaaaagtggaggctaatgcaatagcagatatttcccttaagggcgagttgtcgtctggtcgatagggagacaacaacacgatagagaagcttgttattggatgcttataattgaatatatttgactagtatatatattttgacaaagtaaatggttcaacgggacagttatttctttggttcccacaaccccgacgatgacatgctcaatttagatgtagtattagttcaagatcccacaagattcactttttataatgttccttttaatttttagattaattttaattaattaaactattttaaattttatgatagtatattaattaaacttgttataatgggaaaactcttatacatttttttttttaaattttgtaaaacaatttttttttcaagatactttattatgaagagcgttgtcagtgtttaagtatactttaagtaatacttcttgcgtcattcaataagtgttgggtgaagcaaacacaaaacaccatctcacagtatgacaattctgagatgaatcatgcgggaaatgtaacccttagtctcttagcatactcgcgagtaggtaagtcaatgagctgcaagctctgtaaataattctttatctaccatttttcaagtattgtaattctgttgtgtattctgtattggggttttttcattaaggtacaacaaaaattaatatattacaaaaaatgtgcaaaaaaacttaattataaaaagtcatacattttaataacatatttactaatatttaaatcat

SEQ ID NO: 125398 - DNA, 1031 bp, Cannabis sativa
  modified_base (985)..(994): a, c, t, g, unknown or other
aagataaagcgtgtattttctgttcaaagtctcttaaaacaagcttgcatgttttaagagactgacctctagctcatgctgcctggtttggtggttagtttgcattgttcagctccaaggtagttctatgagggattaatcagacattagagataaggtgatgacgtattgtactattgtggttgcttattcatagatatttgggatgaaagtaataagtatatgatctagggtactgaggtgaaggtggaaaacattattttaattacttctacaaaattctcgaatattttcatgacagggaactcaatgatggattccgaattgatggctttacctatcccagttctaccagcctcagagcattatgttgagaattatgtgctattcattgatgcttcttggaaggatggagtttctggttttggtgttgtttgggttaatttattcattagtagatcgtttaatagtttaatggtttaacaagaagtgttttaaggttatctagccttagtgcagtttgtatccaatgggagggaccactatatgttattgagtttgagttctaggaccagtaaaatagattgttaccatacttaagtgcatatttttagatgatatatatatttgatttggtggaatagtaatgaaaataataataataagaacaatctattaggataaaatatgtgaaccatagacaaaaataccattaatttgaagaaaaaagaaagaaagttttatatataacatcacaataatattcaaactaagggtaagataaaaaatttattaataactttgcaatagaaagaatattctaatggttaaagattggaataacaattccatttttttaggagtaagaattctcttcacatgatttaaaccaaacaatagaatgatctgtgtagaaatgaactttcgattctaattctattgaaccaaaaagtttagtgtcattgtacaaaaaaaaaaaaaaaannnnnnnnnntaataataataataataattacaccacatactgaaat

SEQ ID NO: 125399 - DNA, 1953 bp, Cannabis sativa
  modified_base (1192)..(1192): a, c, t, g, unknown or other
aatataattcctccattatacataattatctagttagggttttgataatctatttcttaattctgggtacaaatatataggataaactgcctaaaccgatcgatgtacaaccttaacttaaatagcttcaaaacgcaagttgaatcatatcaatcatatacgaattgagtgagttatgactgtcaaactgaagacagttcaggctcccgtgcccaggttgacattccagtgctcaagttgacattccagcgcccaagttgacatctgacgtcaaaatggtcgtggtataagtgtgaaaacgttcaagggaagtcttttgaaatacctaagtgatggtttgacacccattagtcctttatatgttttggtgaagttggtcacttattctcggagatgttgctattttgcagaaatagaagactcaaaactttcggcttctgaatgagccgaaattgaagttataaatttggttgatctgacttcatgtatcattgcacttgtgaaaaactagaagaacaatgaagacgacatcaaattcggataagcagaacctagcaaaccatgccaaatgttgacctaggcacttgggcctcctagcctgagcttcgagattctatttttgatacttctaaggcttccaaggcttcttaacttgaggacggggcctctccccccatttttgaccatgttggactcaatggttgcatcgaattcggcattcaagcatttgaaggcagcatcccaggttgattatcaacccgggcattggcccaacaccaggtcaacctaagcactaagccctatttctaggcactcgggtttgtagttttctccctgagtttacttgaatcttcataattttttatgacggtaaagatttctagagaactttttgttgaactgatttggaaacaatccaaattgacaaaatgtcaacctgggcacaaggcccagtcctaggtgtctacctgggcactgggtccctcttctgccccttcagaagtttcgtttggtccccaaaactagttgaatctcaatattttctgaagatggagatgatgctcaaaataattctaggaaaactctattttatttggcccaggttaataaattgttaactgggcatagggccagccctaggtgttaactcaaacttttaggtctccttgttttgatgattaataaatatttnattattatttgttactaatgatttgttgattttgtagcaaaattgaaagataaaataaattttttcaaggtgaaatggtaattttatcaaacttctcaaagtgacccaaaatggatgcaacaagcatatcaactacttcatacttgataaagagcaaaagattcctcaaggaatcaagaatttaagacactattcaaaagaagtcttcaaaagctcaaagtcaaaagtcaacccaaaagttaaagtcaaagtcaaagtcaactctcagaaaaaatcaactttggatcaaaatatgcaaatcaagctacgaagctcatctacattaagactacacacaatcaaatagtataaatttactttggtcttgttaaagtgatttgcatagtacactagggtttataagtacaaattttggccgactcactaacttgtgcaacaagttttctcactcgatggttcaatttttttttgattgactttctaaatcacatttaatttaactaagagaacaaaattagaatttttgaaatcgaataatcgagtagagaattcttgatgagacaatctatatgttgcaaccagaaggttataaacttctaggataagaagagaaagtttgtaagctaaataggtctatttatggacttaagtaggcttctcgttgttggaacaaaaggtttgatgaaataatcaaaacctatgactttcaccaaaatgaagatgaaccttgtgtttaccaactcaaggataatcaagtggta

SEQ ID NO: 125400 - DNA, 1328 bp, Cannabis sativa
agcattgaatattttgtatttttgcatggaataatttagaaattgttgtaattctatattctcttgcatttttttcagtcatttttcttctaatttgcttacttattttctatcatattattatagaaaattgcagtactgtaattttttttttaccttcaagatattttctccattgactcttttaagtatgatttttttttttcagcctattaaatatgctataaatattttcacataatttttttttttttttgaggaatttacggcgaaatctttttatattttaatttttatacatttaatctttttatttttctttggtggcaaaatcctttttaagattattatttttttttgttgtaaatttaaggtgttagttagatattaccattagattttaactggattactactgtatcaactttaaggttttactgttacatatatacaggtgtatacagtggtcatccaattgatatttaactgacgtatcaaatttacaaagaaaaataaacttaaagggattttgccacaagaaaaagggggttaaattataaaaattaaaacataaaagatttcaccgcaaattgctctttctttttttttgcctaaatttatttcttctcggtgcttttttaatgtaaataataatagcgttatttccacaataataataacactagtgcttaataacaatgcttacaccttaagatggtattgagtattagtaatgcttaaataactttaataaataacgataattatattattattttccttttttgaggacgacattagtactaagctatataagaataaacttaatcacacgttaggttagacaataaactttttttttcttccgaaagaagaaagatctcattcaagtttatgctttgttgttttaatacaaaaattattatgaatcttttctactatcatattttgatgagtcaaaagttcttaatttgattcattatactaagtaaataagtaccattaacaaagttgaaatataatgagaatagctatgtaaatgttaccataatataattacatatttacttaatagtcaatttaagtaaatttataggtgtattttattcatttgctaaacctttgtttggatcttgaattttatgaagtttgaagaattttattccctcatctttagattcaagggaaaaacgaaggtttattttctagaagaattaaaactcaagtatatagtgacagacttagcataagactaagggtgattgttgtgaaaattatatacgtaagtatacgcagttacacaagtaataaagtgataagtaagatcg

SEQ ID NO: 125401 - DNA, 1565 bp, Cannabis sativa
ggtcaagttagtgggccaactggaggggtaaatggggacgtgggcctttctaaagctggatcaaaagtgcacggtttagctgatgaagttgtaattgtttgtgagaacattttggttcaagagggagttacaaaaaacttgagtggggcgggttctggtgtccaggcccgccaagaattatgaatgtgttaagctggaattaccgggggcttgggaaccaacggagtattcaattccttaaagagatggtttctcataagaaacccaattttatctttctgtgtgaaattaaatgtcaaaaatcaaaagtggatgggcttgctagattattgggctttgaaggggtctttactgtagatgcaattgggttaactggtgggcttgctctcttgtggaagaataaagaagatgggagtttgatgggttattctaataaccatattgacattgttattcatactgctcattttggtaactggaggctaactggactctacggagaacccaaccgaagtcggcgccaagatacttggagtttgattcgaactttgtctactcgttcggacctgccttggtgtcttgttggtgacatgaacaacattgttcgacaagaggagaagagagggggtcggccatatcctcaaagcttactttcggattcaacgccaccttacagcaatgcaatttagttgatattgagcttcaaggccacccgttcacttgggaaaaggggagagggtctaacaattggatcgagatacgcttggacagagctctagcaacattggcttggcttcaggtatttccacaagctactctctctaatttagacttttctagttcggatcatgcagccattttccttgaaccgtatcttcccactgtttttgctcctcacaatcgtttttcgatttgaaattgaaaacacctggttgaaagagcctctttgttctgagatcataaaagaatgctgggaacttgggcactcttttagttttagtggcaaattaagcttatgtgccgagaagcttaaggtttggggcaaagagattacggggtcccttaatcatagaattaaagggtacaaaaaagagttgaagaatttgcagaataaaagggaaattgttttggtgcaaggctaccaggaggtgaaaaaaaagctttttaaagcacttgatcaaagagagagttattggaagcagagagcgaaacaattttggttacgggaaggtgaccaaaatagtaattacttccacaaggctggtagtagccgaaagaaaaacaatcaaattgagcaattaaaagatgctcaaggaaactgggtaacatgggaatcgagtctaggagaagttatgaaagactatttccataatttatttacttcgtctaatacaaattgtatggaagtggttgattgtgttcatccttgtgtttcagcttttgtcaattctgaattgtgccagcccattcaagaagaggaagttaagaaggcgttgtttcagatgcatccagataagagtccgggtcctgatggaatgactccggctttttatcagcgttgttgg

SEQ ID NO: 125402 - DNA, 552 bp, Cannabis sativa
tgtttatatttagttgtgattatattaattaattgttattgatttttttaaaaaataaatatattatgaatgatgattgtgttggattgatactttttatatataatttcgtatataattatataaatattttcaacctgtactaataaattaataatattatcttactctaaataaatttattattaattttatattattcatataatacatctatatttattaatgtataccattttttattttcaaaatcgtaaagaattgttgtatattatttttatttttaatcaaaataataatattttttaattatatataaaattattaattatttaaaatttatatgataatttactttttttaataaaaataaaaaataatctatatatataaagcgtagatataaaatagagttacgacgctctaaaattacaccaaatagtattattattccaatttttgcccacttgacatggcattacttacgtggacaaaattagtcccatgtggcaatacaactcaccaacaagaaggccaagtcagcacctcaac

SEQ ID NO: 125403 - DNA, 558 bp, Cannabis sativa
attgcttctgtcagtgatacccttccacccatggaataccacaaaaataattctcttcctctcttcaattacataggtgtaatcgttatcgtgggaggatgtagcttcagagaggaggggttcagtcaaaatcttgggcttagggagagggatggtgcgattgagtttctggtttctcgtcctggtaaagcgatcggaggactccgtggttagctgtgcaaatcattcttggaggcaaatctggatttctgagtttggagagtgagatggtggaggaggtatcgtgagtgacttttaatttttttttaataaaaaaatagtttctgatttgcttacacgctttaatttcttttatttattttatttaataagatttattttaatttaggtaaaaataaaaaaaaaaatagaataatcattattgtacactaatgaaagttagtggataccagcgacaatatgttaaaatgaggttttgagtattaattgttgggctttgtgccttaaataaagctctatttcaatgtaatctttgtcattcaattatcaataaagaaa

SEQ ID NO: 125404 - DNA, 580 bp, Cannabis sativa
gtgagaatacatacacattctcgaaaatatataatgaactaagatgtattatgtaatatttttattttttaattttttaaatcataaaataatagtagaattttgtttttgattttaatagaaaataaaattgtatttttatttttgtttagtgtcttttttaagtgaggattgaaaagcggggtgcgaaaaaataggctaggaacaagggtaggatcagagtctggtcttcgagttttcaggcaaggtttggtccgagttatgattagggtccaaggtctaggctgcgttaggatcgggagttcaagatctatggtctgactcaccccgacccaactttctcaatcctcacttcaataaaacaaagaaaaaaaaaggtcaaattttactcaaacttttatctcgatctatattccagttcttattctaaattcaaatcacaattagagtcagggccgactctaggcgcgtgcctccctaggcataggcggactaagcccgtgcttagggcccactcattttaggagcccaaataaaaaaaatactttttaaaaaatacatatatttttttaataatttt

SEQ ID NO: 125405 - DNA, 1774 bp, Cannabis sativa
atcaatcacttcaaatttcttacattgataactaatcagattgtaaagacttttatttagggcataaaacccaacattcacgagcatctgttatataatctgctaccaggttgcttgaagtactagtgaatcgaagaggtttaaagtaatcatggccaggaatccatgaatcattagcacaactcacagcagtaccatcgccaatcttaattcttaagcctttttgtaacagttccctgccccaaactataccctgccatgttagagatgataaaccagaagctttggcagataaaaaatcattttgatgataatatcgacccttaagaacacggctgagcaaagaatttggattctgaaaaaacctgccaagcttgtttagctaaaaaggcttggttaaaatgaacaaaagatcgaaaccccaatccaccatcacccttagaagtgcaaagagatttccaactcttccaatgtatctttttattatctattgaagatccccaccaaaatcttgccatcattgactcaatttgcttacaaaactttgtggataatctaaaacaactcatagcataagtaggaatcgcttgtaccacagctttcaaaagcacttcctttcccccaatggaaaaaatcttatcattccaagcatgaattaacttccaaatcctttccttaatattgttgaaaagttgtgatttatctctttcactataagctgggagtcccaaataagattcatggcaatcacagatcgacattcctaagatttgttgaaaagatagcttaaccgcatcaggagtgttaggcgaaaaggacataaccgacttatcagtgtttaagagttggccagatgcacagtgataaacatctaaggcacgcttaatggaaccacaagatctatcattagcttgacagaagagaagactatcatcagcgaacaaaaggtgtgtaatggatggcgaatgtcgagaaacagcctgtccttgaagtctaacaatcttctcctcatactgcaacaaacgcgaaaggccttcagaacagattaaaaagaggtatagggagagtggatcaccttgacgcaatccatgctgaggtataactgaacccgagactgctccattaattaggaaagaaaatgaatttgtgtgtaagcatgtcaggatgagtgaaatccatttaacattaaaacccatctttcccataaccgctgcaataaatgaccattccaccctatcaaaagcttttctcatatccagtttgaatgcagccaaccccttagagccacgagttctatgcttcaaactatgtaccatctcaaaaacaacaaggatattgtccgtaatcaaacgatttgaaagaaatgcactctgtgtttcagaaataacagaatgtagaacttccttaaatcgtaaggccagcatcttagaaatgattttgtatgtaatattgcataggctaattggacgaaaatccttcactgtctttggttttttgatcttaggaatcaaagttatgagtgtcttattgaatgcttcagggttagcaccattattcaatacatcaagtgccaccttagtcacatattcccctactatatcccaattgtgatgatagaacatagctgacatcccatccaaacccgggcttttatccgaaccaatagtcttcaaagctgcagtcacatccgagacagtaaattccttggacaaatattcattttgctcatttgatatggttgttggtatggtagatagtgttggaaattatttta

SEQ ID NO: 125406 - DNA, 828 bp, Cannabis sativa
tattgtaatatttgtcttaatggtaatgatatttggcattttacctatttttatgggtctcctgtaagccataataagcacctcacttgggagattttgcataagatcttctataatgatcctaaccttctattgctcataatgggggattttaatagctatctttaatgtagtgataaaagtggcaggtgtatttctaattattttaatttgtctttttttattgacttcttgaataaatatatgatgtttcctgtaatatcttgaaaatgtaattatgtttatttagacatattttattaaatatgtagttacgtagaaactagagtaagattataatcttactaaatttaaatttgggataattagggagttttgagaaaatgattaagtaagtgtaacttattaattatagaaattttattaatatatacggatattgtatatactatttttgaaataaaatatattgggttcgacgaccgttggaactcgattggttggtcaaggatgtcatgactataagagtttaggtgttagttaaactaggagttattgttgctattgttttactcatggtgtttgagagtaattggttatgacaaatttacccctaaacctagaattagcttagtaactaagaaaggagtagaatggtcctttcactaagtttatttatttttgacttttgtgatttaagtgcttttgagttgaagttaaataaaggtttattatattttaatttattaagataggtattgatttatttcttgtactttacaattaagaaaatttaactttgtcatcatcctcaccatactctctctc

SEQ ID NO: 125407 - DNA, 547 bp, Cannabis sativa
acaatcttacttttataagtggcaacttgttagcttaaaagtcaaaaaattataactaatctattttattactatataaaaaagtctaattatagttactaaaaattaaaaaaaattaaaatttattgtgaataaatatatatttaattacaacgtgacttaaactaaattaattagtaaaatgtgtaaatattataccttttaatataattaacaagtaactaagtttatgttttgactataataaagtaacattttgtagtcacaaaaatatataagatattggccaccaacatatgtgttatttaatatttctcaatctttatataagcataaatatgtttcgcaggcacattaacttgtataaaattgtgttgggtcccgttatttcattttgtcgggctgctactttattttaactcccacattaatatgatattgtctacgttggcctaagctctcacggttttatttttaggtaccttcccaaaaggtatcatactaatagagtagatagaacatctaagataactcttgcctattcttc

SEQ ID NO: 125408 - DNA, 1021 bp, Cannabis sativa
  modified_base (990)..(995): a, c, t, g, unknown or other
ttttgaaaaatatttttacttttcaattttaaaaacagaaatctgattaaaaaagtgttaccaaacgacaccataatttgttgttgtaatttaggtgcccatacacccaagtataaagtattatgacacatccaacacgtacaagtcttgaacgttcttggcaagagtacaaataatgcatacccctttgaagctccactaacctctttaccgcatacactaaatacctttaacgttctagtgttggtaggattagctcgaacctcctacctctttaccatatccactcagtacgtctaacgtactagtatcggtagggttagttcgagtcactatcacatgcactcagtacctccaacgtactagtgttggtagaactagcttgagccactataccacatgcactcagttcctcaaatgtacaagtgttggtagaactagcttaattttcataatgcatgcatacaacatgtatatatgttcatcctttatactaatcttatgtcacttccgtaatcaggtgtgccaaccaacttgagtagaagtattactcaacaatttcaatgccctaagtcacaattatgcaaaataggtaagcgacctgctaagtcactttcagggacttaaacttagaaccagaagttttcttaaagataaatagcatggcaataccctaaatattgaagaaacacaaaaacctaggcactcaaaaaataccccaatcggttaactagatccccaaatggtccactgtttttcggggtcctgcctagggaaacagttaaccgattctacagaaacgattaaccgtttacgtgtagaaaacccaaaactcaacttttctacttcagttctatcccatattttgcaatactttccagatcacctaattacactataatgaacacaatttaaccaataaatacatcatcaaacctttgaaattaaaagtggcattgttgagtaagcttttgttgggttttatgcccnnnnnnaaactccatttcaatgtaatctctat

SEQ ID NO: 125409 - DNA, 776 bp, Cannabis sativa
cctaaacttttattgtatatcatcattccatatggcatgaagctatgctgaatttttcattggagcttgaattttgggaaaaaaggagtggaaatggataaataataataaaataaatgaatattttgatcaaaagaaaacgattattttacagaatcttttggtcaatatataagcagccaagagtcatagttatttcttttattaagaaaaaaaagcacaaacattctaaacactctatctctaagtcagaaaatgtttctggtttagcattcactaaaattatgatgtctccaggcaaagttttgtaaggctctttactcttatcaaaagtaagcaattactaaaaatggattttcccctatttcacaatctaatccatgcgtctagaattctgtcatcacaattaagaattaatccacacattagaatttcaagaaaatttaaaattacaaaaacaaacaaaatgaagaattatagaataaaatgttacaaaaagggcaaacaaaaaggtgaacgatgatactaattaataaacagagaaaagaacaacatcaacaatcaacatatacagttacacagtgagagtaaagaaccttataaagatttgggccaagatgcaaaatagccctaaatctaacaattaagttaataaatgtccctttttataaaaaattaaaaaaatgtctattatgttaagaatttgatgataaaattacaattataaccttgaataattaagtgtttggtatagttattttgcacaatagtatatc

SEQ ID NO: 125410 - DNA, 3917 bp, Cannabis sativa
  modified_base (250)..(264): a, c, t, g, unknown or other
  modified_base (2110)..(2111): a, c, t, g, unknown or other
atcatgtcagtgtaaatccagtgcactgataaatcatgggactaaagactttgaagcatataatcacaattacttttcactgtgacgacatcactataactttgaataactatatgttctggatttaacagaatttgtatatgaaaaccataatcatgaaacttacatgtaaacataaatgacttctaatcttttattgatagcaaataagattatattaaaataggtgttatttagggcataaaatccnnnnnnnnnnnnnnntgcactaacataaaactagaagtgattttcaattaatccattatatttatattcatgtcaagtatagtgtgtttgactgtacccaaataacaggaactgcaaggttctagccagaaatagctttctccaccattacttccttttgtgttcataataaattatggaacatcgtttttctatatgtatattactcctgtagggaaattaaattctttattgcttgataagtgcatttgaatatatagagaacacaattctcattctatccaaaatggaatagagataaaacagtcaaaaactttcttcaatttgaataactctctagtaccttttagaagcaactaagtcatttagctagtggtactaaattattatagacagggttttccaccattccaaaataattcctccaccccagagtaatcaccatattagatattaaattttgaattggtatagatgtaaggattctaaatacacccctatcatctaacatataggtcacttttagatattccttcttgattgtctccctatgttcccttgttggattatatcttcgatggctgccactcaacagtaggactctggtttaatgcatacacaagtgtgcatttaacctcttcctattggtacttagggacatctagttgtgacatttatctttatctggaaacaaaaattccatctagattaagtcataaatatagcattcttgtatcaacattaatataaaatacttgcttaagattaagtaatcactaaagatactataaaataattcataaggaccaggaattgtgcttaagtctttcgaataaacattgcaaggtttcctattttatcctcataattctgatatgtgacaactatccatatgaatggttagattaactttccttagctttatttaaagttcctttcttgaacatatcatcactagtgtcatccaaataataacaggctggatttgttaaaatcctcccaccaagataaggttatgtccagggactttagtgatatctattactattggaacatatacaggatcaagaataagttctactaattttctagtttgttaaacatattatatctatgtctaatcataatatgtgttataaagagattctgtgatgttttgaatataatctagagttcattgtaaaagatctttaaactgcataaccaataacttctttccacccttatttgaccacaagattttttattaaacaaaatcttaataatttcttaaaaaatgacaattattcataaatatagattttgtatcaataataaatataaaacacataaaagcttgataaacacacaaatataattttgtattagcatacaagctacaaaatataaagctcaattttataaaagcaactcataatgaaatccttttaaagagaacttttttaagtaatactcttaaaattatcacaataaattgtctgcaataatatgaaatagaatttccaaactaaattgaaactaaattgttcaaaaaataaaaaaataaattcaaaataataaaattcgagcttcattgcaacaccctactagtttaggcatgttaacgtgattttttaacttaattgtgcacatcgttgctaatcaacgagtttattgaaaatcgtaaataattaaaactttattttaactatttataaataccaaattaacttacttacattaaacgaggatcctgtttacaaaatatttacaaaagtttcacagtgcatagtacaaaagttgtcgcctagcgactatacaaaatatgtccagctgtcccaaaaaccatacactccaggcctaactaccccgacatgtacanncttcatctgctcgctctcacagctactaaaccttagccttgcccttacctacacatgtaaacaatatctgtgagtcgacagacacagttagaaaagcataatcaacaatatagccataacttggattataattaggcgcccacacacccaaccataaccctatccctgtgtccaacacggtgctgagtcaagaacgttcgtacaacaatactactgactataatattagcttatactcataacgctagtcgtaccgatgtgatgctgtcaagtagtaaaccaacatacatttatcgatatctagtgtaatactaaacatactgataccactattataatgtaatctaataggcttaactaacatgtaagctaaacatgtaagcatatatacatatcatcatactaatcttacctcattttcgagtttaggtgtgctgaccaacttgagtggaacaactgctcaacgaattacaagccccttaatcacattattcgtaaaactgataagtgacacactaaatcacttttcggggacttaaaattgaaactaaaagtttccctatcgatggataacatggcaataccctaaatattgcaaaactgggaaaaactagggttcctaaaaatgccccaaccggtagatcagttccccagttctgtggggtttttcggggaccaaccagtcgaccagatcctacaagtccccctgaaccggaattccagtttagtgcaggaaacacacaaaatcaccccacaacctcaaatcgaccccaaatcacaccaaaccttccagacctactaattacaccataatgaacataatatatgcaataaaacaccccaatacaaccaaaatcacaaaccaccattagtgagcattttacatgagttgactactctattcaatggatgagatctttgactctccctaaacgggactctgtatcagtttgttgaaaaccttggaaaataattaaatatgttttattttggtatttttacaaacatgtttacttacttggtattttctgaacttgtgtatgaattcatagaaccaaataatttatttctattcattgatatttgtagtgtcaaaatggcttacccatatcccgaacctctttcctctcactttttacatgcctttgcaaatgaactacatcatgtgaagatgtctcctaagaagagcatcaggtcacatatactagtgtaaaatatgaaaatcatgaaagcaaaaatgctgggaatttctttgtcaaaagaacagcatgttcaattcttactcaatagtcttccacctgagtataatgcatttgttgtatcttatatgatcaacaattttaactcatccgacataaataagctggatgcaaaattgtatgcttacgagcagactttgcctacaaggaggcctccttccagatttgtagacaaggaaaggaagatagtaattaagtatgatgcttctgacattgctgcaaaatattgaaacaatagatagtcgtaccctcaaatgttcatattgtgaaaggaggggacatcaggaagaacaatgtcccaaacttctagataattcgaatgaaggtaatgctttggtttttgaatcatgtgttttagagaatcacaaatccttttgaattattgattctggatctactaaccatgtttgttcatcattgcaattgcttgaaacttaggattattttaatctagggagttaaagctcaaagttggaaatggcgaattagtatcggtccaagctaaaggaaaagcccgcctcaagtttcagaagaaatttttagtttt

SEQ ID NO: 125411 - DNA, 1246 bp, Cannabis sativa
  modified_base (1174)..(1198): a, c, t, g, unknown or other
cctcaagcaaacagacaagtagaaactgttaataaaaccttaaaagatactatcaagaagaaggtagacgctgctaaaggaagatgggtagacgagctaccataggttctttgggcccaaagaactgtagagaaaatagcgacgtgacacacaccattttcgttggcattcggctcagaagcaatgttaccagtagaagttaacattgcgacccacaggcgtaaaattctttaatcaagaagaaaaccaagaacttttgaatttgtccttggacttacttttgaagaaaaacgtaatgagtcgcaaataaccaatgcagcttatcaacatcgaatcacgagatattttgacaaagagtctgaaaaagactttttaaagttggagatttggtgttaagatgtgtatttgcaaacgcgagagattcagctgctggagtatttaacccaaactgggaaggtccttatgttattgaagttgtcgtgggaaccagggtttacaagttagcttggcttaacgactcgctaataaagaaccactagaatagtgaacatttgcgaccttattaatagtaaattaaatatgtatatgctgtatttatctctgtaataattaatgcttattacgaataaagttagagtttgttcaagtaattacaaaatttattttctttaaaattacttgggggcatatatatgtgtataataactggaatccacctagagaatacatactgtattgcaaacccaaaaaaattaaattttttcacaaaggaaaggatgattgattaaaattgtctattgacaatataaagtcaagaaattaaaaaaccttttctttaagaagaaaaatcaaaatagtagctataagtgagattaactcataaaacaacaaaaagctatatgcgagctgaatacttaacaactcacattactctggcatgtattataaacgaggcacaaatgagccttgaaaaataatacttaagctaaagtatgaatagatgattaactattcatatgggcaatcaaaaaatattcaaaatagttcctaagatgaattattcaaaatattttaagtttgctctaaaaaataataatgagtagcagattataactgctcgcgtataacaaggaagattagaactgcttgcaaaaaactgttggaaattattttnnnnnnnnnnnnnnnnnnnnnnnnntatgttggattaacaacctaatattaattctaaaacaatgaaaataaa

SEQ ID NO: 125412 - DNA, 929 bp, Cannabis sativa
caaaaaagaaaaccaaataaatcgcaatgtatttttaaaatacaataaatgaaaagataacaatctagatgtatttttaataaattgggcttgtgattgataatgtaattgcttttcaaagactatttagacttttatttttcttcaataaaaagaaataattgaactactgtttatgaaaatttttacattttgttttatggttttgttgaaatgccttctccataaaagttaatgtaactggatgataattgtaaaataggttgcaaaacttaatttatttttgggaaatttatataaaaatgttagtgatagaatttctcacctaaaatgttttgataaaaggatgaattttaataaattatgtggatgtgtaatttatattttaaattgtaatgataaaatttcatccgcgcacacagttttaataatttcttaaaattatatattaaattacataatttattaattacgaatcacatttgaaggctaatattttttaattgcttatcaataaaataaaattatataatatatttgtataacatattaatttcatatttgattatacaaatcatacaataaaaataaaaatgtactttgtatgaagttatttataataattaaaaattatcaaaaatataaattcattttaaatgagtcagatattaataataattaataaaatatttattattgtagactacacattagataattttaaaaattataaagaattatttgaaaaaaaaaataaaaacggcaaaagaaataattttttattatataaacatataatatataaatacatattattatagagtatagattagatgaattaaaaaaaatcataactaattaattggttgtgtgtaggtaaaggcaaagctattcttgaacgacaatgagtttggagctgaatgaagatt

SEQ ID NO: 125413 - DNA, 1023 bp, Cannabis sativa
aacacacttagtttaatgaaattcaaattcaagataaactaaatgtatttttctgtatttaattaaataaagaatgaataactattgagattcttctgaaacttaattatttaaatatttcattaaatattcctataatagttatcaacataacagagagctaactcacatattttaagctctaatccaccataagcatgcttcaaaattcaaatttaaacaatattcaatatatgctccaaagttgagcaaaaattaccaaaattctcatatccatgaacctaaatacccaaacaaaacttcagctgactatcactataaaattcatagtataaaatcacatttcatgcacaataatgcttcgaagtctcatctaaagtcatcaagaatatatttcaccaacatctaataccattttacttctcatgcaatcaagaacattcaaagctcaaaaatataattctcaatctccatttcagcaacaaatcacaaattgaagcagtaagaaatctaccttaaaatcctcaacaattcaagctccaagattcccacaatgcaagcttgaatccaagcaattctcaagcaaaaattacaaattttagagataggtttagagagagagagagagatggggtcagcttgggtagaggaaatgcaaaaaatgttctccttttttgcaaataattccattttgctacaaatgatacaaataggccaaattacaataatgccccttgggccatataacacacataaaagcattcaagggaaaaatagtcaatatcacataacacactattaaataaattttagattaatcacacataattaaaataccaataaatcatcccaaaattgtatttcggtcctgaacccggttcgacccgaaatacccggttgtgactataccgcgccaacttggcagacacctaaaaaaggaaaaaacaagtatactacataaaaatatagcccataagcatgtaattaaattaaattcacagttttacccttcttgggtcaaaa

SEQ ID NO: 125414 - DNA, 3036 bp, Cannabis sativa
  modified_base (2177)..(2178): a, c, t, g, unknown or other
  modified_base (2980)..(2984): a, c, t, g, unknown or other
ttacattgaaacagagttttatttagggcataaaacccaacagaaacgagagcaagagtagcagcaaaatcatgaagaatcaacatggaaactccatgttgatggaagctgcactaaccacttatccagttcaggcattgcccttataacacttgggggcaacaattgcacacaacaattaaattcagcttcaaagcctcaaacaatgacgctgaatatgaagccttgatcgctggcctcaagctggtgcatgaagtacgggctgaccacctagacatatatagcgactctcaactagtcgtgaattaagtcctaggtgaatacatagctcgaggtgaaacaatgatggcctacttgagcaagatccaagacttgctaagtcagctcaaaggctatacaataaggtagatccccaaagaacagaatgccacaacaaatgagctttcccatctaacaagcaacaccaagaccgataaggaaaacttggtgccaatacaattcttgaaggagcgaagtattaccatccctgaagaagtcaatatgttggatcacaatcaaacattgatgacacctattacagtttacctccaaactcgagcgttgcctgaaaataagaatgaggcaaaaaagatgagaagaaaggatgctaggtatctaatcctagatggagtaatgtatagacagagtttctcaatgtcgctcttaaagtgtgtcaccaagattgaagtcgaacagttgatgatagaagtgcatgaaggcttctgtagcaatcatgctaggggcaatgcctatttaaaaagatactctgacaggggtatttttggccaacaatgattgaggattcgatggagtatgttcaaaatatgtgacaagtgccagagattcttgaatatcccaagagctccacccaacaagctcatgatgatgtagtctctttgaccctttgcattatagggggatagacctgattggtcaactcctaaagggaataggaggggtggagttcactgtagtcgttgtagactactttaccaagtgggcagaagttgaaccctggcaaccatcacctccgacaaattcctcgacttttttgtcaataacatcatatgtcggttcaaacttccacaaaagattgtgtcaaacaatggaaagaaatttgatagtgacatcttcactgatttcttcaataaacatggcatcatcaaaagcttctctgttgtggcccacatatcaacaagaccctgaaggatactttgaagaagcaccttgaagaagcaaaagggaattgacctgaattactcctagaggtcctatggttgcacaggactaccgagaagacagccactgggcaaactccattcgctctagcttatatctatgagccaattttacctgtagagctggtgccaccgtctcacaggtggacaacctatgaccacgatacaaacaagattttgctggcagaatcccatgacaaaatagaagaaagaagaaatcaaactaacctaaagctacaggcgtactagcaaaaggttgcaaggcacttaaacaaaaaagttaatgacacgaaattcttcttaggggacctggtgctccaaggagtattcctgaacaccaaagatcctgcagcaggagtatttagacccaactgggaaggcccttaccaagttacagagataaaaagtaagggagcctacaagctgagaaggtacaacgagaacatggagctcgttctcctaccaagatactacaatggacctttgtaggtactaccagtgaccagcttataaaatgctactcaatagtagtagttctaccaactcctcattatagattaaaagagctagtgctcaaggtcgttttggcatggctgcccatcattcttcaacagtggcctctactttgcatgtcaagtaggggtagctattttatatctagaagaaaaatttttattatgtaagcttgtagattcaatttatgtaagttgcacaccaacaaagaccaattaatgaataaaataactatgtttatgttcaaatatgttgtgtctaaaccacttgcttacaagactaacttcttaaagttattctttttttagttccacatgcgtacaataggtagaaccccaagaaaattccaaggcaaggtttatgaaacttggtgaattgcaagcgacnnagagaccgtaagtctgcatgctcacttggaaggcacccacaccatacaatgcatcgaactagcacagagaacttatgcagagaaattttaatgcttagtttaagctactaaacctgcctctaagtcaagtgcaggcatacttcagcttggcattaaaaatgcaaatcaagatacttacatgtcaaggcaataagaagatagcaaggattaaagaccgcctagacggtcacacatccataataaaaagcttcaggtctaagtagttttgttcaaaaacaaagtgcctataggccaaaagtacgaacatggaagccttaaggctgaaaataagtagtgttcaaaagtaaaaggctaataggccaaactgaacatgaaataaaatgtctatgctaatgaaatcataaatctgaaatactaataaactgaagctacatgtgtgcatgtgtagctggagctgaatcaaaaactacaaagtctggatcaccgaagtgtgggctggccatagcctttctaggttggccggccacctggtcaaaaccctagttggccacttccttagtgggtgggctaaccatgacctcgttgaactcacccgatgatgatccttttggctagatggtggtctgatttgcctctatcctactctttcccttcagctagtgtgctctcaaggaaagaagcatcccccatgtaagaaaaattagattcggagttgtgcagcttgaacccgtagatcatctcttaagtcaagtcgacatactcatcctttatggcttgctagctgttatagtgagatttctcnnnnntagaaactcgagaccagacccctatttggaggacacgtatactcagatttcc

SEQ ID NO: 125415 - DNA, 4690 bp, Cannabis sativa
  modified_base (3438)..(3443): a, c, t, g, unknown or other
  modified_base (4409)..(4420): a, c, t, g, unknown or other
ttttttttttttttttgagtttattcacataggctctcaatgaaagtaccatattgttaacgcagattttcatcaactaattaataagcctttttcgtaataaattaagcacaaaaattataagaaattcgataagaataataatagtaataatgaaaccatgttttttacatggtcttgcagttaactctgcatagtctatgagtctatcttattcaagatatttctggatacaaaattatagttttacaattagtggtcttttttttttctcaaagatttttcgtccctttttttgcctgcccctacttatagggatataggttggtagttattcatatttgaatttgaaatacataactattttcacaaaacgtgggctatgaccacgttccattttaacatgtgtagagctaaaaatctacataaccgtttgttattctaatcttcaaggtagtggacacttacgtgggataggagcatctcgctagaatcatctcgctttgtacatagatgaatgacttggtttattcatatgctttctagcaatggcatcagcaccagtttattgagaaaacttaagagctgctctttgaccataaggccttgtagactggacaatcatgtcctccatgctcccaagctattacacttagttatataatatggattatacgctaagtgttcaaacagtcgattcgcctcgtcaatacttccctacatgttgtgaggtagatgtctcgctatgcattgtccatagttccctcgggaatatgctttctgatgcagtatggtttctcattaatacacgaattgatagtttctgtatccttgtctttcctaagactatacagtcaggaagttatgaatatactctattaattctatatttaataagttattccatattgcatttaatgacataattattattacatctggtggttcatattccatttgttcaatatgtgtcactctctgaaatacagctgaattccaggtataacatcattcaaatttactcatcaaataaaacattcccatgtaaaacgttgcatagaggtgactcagggaccataaacctatattttaaagatccaataaacacttgattattatcgatctcatcaatagaataatccattttattaatcctataattactccactataaatatagaatggtactctttaacaatatagaattatatttacagatttcttacttataatccattgatataattaatatatgtagttcgctctctaattattagttcataattagagttggtcaaaattaccgtgttacccttctaattatctcttgactccttatgtaccattaatcaatgtgaataattaatttataacttattataaatttggatccaacttttaacactcccagaatttaaactaaagggaagtaatattcaatctgttaggaaagctaagattccactattgtataacatattcccagccactcatgctattaagctcccaaaacagaagttgtaagaatcatcttttctaagaagctttaatgggtgaatctaagaactcaatgaacacaaataggagttcttatatacttaggatttaagctgatctactaacgatcatcattgtgatatgaataaatctttattggtaaacgacacattaatgaaagatgtttattacatatcagtctaggcatgcacaatcgaattatacatagtacctttactacatgtgtatccacatatgtgattcaaattaaaatcacacacactagaagtatagtgtatagtaaactgtacttagcaattctatattaaagattcccattactttaatacactaccaatttgttttattcatatcgtacaatcctaattctcttgtatgtccttacaagattatgccttctccatatgaataaggaatttttagatatttatttattatactattataattaatgtatcatttatcttataattgtatttcatatattttgtaatatattatccattaattactagcttttaggtcataaatcctaacagatatagcaccatacggaggtgttgctcatgcacttcctctaactcagaataaactaggatatcatcaataaacataatcacaaagttatcaagaaagtccttgaacactcagttcatcaagtccatatgctgctagtgcattatcaacccaaaggacatcactaaaaatcatagtgcacatattgagtattaaaagtactggttctcgtccagagatggttcttctcgagccttcctatccccaacctctcgaggctgggactaaaggttcgcaactctgctcgttgcatgctaccaatggttggcgtcacttccaaactcttgggtctagcgactaggagcttctcacgcaaggcagctttgaaggtcttgctaaaaggagttatgaactcatgcatcaagttagtctctttttctccttcttgttcacatttttttccattttttactcctcttgatttgcttctttctcgtagggattgcttctctcctttgctactcaacacaaaacgtctcagcggctaaaatgcttgaaattgagcttcgtcagaccagagagcatagggacaccatggccgaaaaatggaacgactctaaatctaaactttctcgcgtaagggaggaggctgaaaagcaacgtctggctaaccagaagaagctcgaagaggcgaaggctgacaccaaaaataaggtcaatagcattgccaggagaaccatttaccagacctggtcacctaaccctgatatggaattcagctttttaggcgaaggggctgaagccatgcttgccttctgcaagaagtccaggaaagaagagcttggtgaggaagatgaggtcgaggtggagcaagaagatttgtcctagtctcttacaatgtaggcttggtttttaactttacctcttttgttttatttaagaaaatggccttttggcggagacaatggtttgccccttgtggcaatttttgtaatgataaattttctttgttggatggctaactttaccttttatttatttatcttttcatttattgcctcgcacctttatatttaaacttaatatgtttgcttatttgcatttttattcacaacgtaaataattatattttgatcaaatttaagatactttaagtaagcattttcattgatctcgttcttcctttgaaattgcttaagtagttattaatctactatgtatgtgcgcgagtagttatattttgctatgatctctattcgtgagccattcttatcagttttatatcgcgcgagtagtcatgatctaccatttataacttagtaagaaaacttaaatatactttgaataatccattttatgaattactttgtacaattattgattgcctatatgaatagttaggcnnnnnnttcatattttaggttaagtattatcttctcaaggaaccttggtgcctcgtttataatacatgcctacataatgcgagtcgttgtatagtcagcctcgcatgtagcttaatgttatttttatgagttaaatcacattttcaactgctacttattttttctttctgacgagaaaggttcaatttttgactttacattgtccatagacagctttaatcaattatttggaaaaaaaattaaaagaggagtgggtttgcaatatatcatatatttctagataaattccagttgatcataaacatatatatgccaatcaagtaattttaaagagtaaacctttgcaattacttggataatacttcaactttattaataataacaatttacaccacaaagagaaaatacaacaagtacataagtctattggtaataaggttgcaaatgttcaatattctaatggttctttattagcgagcggttaagctaagccaatttataaaccccgattcctactattgcttcgataacatagggaccctcccagttttggttaatactctagtaaatgcatctctcctgtttgcaaacactcgtctcaacaccaaatctcccacattaaagagctttttcttcactcttttgttgaagtatctcgtgatttgaagctaatatgctgcattagtgatttgcgattcagcacgtctttcttcaagtagatccaaggataacttaagagttcttagttttcttcttgattgtagaaatctcgtctttgggtcttaatattaacttctaccggtagcattgcttctgagcaaatgccaacgagaatggagtaggccctgctgttgttttctcggtcattttgtgagcccatagtacttgcggtagttcatctacccatctccctttcgcagcgtctgtaacaccctaactattataggcgtgttagcgtgatttttaacgtannnnnnnnnnnnttgctaatcaacgaggttattagaaatcgtgaataattaaaattttgcataattatttaaaacataaaatattacatgtataaaattcataaaattccggggatcccgtttacaaaatacaattacaaaagtttactattcatatacaaaatattttttacctagcgactaaacaacagaagccctgatgtcccaaggatcgtatgctctaggcctaaccgcctcgacatgtataatcttcatcttctccctctcacggctcctcaactt

SEQ ID NO: 125416 - DNA, 1332 bp, Cannabis sativa
taaaatagccctaaaactagaaacaagagtgaaaactaaccgaaaatatgacccgaaatttagactaattttagcctaacagtgataatttgtgtatttttagtcacttgtaacaaatttttggtgattaaactgtgtttaatgttgttaattatgatttatttttaccttttaaaatctacttttattaaaataaatatgacatttactttttagattcatttttaatttaattttatttaattatgtatgttttccatatttaaatagttttactacctagccataattatagctggatttattgtgtgaatgcactatttattgtatctttatggctgaaatattcttgatttcagctttgattttagccatttacgcatcttgtttattgatttttcgcatggcctttaactatttccttttgtatcctctatataatcttttgattaataattttattatataccgtatattaattttatttaataattatataaataccatttatatatatatttttgttaaaataatttacattaattttttagtaaaatattttatttatatgtaattgtaattatatacactaatagttattttgagattttaattttttaattttaatagtgtatctaattttaattaatagtttttattatattatattatagagtttaatagtgatatttaggattgatgacgagtggttttcgcaccattttttgatggttctcatgctttttatggttgtttgtgtcatttttatggtttgcccctaattatttaaggtatattgtgatacggtcaatgggcacaagaaatatttttttgtactcatgtcttctacaaataattttttcagatctgacagataagtgtttcaagtcttaatattataatatggattgttttaccatctttattcacattaattatttttctttaaattgtgtggtaataaagttttattttgttaatttgtaggtcagttttgaggagggccaattattacagagatttattgataagtttattttaaatataatttatttgagagttgttatctcttacttattgagaatttcttttattaattttaatattatcgctagagggttaattcatttttatcttattctattttgtagatattttggggatcattcttgatatatttatgagttggcgtgtagtatgaagttaaagctctaactctttgggtgtgctgtttgaggatgttatagctttattgcctaaatttctgggggcagttttgtcccatgtagctcgctctgagaatttagagacccatggcttggcaaagcatgc

SEQ ID NO: 125417 - DNA, 2724 bp, Cannabis sativa
caccaaactgttgacctcagatttagccaaccgatagaggagtcatatttcttactgatgcttgccacgtgttacaaaataagaacaaaaaagtaaataagacacaagattttataaaggttcagcccccttaattagcgggtaatgacccactccccttttggttgtattaataccaaagataatactactcagatcacaagtattgttgaatctgaagtggctctcttaagattacaatgtataagaactgccccaactcgattgaccattttatcaatctcccccagtccatgatcacccccagtccatccattgattatgatgtatatttccctcctcttaagaggttcgaaaaaactgaagagcaaggtaccgcttcccaccatccaaaagtacaaaatcctacaactaggaatgccgatggaactctacaaaaggtcttcgcaaccgaagaagtattgaattggacaacaaaaaatatgattgcccaaaaccatgtcttaaaacgagtagaaaaacaaatcacctgcacagagacaatcatcaaacaacaatcacaagatacgatcattgaaaagttgataaacaagattcaacagacgcatgacgaactcatgaccatcataaaatcaaattttgttctgatgtcattgttcttggtaaaagaaggtgaaatgaaaacccttaaaatctagtatgaatctctgaaaaagcaattttttcaaaaataatcaaattctacagggtctcaatcaacacttttgggaggaaatacaaacctttttggagcaaatacaccatcagtacaatggcaattctcaacaatcccaaagacttttccgacatcacctttctcgatctcttcacaagaagactcacttctttgacttaggcaaatgcttgacgaaactcaacaacaacaaaaaaccaaaaagggaaagaaaaaagaaagcatggataattcttctccacgagcatcctccctattggaaaaggagccaaatcaattcatggcccaacaaactgcgaataatcctattttttccatgatccaccaaacagatgaagcatttgacaatcaatcttcttcctctaaacaagaagagacttttaaaacttggtcccaagattcagatactagtaacgagtctcaagatttagatactagtgatgagtctcaagattcaaatacttctaaagatgaggtaccctcacattttatggctcaatctgcagaagaagcatactctcaaaccgagcctattgtcaaaagtgaggatgaaagtgaagaagaagaagtagctccaatgaaaatagaatccaatcatcatcaaaagagtaaatattctaagtttcaaacttttactcttgaggacattcccccatataaatggcgagaaagattccaagaattccatgtttagcttagcctggaaacataaaaactataggcacagacagggacaatcctcttgaattttgtgtcaagattcaccagaaacttgtaagattggtggacaagcttaggtgaatacatacagatgactttcttgcaactcccatttgtcgtgaatgccctaagccatctctatgttgaattttgtggccaagacacccaagtaattgaaagacatagagtagagtttttgaagctcaagtgttgttcaatggacaagagagacttggaaaagcattatagaagaatgactaaacgattctaccaaataggtggcattggtgatccaaatctaaagcaagccttccttatctctattctagagccactgggcaaagaaactttaaggttactctagatcgggaaaaagcctaacggatgctacaattggagaaattttccaactagtcctaaaggcccttaaaaaaatgtgctcccaaaagaaatttctctaggaatttatgaagctgtaaagaccgcttagtttaaattttgaattagcagataattagggtttaagtatggaaattatttattaattttaaattattaattaatggtgatttatttgaattcataatgaattttatatgttatatatatatatagaaatttcataactttacattttcagtgcccaacaacattagaacgcggtgtttggctaataaaatcacattctagtattttagtatagcggggcattatagttagacattgggaatgtcaggaatagtcgggattttagaatttcccaaaaataaccctaagttccctttttgactttttgagtgggaggggcaaaatagtcattttgccccattagtcttttgtcattttgtgactttagttaagttaataaaatcagttttttattgtttattatgataatattatacttagataagaccactttagtctcatttatttgaaagattagataactcttggaaaatacattttctctcaaaactctctctcattttcgaaccccctagaccagctagggtttacttccattttctctcaattcaagcaagtttctgcaagattttggagtgcttaagctctaggtaaactttggactttttcttcttgagtttcttgaattttaagaaagtggttatgcatgattttgtggtttatgttgctgtagctactggtagggtttgatgttgtttaatgttgatttgagcttgtagtagtggctgattgaaggtttaaccaagctttgagttttgaaactcaaacttggagctttaatg

SEQ ID NO: 125418 - DNA, 1131 bp, Cannabis sativa
aataaattaataggatcataatcctacttattacctgattaactcataatataaatataagccctaattatttaccattaggcttatcgagatattacacataatctgtaggagtcttcaactagcttccaggaggagttatagttggagctaaagattgtggagtgtgatttgaactaccgacgattcttgacggtgcttaagggaatctaaaaagcttagatgtatgcttcctccaaatttatgataccctaggccatagataagaaattggacaaggtgtaggacctcttcctttgcagctcaccccacagtaaggatctaatggatattctggatgttagagccaataacttcatatcatcattaaattttgttctagtcactgcttccatcatcctctaaatataattcttgagtttcttctccctattaattgatgttagtcagagaactaacctccatatcgtagtcttttgtcgctacgaattgtttcttaaacatggattgcaagtctttccaactttgaatggatttgggtggtagcgttttccaccaatcttcaacgaacttcgttaaagttaacaaaaaatagacatttctcattgtcacctaccttcacaacttgcattagtctaatatatttagacaaatgggccctaagtccgttttgctttcatataattccatttgtggcattctaaaatttccaggcagggatgattctattattctttacacacgcttctagatcctcctcttatgaatcagatatgatcccactttgtttttgggctagatgttccgtgagcttagtcaatgcggctatttgatcttccagctgcctggtatgctcatctgggaactcgcgtctagatattctatcattaatactatttttgagatcacctccgtgaggattagctttctcacctttagttttatctctttttgcattcaaacgttcctagagatccgttgttgacatactgtcttttgggaaaatctcctctattccttcactctggttaatagaatcactagggtagtttttgtgacagtcagtactctcgtgatccgtaagggaaaacagtaggtaagttgtgaaatcccacactacctggggaaggt

SEQ ID NO: 125419 - DNA, 2096 bp, Cannabis sativa
ataaatatatatatatatgaaatacatctaatggatagaaccgatccaattcaacatccaatggatattggatcgattagatgacgggatttaattggatctgatcggatgataaaatctaacatccaatatatgattggatcagatctagataggcctaaaaacattggatgtgatccaatgaacacccctaataacacccttaaggtgtggtgtaaccattgctctggttgcccccaataattatattccaagaatcatatcaaaatcatccaacaaaactattataaggttgcattgagactcccaagcctcaacattcaatgtcactgtaacagatccttgaatcgattttgcctctgaattcattactttcaatgtagtcaaacttcgaacaaaatccagactaagtctctctacttctttttgggcaccaaaattttttgtggtccctgagtccaccatggatttagcttcttttccattaacgaattctttcacgtacatcaagcctttaaactaacttattttccccatagtgattggatttagaagttgtagtggcttcatcctagaaggcacttcttgatcatcaccacccttggcttccttagcaatcctagtgtttaacttttctttactatgacactcatgtgccatatgaggactattgcaaagaaaacacccaataccctttcccttgttggttgtccaggaagatcctttctggttgttttcaccatatctatctttcttcttaccattgtatcttttcccacccttggacaaagatggtttatttttgttctttttccctccaattggcttcttggaaacatctccctatgaatttgggcagtgttatacttataatcaacaagtttcttggcagccacaattgtcgatggcaagtccaccactgcttgctatctcagttcagcctggacccaaggctataatcgtgataggagttgaacatcttctcctccttggatattttctttatgtccagtaacaaagaactgaactccttcacatatctcaagccaaaccagtgtgtctcagttttttaagaaattctagagtgacccatgttgtatttcatggaaggaattgatcctttaattgtttctttaacacatcttaagttttgatcttaggcccacctgagcatgcatcctcttccatctgagtttgccacgacaatttggggtcaccctaaagatacatgctggtgatagccatcctctatgaatttgggattctcgtggccttgaaatattgtttgacgtgccaaacgaagttctccaactcctttgagttttggcttccattaaaagccttcggttctgtaccttaattttggatggataagacgaagaagactcagcactagtggatggattcgccctgaccctcttcagtagtttaacgtccgaatttagagcaaggaatcgctttttcactgaatttgacaggtctatcactttcttcatcttctccccaaaatccttttccaactcaatcattgcctttccacaaacagtatcttggtcaattgcatccttttacacaacatggaccaattttttaagagcagaaagttgctcaatatgttgtccccaaggacagtcgaactcacaacatcatcgtcaccagaagcacccactaactccttgagtttgtccactcgagtcaccaattgagcattcgtcaccatgacttttgctttcccaacacgagcaaccacgctttgataccaatttttacaaggtaagtttctcactataatttttccctactatggtctatattcccgaatctagtcagccagcccaacactcaattgcacacactcactcacgttcgaggtttgccagcactcactcaacaacactcactcgttatcaggtaaataaacacaagcacacacaatgtatgagaaccccttcccaaccttattattaatcacaatatcaaggaatataattgttcaagggttggacatcacaccatgatggctccttcgcatacgagcatataattaatgttgggaatattttaccaggatctatttactaacaagtatgttgaat

SEQ ID NO: 125420 - DNA, 1645 bp, Cannabis sativa
  modified_base (328)..(339): a, c, t, g, unknown or other
  modified_base (483)..(486): a, c, t, g, unknown or other
cggtaatagcctaatcctcgttttttgtattaacccaagaacaaggagaaaggttctttttcttattgcttttacaacaatatctccgaatatgagttcttagacaatatctctcaagtaaaaatccttcgaccctttgcccagtgaatatgtatcactatttatagggctatgagcttggaggggaagtatttcccttctcgttacaatggatataagcacaaagattgcatagtaaatacagaatacacaaattattggatttggacagcttgccatatctctgtaatctggtccccaagttatagggatttccttgatgactcannnnnnnnnnnntgaattcgctaagtgttggtcgttctgcacggaatgttgattgctttgcctcgagcatgcatatgaggtatcttgttcggattatatcttgtgaacagatacttagagtcgattccacgtgtcaccatcatgtgatgccacgtnnnngtgcaaaaattgggataacacaaataataattatcctaattatatattaaaatatttcaaattccaggagcaaagactgtcaaccttcgcgaggagcatggattgcccagaggggccaaggcattctgaaacacggtgaaccgagttacgcttttgacccacagaagcttcacccatacgtgtcagactacggacctagggacaaggctttatcgggtacgacattagaggttgtcacccacgacacgccatcgtacaaagcatgcatatccttgtgtattaggccaaatgatccaacggctagggataaaggaaaattcaaaagggagaagccctgaggcaacacacatccgaggcccaacttgtacaatctgacaaccttaaatgcgatataggaaatacgccacctaccaatctgacggtgggattttgccccaacaatgatccatataaggtagcacatgcaaagaagatggcctataaataccctagaaaaagcacaagaggaggaccttctctttgggatcgaagacccattcttgatcatcttgagaaaacacacttttgtaaccctactatcaactccagaatattcctactaagattcctcttcttcaataggaacacggtggaaaggagttctagtccattgtatctttatttgtataaacagttaccagccaaagagcctaataaaatggagtcgtggactaaggatagttaacgtctgaaccatgtaaaaatctcttacatgttattttgctatttactccattaatactttcttatgctttaaaaatatttagttaccgaaaaactcggtaaacaaatagtaatcctaagatgacggtagattaaactaaaacctaatttaccggtcatctaaacaagtttaaaacaataatcataacattgaacatagaagaaaagaagcaatttgatatataatggaaactagaaattaacattcaataatgaaattaagaatccatgtctcggtttttgaaataatcctttactaaagggaaactactcagaactagacattataacgataatcataataaatagtaagagtttaaggagaaaaaaaataagtatgatgaagaacacttcgaagtcgcgatctccgtctcttccttgctctctctctctctct

SEQ ID NO: 125421 - DNA, 1312 bp, Cannabis sativa
tttgaccttagtccaactctaacctaccatcctttgttacaaagtaaagaataacccaagtacttaatagtgaatttaataatgaaatttgtaccctcccaatacaatcaatagcttactatgatgttttgcatatgtattaacaacaagaaaaatagaccactttaagtcttggtttaccaatattagtgtctttttgcacaagtgtcaccaaatacaatctgaattgtgatttgggggactacaaccaaaccaccaaccttagttgccatgaagagccaaaatcatttgtattaatattagtcacagtatcatttcatcagattttcttataattaattaattaattattttgaaccggatgctaatccgtgtttagtacggatataatcaagaaaagtgaaaccctataattaattaattattgatattttatttaacagctaagcatatgtatgtgccttcttaatatatttatatatataattaaagctagaaaagaagatttctttgtggagggtttcttgttctattactttctgttatttatttattttttgtttttatgtgcatagtgattgattattagtggtgtccagtactttctataagtaattttctacgattgcttagcgatattctctaaaagttattttcttaagttatatagagtctgatatttaattacgccaataagtacagtatgacatcgaggagggtattagacacaagtgtcttttagcatttattatttttagagttttttacggctaaaccctctcaactattaatccgcttgcacttaaccctcaaagctcaaattttagtggtaaaaccttccatattactgaattgttaacaaatttaaagtatcatctatttttacaattaactgccaacatgaattatttatggttacacttttatacacgtgacacgtttatattagtgtacctaatattattatgtaaaaattacaaaaaaaattatttcaaaatttataatatatattttttattttttaaatacttttttttttatttttataattttatttaattttaaaataaattttaaaataataatattaggtgtaccaatataaacgtgccacatgtataagagtgtatacataagtaatttatggtagcagttaattagatgacactttaaatttgctaacagttcggtaatttaaaaagttttactatcaaaatctgaactttggagaattaagtataagtaaaataatagttagtaagatttaaccacaaaaacttttttttttttatatatatatttttaaatgtga

SEQ ID NO: 125422 - DNA, 821 bp, Cannabis sativa
aaaactgattaaaaaaatgttaccaaacgacaccataacttaagtattattactaccaaaaattaaatataaatatttatttacaattgagagttaaacttgattatttataccgtaaattattcttagaattttgtaagttattgaagagtgtggaggtttcttaaaatttgccactgagtttcattataaaaaagaaatcttaaaaataatctactatgatacatctcaccatattaaatatgcacctgcagcaatattcacttgatcatgtgagtcccactctaaaataaatttccacaggactttttttaattccttacagtatataggaagagaattttttattctaaattatcacataataatatgttatatgatcattataattctcccatcaagtcagataaatatatgtcacatatatgattaaataatgtgtatataatattgtatatatatatatgtatgtgtatgtatatatatatatgattactccttttaggagttacgtgaagtgaagtaagacagtactgagtttcttttattttgtttgttatatttatttgagttagtggggattctcttagcttattccctcctttcttctttttgagtcttctggtttagagttggtgagtgtgtgttgactttggtctttgagttgagtttgtcctttcttggggtgcttttgaatttttggaattttgttgactgtctttatggctttagttaatgctaccaaacaggggatcaaagacagtgacggacccaaaatttttaatttgtgggggcttaattgttataaaaatatttattat

SEQ ID NO: 125423 - DNA, 574 bp, Cannabis sativa
taactaattgtttgatatcatatcaatattgtattaggcacattaattaacgtgccaaataatagtgcttagttcagtatcaaatcttacatattttttatttctttcaaataatgtccaacaaattgtaatttaataattatgaaatatgctaataagtgatgactatgcttaataacaatactctatttaaaaattaatttgaatataaaataaaaattcatgtaatacaaaactatttttattccaagctgatgtgatattttttttaattgactgccctttttatttgaaagtttaagaggttgggtatgtgtgactgtgtggggtcactactaccaaagaaagaattcccgtcaacataaaatcgaaattttatgaagaccaacactattgaaattgtttgtctattggaaaacggacgactataattttattgtcaccagtttaaaaaaaatcataatacattatcgtcaattttaatgggatgcttagaagtcttttttcgttataataataataaaaaatagtcccaaagcttttacccttggttctctctctctctctctttctc

SEQ ID NO: 125424 - DNA, 1487 bp, Cannabis sativa
cggaaaatggtaacttttcaaccgttgggcaaagattcatttatttatgttggatcggttcaagggtctcgaatcccagttatttcagttttaagggctaaaaatttacaacacagtggatgtgtaggattttagcggtcgtgattgactccaacagacctaaaatatttgggcctgaggcagtcagagttgtaaaagaatttcttgatgtgtttcctggggagttgccgggattaccgccacaacgagagatagattttataattgatttggcacctaaaacctattttgaaagcacaatatagattggctctagcaaaactcaaggagctaaaaatacaactttaggggatgctcaatttagggtttacttgacccactgtatcgccttggggagctccagttttatttgtgagaaagaaggatggttccctcaaaattgtattgattatcaagaatttaataaactgacaatcaagaacaagtatccattgcctaggattcatggtttgttcgatcagcttcaggggaaaactacatttttaaatattgatttgcgatgtggctatcatcagctaagaattcgagaagaagatattttgaaaactacattccgaaccagatatggtcattacgagtttctcgtaatgtcatttggattgacaaacgctctagtggcctttatgggtcttatgaacagagtattcagggatttctttgatgacatccttatgtactctcaaataaaagaggatcatgagcaaaatctctgaatgatattacaacgactcagggatcataagctgaatgaaaaatttagaaagtgtgaattttggttgttggaggtgtcctttcgaggacacattgtcagaaaaagatggaatcatggttgatccaggaaagattgagttagttaaaaattggccgaggctaaaaacagtaactgaggtgcaaagctttctcaagttagcagagtattaccggtgttttgtcgaaggcttctctaagatctctatcccactaactgagttaactgaaaaaaaccaacggtttgttttgtttgataagtgagaagcgagttctcaagagttgaagcaacggtcaataaaagcactggtgttagctttgccatcagatcaagaaaagtctgtcgtttattgtgatgcatccagacacggtctgggatttgttctgatgcaagttgagacggttatattatgcctcccatcaacggaagtattatgagcagtgttttccaatgcatgatttagagcttgtcattgtagtttttgctcttaaaatattgtgacactacctttacagtgaaaatgtgagatttatactgatcataagggtctctagtatttattcactccgaaagatttaaatatgaggtagagacggtggttgcaattggttaaggattattgtgacagtcatcccgtgatccgtaaagggaaataccgggtaagctgtgcaatcctaca

SEQ ID NO: 125425 - DNA, 992 bp, Cannabis sativa
tctaatctttaattgataacaaatgagattatattgaaatgggttttatttagggcataaaattccaacaaaggtttcttcatagtcgatgccttctttttgtgtgtagcctttccttacaagcctggctttaaaggtcactaccttctgttcaacatttctcttcttcaaagaaaatccacttacaacttataggtgtaatatgttcgggcagagtttcatattctcagaatatattagtgcgcataaaatctatttcttgatccatgtaattgttttacttgtctgagccagggtcttccattgcttctttataagtcaatggatcgtccttgtctatgtcagagacaagaacaggtacttcatgttcatagcagacaaactatttcagaaccctcccactacgacaatgtaccaaggtttcctttttagaaatagtggtgacaactattagtagttcaactgatggtactgaatttgatgaataaaactttgcttattttttatttccttgataaccacttgactgcgtggcttgtgacttttcatatagtcatgttcaagaaaagtagcatttattgataccatactttgttgtcttgatgactatagaagtaggcaccacgagttttctccagatttctacaaacaaacacacttcagttctgggagcaattttcccaatcttgggtttaagaacatgagcaggacaacccaaatacataaatgtttcaaattgggttttgtcccattcaataattcctttggagtgttacttatgctctttgagggtattaaatttaaaatgtaagtagccaccagaagtgcgtatccctaaaagcttagtggtagtgttgagtaacacatcatcgatctgaccaagaatcgatatgaacaaagcgtctatatcaaacttaccgtttactataaagaactaattcatatcataatgatgattaatagtagatcggcctaaatcttgagtaatcatg

SEQ ID NO: 125426 - DNA, 1932 bp, Cannabis sativa
aaaattttttttggatgccgaaacaagttaagggtgcaccagtacatcccttttaagggggtgcattgtagaatcaccctattatttttatggggtaaatgcttaggcttaattttgagttgcaaataaatattggcaatagtaaataagttatatttttaaaattttcataagtaattgatcgctaagtataccgtcattattcacgtattttttttattagtatatttaaattaatttttaaataaaataattaaaatataatgactttgactaattagagattactacatagttattaacttgacatttaacggttagatacttacggaagttttaaaaatataatttacgtattattaccgttaaaaattaaacttaaatatttatatacaactggaagttaaacttgagtaggagtgtttataaaataatcaatctaatttaatctccatgatcaaatccaatctaatttgtaaaatttggatatccgtacttatacagattggattggattgaattgaaaaattcaaaatttatatttgtgcagattaaatattgattgacatgtaaaaataattgatgcaatttaatctatacatatttatatatactattaaaaataggctaattacgaagttcctcacttgaattttgtggtgtgtgactcctcaattaaattttagtggttgggatgagaaatgatgtactttttttatcctatgaatgaaattgtgaggctaaaagcaagggtattgtattttagtaaaaattggaaaccgactaaattaaacttttattttattgtactagcttcactaaattaattgttggtcatatatgagttgcttttttggtcttttagtatgaaattatgagattatcctttgaaaggcattatcctcaacttccaaaagcattctgtattttctttaaatttaaagtataagtatgtaattgtaattttgaatcagacaatgaaataatagctacaaaacttgctaataaatcaccaacagaaatgcaaattaattaaaatttaaaaattaccaaataaaatttaacatgtaacaaacaactaacagaaaacacagtaaactttacaaatgatttttaaataaaaatagtatatatggacaagtctatagtgcatctctttaaatgaatattttggtagaccccttatctgtttcaacatacagaaaaaaaatttagtaatttttttttatgatcgtatatgttatagttatttaagattacttataaattttttaaaaaaatttcagtagtttataatattgaaaataagatttatatattttgttatatgcacgattattttttcttataggagtaataagtaataagtctacagtacaccctcttaaaagagtgtttcggtagatctcctatttgtttcggtagatctcctatttgtttcggcactttaaaaaaaattgctgattttttttatgatcgtgtatgttatagttatttaggaccacatgttaattttttaatttttttgaatagtttacaatgccgaaataaaatttaagcatttttttgatttttcttatacgcgtggttaataactgtttaaaccttatttccagcattataaactatttagaattttgtaaaaatttacaagtagtcctaaatagctacaacgaacgcgatcataaaatgaaattagactaaaaaaaaaagttcaatgctcaaacagataaggggtctaccagaacgactctttaggggggtctactacaaaatttttcattgttttaatctaatttacaacactgtaaactaaactgaaatttttttaaaatttataagtggttctaaatagcaacaacgtacgcgatcatgaaaaaaaaattagactaaatttttttctaaaatgccttgttgacttcgcttttagcc

SEQ ID NO: 125427 - DNA, 1017 bp, Cannabis sativa
  modified_base (973)..(974): a, c, t, g, unknown or other
tttctaaagatttttgggatcccaacaatttaaaagtttaaatgtattgcaagtttattttcattctatttgatataaaagtttaaattctgcaatattttaattagtaatcccgattaggagattagggtttcctaaatattttgggtagcgtgcctaattatttagggcgttacagaaagaagcttcaaattgagaaaaaagtgttctctggagaatgtcaagattggaaagataaacagagatgtgatgaaaccagcaacaatgagtgcttcatcaactcccaagatcacatctatgatcatatctcatgatgtctcacgagaccgagtacgtgacatgcttcatgaggctttgtccaaggactctagtgaggcagatggagatatgttggatgatgataatgcctgcgatcatattcgggttgcagtgactgtggagtcagtgttgtttgagaattggggtggtgctactggtgcacagaaggtcaagtatagatccttaatgtttaatctcaaggatccaaaaaaccatgatttctgtagaaatgttcttctaggacaagtcaaggcagagaggcttgtggacatgagcacaacggagatggcaactgatgagaggaagcagcaaaataaaatgcccgaagagaaagctttattcgattgtgagcgcggtttacaaagagaagcaacaactgatcaattcaagtgtggtcgttgcgagaaacgtaggaccacttactaccaaatgcagatgtgaagtgctgatgaacctatgacaacctacgtaacatgtgtaaaaggcaataacccttggaagttctgttagtgtgagggagttcctcttaggtgtttttgactagccagtgttggcaatttgattcatctgatgatataagtggcagagttgcccccagttagatgtatatgtcttgagtcaattgtgttggatatattttaccaagatctagatnnactaacaagtatgtttcattaaaatcctaatatgaattctaaa

SEQ ID NO: 125428 - DNA, 2113 bp, Cannabis sativa
gtgagagcttcaatgacatcaagggcattcctttgaagctttacttctatgccattagtgagaacctgcaaagttaaatattataggagaccccaatatcaaactttaaacagtaaaagtataatgctactctagttggatcaactttaactttataaaaaaaaaaaaaaaacaagagaaatttatctgtactgaacatatcaaaagaaaacaaaggatagaagaaaaaaaacttacaaggtgtagaagggaataacaactaaaaatctatatcaatggttccttcatagtataaataatagtactgagcttctttattagtttaaacttttataatcaattctatctggtttataaattttaaaaccgatccttcacttcaaaggttaatttcctgaaaaattatcaaagctataaatacaatgttgaacacaatacatgtaaataaagacataaacaaattccataaataaatactataattctttctgaaagtacagtatagctaaaaatcttatgtcaacaaagatagattaaggaaaagaaagcatgatgtattgtaaaggaataaactagttgaaagagattgagacttaaataattcaacactactaaataaatcgatcaaacatgcatttccacaaacacaaaacgtgcattaaattcatttacaaggtaaagtctaccagagaatttgtactctaaactggacaccgtagtcttgggaatggatgaaactctagaacatttagcgattgcaatatctgacattggtgtgtcaggaatgactgtaaatacttctacaaagtaatccttcaaagagacatttcaacaaacacttaaaaataaaaaaaacttatgtattcagattcaatgaatgagtaacaaaacataccagaaaacttgttattctgatcggaaaccttagcatgaaaatcgaatgaggctttaccagaggagcacttgaggattgcaatgtcagacattggcgtctcagggatgacggtacaatctacaaaaaaaaaaaaaacaaaaaacacatcacagaggcatttccacaaacacaacacagtgcataaaaatcaacacataggcatcttagtctggggggcaaatgaggatgtatcaaaggatttggggattggcacgtcaggcttcttcggagtggggtcatcgtcgaggaggacgatggtgggggttggggtctcggtgccattttttcaagagcttacgtttgcgctttctggagacactttggttctgaggtttcaccttcagtttccgactagatggatctccatgaatcgctctcttcctctctgcaatttgagctctcttcttcttctggatcacattaaactttgccatctctctctgttactaaaccctaaaaccaactctcacacccctaatttctgattccttttacttttgttttctgctgctcgcgaggcaaagaacgggagggtttggggctcgtcggcgatgaacaacgatctaaaaccgtggtttggggcgaagaacgagagggtttaggacaaatgagagggtttggggcgtgagagagagagagagagagagtaatcgtgatctgaagtgttgaatttgggcatgagttttattataaatggccttccccaacggttttgaatcgtcggtcaaagaatgcgccactgttttaaatcgtggccaatactttacccgacggttctaaaccgttagtatttagtttattttttaaattttttctctacatttattaatcgtcgcctaatttatatgactgtttaaaattgtggcttatagtgtactataggcgacgattttcaacacttacatatttttttttagcaacggacccaaaaaaaagcgtgtttggaaccgtcgcgaattatgctttttgtagtagtggtactacaggtacgcggctactattattcaattccacacatgatacatagatttcatgcactttgattgtgcgtgtgatatctcatcttttggttgtttccactttcttctgcaaatatttgagtggaaaataatgtcatcgattatttaaaattattgcattcacttgaaggaatgacgttgaacaagtagaacattatta

SEQ ID NO: 125429 - DNA, 1438 bp, Cannabis sativa
  modified_base (1383)..(1404): a, c, t, g, unknown or other
gtgcaaaaatctaactctaaggctcattgtatagttcggccctatagttgatttaatcccatgtcttctatttaaccccatctcattgtaatctaacactaagtgatggctatataaaggaagtgatgagagagagagagagagaaagagagaaaataagttgattcaaactcaaaaaaggctcccatcttcttctctctttatgaatataaaaatttcataacttttctctctcagaatattgttcaaaggtgatttgagtatcagcccacactattcaagttgatacttaggcttttgtggaagactgtgatgaacacaatcgaaagggaaaaggtctaagtttagttcttggtaatactctgcaacagaaaggaacaagggttagagaactgaacaaaaagagacaatatattcccctacaaccaatgtaagggtttttagatttgaggtactcagtgcatgtggtatagtaatttaaactaaccctaccaaaactagtacatttgaggtacagagtgcatatggtaaagaggttaggaggttcaaactaaccccaccaatactagtacattagaggtattgagtgcatgtggtaaagaggttagtaaaacatcaaaggggtatgaactatttgtactcttatgaagtatgttcaagactcgtacgcattgtacatgtgattatactttgtaattgggtgtttgggtgcctaaattacaaaggcaggttatatgttatgtttatgctttttttactcagtttgttgactcatagatatgttcttcatgtgtaggtaaaggaaaggagaaaactaaatcaacggtgagtgtggagctccatggagattgtacatatggggacgattagacctagagggttcagatttttaggaagctcaattatattagtcgttgggagacatcttttaaactgttgtattttataaatgcttgaaaaatgtatacgacatccagagtttgtaaactttatattttttttatagagtgaagtttatataaattttaaaagtttttgttattcttgtttttttactaaagcctttgattagcaaaggttagcacggtaatttaaaaatcaatgtagcacgcctaagctagtagggtgttacaaggcatctatgctctagtgaggagcaatcagaccaacttgcctaaggttaattgcttgaggtcacaagcttcgctactttcaagtcctctggaggaaagcctcgataaaaggcctccctttcaaccaagaaaggggtagcaactgaacgtgtagtgttgtctaataatgaagaaaataattttttatccaatatcaaactaaatgatgaaagagaattggatgttattgatggaaattattttaccaggnnnnnnnnnnnnnnnnnnnnnntgtttattaacatcctaaatatgacctttctaaa

SEQ ID NO: 125430 - DNA, 819 bp, Cannabis sativa
tggtggcaaccttggattccgtggctagattactcggaattcagggaaaccatggagatggctcggaccaaagctccatctttatgtagggtggcagaccttatgttcagaaggagcaagacctggaatcgtggcttcctgaacttcgtctttggaagggagatgggagatcgaattagttctatcgcgatggccaaagctctatggtttgggggacccttccctcttaaacctgatgtgatccctggtgcaacgcttcccgaagtgttttgttccttcttgcacttattagaagggtctttgaagctgccttttcttatctggatggcctcaatctttgaaactatttggttgtggagaaatagaattcgatatgggcggatagtgacgatttcagttgacgagatgctcaacaatgccttaaaccgttttgcggaaatgagtaatatttctaagtctctccctaaacaaaggcttactgtctctaacagtctcccagttccgggagttgtttcgaaggtgattttggcagatggttcgtttaaggatgggaactttggagcagctattgtggctattgatgatgttaacaagcagtggtttatttgaactatcgctggaagtgtggattccccgatagcagcagagcttcaagctgttcacttagctttgctttgggctaaggaacaacagtgggaagatgtctacagtttctctgattctcaggtggtggtgaagtcgttactgcaaggaatttctccaagctggaaatgttggactcttttctctagcgtgctaaatctgaaaaatagtttagtt

SEQ ID NO: 125431 - DNA, 1249 bp, Cannabis sativa
aaaaaatatacaaaatataatatttggtccaaaatattatattcttattttaaagaaataaataaataaaataaccaaaaatggactcagcaatgaatcgaacccaacacctcaacaatctctacaaatatatgctttcttgcttcccacttctgctacagctttctctaaaaatttgttgaactaaaagatatatatactcttttgtgtgtatatatattaatttaatttttcgggggcctccaaaatggtggggcctggggcgtatgccccggccgccccaccctctgaccggccctgatcactatgcttctaaagattaaaatgttgtaaatgtttgtgatgtacttttgtttttttttttattttaatcataacatagcatttttttttatgttatcgttaaagaaaagaatttcatatccaaacttttacatattgcacaattttttttaagtatgttagatgatactacaataacttacaaattgttctaaataatcacaacgtgaacgatcataaaaaaaaaataataataaataaataaaaagcttctcttcaatatcgaaatgaataggagtgtctactaaaatatccaacaataattttcattgaatgaataatggatcccgtgttagtttttatggtccatatcataattgaaaaacataaacagaatttattaaaaatgattatccaatatgaaccataatctcaaagaatctcgacataataatacatagattaaatttaaactacatgaaaatgaaacaatacctcttgtagtctattaggagatcctcgattcttctcgtataaaatattcgatcatccaatccttgttgtgaacaatgatgaagacttcacaccacagtctttcagatcagtcttaacactcaggataagaatgagtttataaatatgattaaaagaagaatttttatcacaatgtgtactcaactcatgagacactgtgattataaggtgaggatgaaaatctcaatcacaagaagagagagagatttcgcaatagttagtgagagagagagagagagagagatttcaaaaattctatatggaattttctctttatattttctcaactgtatatgtcgtattatgtcttacttattatatattacttataggggtgttatgaagtacctcacctcatattgaggttttacacacctcgcatgagacaaaaaaaattaacattgtacaatttttttagtttttctagacttac

SEQ ID NO: 125432 - DNA, 1139 bp, Cannabis sativa
gtaaaataatttccaacacctaaaagcttcatccgaaaacattaaagatatggaagcttgcgcaagtaaagtgaggccattttcaactatatgcctatgtttacgttcagctaaaccatttttttcatgtgcggtatgacatggttggctatgaattataccagcttcttttagtgtgttaggacatggttggtcgcagtgtgtggccttcaggctcatgcgcatggtccccagttgcatgcggggtggtccctgggtacatgcgcgtggtccttggttgcatgtgaggtggtccctaggtacaggctataggagagtggttgcagtgtacccttggtcgggtctttaggctttacaggttcattgttgtcgctacttgtacctcttttcttttaatcttcagaaggtgtggttgtacgctcttccttttcatgccttgtcctttgattcctctcccaatgttattcttatcgtcacgcattcacctctctccttaccttcacaacccccctaaaacacaatcacacaatgcacacacggctcggtgtgagccccctatcccctcgcaccatgccaagctcaccccttccccttcccacagctcgcacaccgtacaccactcacccacggctcgcatgcgagcccccattcactcgctctgacactcccccgcacacccaggcacatggcacccatccacacatgtatggccttctccttcttttgccagtgctctcttcattggatcactacagtactaaacatcgaatagcatgggtgctccaccgtgggtcgaacagatgctccaccacttgcataaaggctccacaactcacccgaatgcccccggctcacccaatggctcatgggttcacacaacatcccatgggctcacacaatagtcgtgggctcgtacaacagcacatgggctcgcataccaagttgtcacaattcagcagtcttagtattttagccataactctcttgatatatatcgaaattggacgactcaagatgaattggaaagatgaggtaatgaccgctttagtaagttggattagtaaaggcaattagcactaatttctgttaattttataattatttatgaatatttatttgtggaccccaatattagaaat

SEQ ID NO: 125433 - DNA, 893 bp, Cannabis sativa
agtacggtgagcttatgggtcgtggctgacaatttaaagtctgatagaaagctttgagccagatggacgatggccagggatcgatcatgcctttgattccggagtgccttgttcctgttgtgccaaataaaccacgcaacacaaaggaaaaattctacatcttccttggttaaagtagtataaattatataaacaatatcatggaaagaaacattaaaagaagaagaaaaaatataagggtagaaaattgttcatttccagattcttcgaacactcttgtagaagaacagggcatgtgagacaaattcatcatcgataccacaacgagcacaaattgggtattgaataatcttcctaaaggccaagttcctattggtgggcaaggttgaatttgtggctcggaaagcaaaatgtttcaccttgggggcaatatgaaagtgccacaggtttatccaccaaggtgagggagaagaggaagagggaatgtcaggaggggaagcagacgaaaagctaagatgataacccgtttttaccgaacaggttcccaattttctgagtttctagatcaggtcgtcttcggaaggatgaagggggaggggaatggaaaggatttcctgaataatgtgaggagggaaatagtggctaagacggctaaagtcccatgtcatattatcattgatgaacgaggccacccaattcaagacggggttaataggactgacatgattgtaaccgagaatccagggatcatggatagtggatgtgttctgcccattgctaattgtcgaaatgagacctgttagtgttattattttgtgacagtgtatgttctgttcaatgtctagtcgtatctggatttttagactgttatatctgcactaacgtttgtttac

SEQ ID NO: 125434 - DNA, 1924 bp, Cannabis sativa
aaagtacatcacgggacaaaatcgtgtcccattattattattatgtgaggtgtcaattgtttggttgatggccctaggtgtgtatttttatgttttctttccctttggcacaactcgaaggagaatgttgtactactccatgctatatgttctgtctatcccaaatatcaaaaaaacaaattgaattggatgtaatcaatattcaattatatttattttatatattttctctcatgtttaaatttataaaatatatatatatatatatatagggtggaagagggggtcacttcatcagatcctcttggtgattctcccacattctttgatatataatatataaatatatatgtataaatatgatctataaagacatataatatactataattataggccatgaaaatgacttgttataaagagccaccatatctctactatactttttgcaagagcaagagaaagattggaatttagatgtatcaaattattattattttaattttttgttaatttggcaattattatatacctatctatgatgggtattgtaatcattttatttatttttaattaatcatgtttatctatatatagaaaaaaaatcctctcctaactattagcatctagctctttagcccctatttaaataagaacttcacttatactacatttatatataaagttgatgtatatagatttttgtatttaatagtagtaaatatacatttaatgaagagtgtctatattctctcatatttttatttttttgattgtaaatgaattaataatgtttttgccctttttttaactaagttgtctctttttttttagatgattcttttctcgagtttggtcgcacagtcttccgtccaatttactctaattgtttagtatcgtaatgatccttaaatctttttggtttttttttttcttaaaaaaagtatgtatatactatagatatagaaaaattaataatataattgttaacttaatcatccataacttttgcttaattacatgttgggatgtttttaggatagggcggtagggctttgctcaatacccctcaacccaagaggtctttattttattttattttttttaaaaaaatcttttttaacattagcctataaattttgcttgatttttttttttcttctaaaacggtttataaaataggataattacataaaatattaatttttataaattttttacatttttacatataatttttttttatatatatatatccattttacagtattatataaaaacacaagaaaacaccaaaaaaaccatataaaggtaacaaaaaaactacatcagaaaatatcaaaatagcataaaaaaaaaaataatatacaagtaacaaaaaatcgacaacaaaataataacaaagatgataacataaaaatacataaaaaaatcgtattttatataaataaaatctaaaaaactaaacatgaaaaggtggccattaccaaggctgtttggtgtcgtcttagattgtccagatatagatttatcttgtggtaagtaactcattcttatcttcttactacagacaatcttatcaaatgtgtaggttttttgtaatccaaacaaataaacaagttgcttttatcaagttccaagtttgttggaaaagttagttatttcggttatgttttcactcctcaaagttcaggtagttaagttagttattcttcgttttttgttctcttgtaagcctatatataaaggcatgtgagctcatttagattgatagagagaaaatcagagagtgaatggtctgattggagtgtgaagaaacagagggaaggctgaggtgaagcactgtccaagttgagtttcttggagtgcttgagtgagagaatcagggttttctcttgtacaactttgaggctgtgtaacatac

SEQ ID NO: 125435 - DNA, 852 bp, Cannabis sativa
atatattctattaagtctagaacatatggacgttttgcttaactctaagaaggtattcattcaatgaaagattacctttcttgagattctggagcctattctaaactcttatttttttgcaaaaaccttaagagtgaactacttttgaagtatgtgccaaatctgaccaagggttttacaacctaccttgtgagttaaaagactctcagacatggaagacagaagtcatgagacaagtagttggtcttgaacatgccaatcaatgaaggtcgtatttaatgtggtcaaagcttgatccccgcttgagagaaatttaggcggtggagctaaaccctgaatgattttgctgtatctttattctttgctttcatcattgccaatgcaccggaggtgtgactttcagtgacaacattcaccattaacagtgggaatagctctgataccatattgaatttcttagacattttagctaagaaggaataaaataaaagagaggaaaagacaaaattaaagaagaaggttgaaaaaaatttccttattattgattaagctaaaaacaattgaatatatataaaagacaggtgaagcatgaaatgaggttcaagtaacagaatctcacgtaacaaactaattaaaatgctaaataacaactatttaaaaagctaataaatttctaactaattaactactttagcatatttatgaataatatattttatatttttaacacatgatatatattttatatattttgtgcttttagctcatgatatatttattgggaccggatttcgtcccgttactgtacggacacggatttcaatccgtgatgtactgtaaccgtcggatggg

SEQ ID NO: 125436 - DNA, 765 bp, Cannabis sativa
tttagggggcatgatttgatacatgtcaaagttcggaaggaaaaaaaacctaattagcctatataatattatcatgagatgatctagttaaaatttttaaaataattattacataaaaatagctaaaagttacatttctaagatcacatgcaaatatgtaatagaatgtggtcacactcaagtttaacattcatgacaataattaaacataaacaataatattggagtacttctttagtatagatgtttgttttgttcccatataaaaagaatatttggaggtgtgattattctctctacttccactagaattgttgtgctcaataatgaaattgttgtgagtaaccccaaaccccttatcaatttattgtggttgaacttgaagcaacattaaaaggggagcatgtgttaattgttagactaagaagcttagtctaacctttcaaccccagtctcaaatgaaccaaattggtccatcatatgccaattagattggagttatttattcattaggctcaaatgcctaccaaagggtgcgcataaatcgacctaactcaatgagaaccgaccgatctaattataaccgatcgccaaacattgaatatctaattatgatcggatcgaattggatgtaatttttgaatatctaattggatcggatgttagatgtgatgtccaaagattcaatacatccaacatacaatcagactaattagtatttttatttagtttggatgattaattagattttatattattatacgt

SEQ ID NO: 125437 - DNA, 600 bp, Cannabis sativa
aattattatttccaattttataaataataaatataattttttttgaaaaataattgttagaaacttgccataaaaggttattaaattgttatcttattaatactttttagtttccatccatgagtattacccattaaaaagtgttccatatatatatatattactgggtgcgaacaaagcaacctggaacaaggccaagctaatgtatacaacccaattcttttacctacttcttctgttaattaatgttgtcttttgaagtcatcaacagttacacggtgcaaatggccttctctctcttctttttatttaacttttttttaaaaaaaaataaagaaaaagaaaagaaattttgcaagaaaaactagcgggaattccgtagtagattaataaaaacataataattaacaacaagagtactaaagaaaattggttcttcaataaatagatacatcacggaggtagaaaattattatatgtgaggggcgacagtgtaaaaataaatattttaaagggttttttactaaatttttagacaaacttttaaaaaatatatacatacaaaaaagggaaaatattgaaaagaaaaaaaaaaaaaaa

SEQ ID NO: 125438 - DNA, 562 bp, Cannabis sativa
  modified_base (525)..(526): a, c, t, g, unknown or other
tctctttaatttctaagtgtgaaaattaggtttgattatgtgattttgagttttagcttctgtctgaacttggtttgcttagagtttgtttctggtataattactaagttgtttatgttgtttgaaggagtttttggtggttgttgttaagcttggacaaggtttgagctttcaagctcaaacttggttcatttatgacaaattttgattcaaagttttgtggatgcttttatttgttgaaatatgattatggtaagttaggtttttggaaagtttgggaacgattggattcaatttgagatggttttgggattttttttttcagaaaatatactataaaaacggcagaccatttaggtaaaacggcctaccgtttttccaggcagaaaacccagaaaaaacggccagtcgtttgctcaaaaatggcttaccgttttgtggggtacttttcccaaattcttatttttttcagcaagtttcttgatatgtaggatttagtcatgccatttatcgatagggaaactnntagtttcaagtttaagtccccgaaaaatgatttagc

SEQ ID NO: 125439 - DNA, 935 bp, Cannabis sativa
cagaaaatgtgaccttggggactattactaccaatttttgaggttgggaattaatctgcatcaaccctaagtttttggggacttttgccgcaattatcgcttaagatctatacataaattttagaggtaaccgaaaatgtatattaaattatatgataaaaaatgaagtttttcataaaaatataactagttagtttcttatcaacatttttagtaaccaaaaagttacttaaaatcgctaaaaaataaaagaaaaataaaaaaagcaagaaactatgaaaaaacgtcagatgcatcagatttgattaacgtgagacgttagtaatagtagtatgttaattattgtcaattacatgcaagaaaaaaaaacttatattattgtaaactttcataaattaattggtaatgtttttaatgaaaatgttgtctaattaattagtaacatatggtataaatgttgccttatattactattttggtaacactgcaggttaattttggttagtttaaaaaaggtgttattaataattgtagtttttctagttgtgttgatttactaatttcttggcacaataggtagggaacctctataatatccaacacttttttttacgccatttgtatcttcaggtaaaacatgaatcacctaaattttgaaacaaatactctagctacgattttttctccacgacttaaaaagtgtgacatataatgttgaaacattaggtatatcttatagtagttactgtgattggattcattagggtggcctggattaattgcttctaaataatgagtgatgaagaaaaattgttttattttagagaaatagtgagtgttggaaatttataagtgcttcaataaaaagaccaatgtcaaaatacaactcaaaataaaaaatacaagaacaataatattgataaaataatgttaca

SEQ ID NO: 125440 - DNA, 514 bp, Cannabis sativa
taaaaatcacgtaatacacctttgttagttagtgtgttacactagtaatcgatctcagatcttaatgcaatatcctttgcctaacatcaataaagcctatgcatcggttattcaagaagagagtcaaaggtgtttgtcgattgttttagctgaaagtgacaaaaatttatcttgatctggatctagaataggttcaaattcaggtcagcttgttggaaatgtcgagcttcatcgccctaaaatggtctgtacttactgtggtatcacaagccacactatggaaaagtgttttaggatccattgatatcctcctagacaaaaattgcacgaaaaatttcctaataggaatgacaatcgaaacaccagtaacttgggaaaaccttctgctgccaacttcaccaccaacacagaaggcactgaagggaatcatggggacaatgctatgggggatcaggacttggttgctagcttgaccactgtccagtgtcaaagactcatggcattgctatctcaa

SEQ ID NO: 125441 - DNA, 869 bp, Cannabis sativa
tactaaacgccatcttaataaattaattaattttataatattaagaaaatgtttctttttcacaatgtaaattacttaaaagtgtaaatatattccactactaataatagtcatatatgcacccaaataatgtgtaataatagacataaaatgatgtcagatattgtattcgattattatattgatacaataaaatataatgagatttactttctttaagaaagaaaaaaaaaacaaaaaatctccagccatgttgaagtctcggagtgtcgagagatgcgtacacaatctcctggaaaactaaggcaagattgaaattatcgtcgaaagcaaggtggacagcggggaaattgtgctacccgttatccagtaattttttggccaggaattggagaggttaccccttttgagaatattattgatggtgtgtttgaaaagatcactctaaagaaatttcttttggcgattgggattgatcaaactgatttcgaaaaagcaatccacaaacaaacaacaagcatgcctatgaagactaatgaaaaaagtctttgtgtggacaaagagacaaaaaagaaggataatagcagtgtagttcaaaggaacttatctttccagtaaacatttccaatatagactaaaatagtctaatttttaagaaccgacctgcaaatgatactaacttggaggttctcgctctttcttccgaggataagagacaatagatgtggatccccctcattcaatattacattgcgcctcattaaaaccaagaaagatgccgccccaaatatattaaataacattaatagtgattctgtaatgtccccccttcaagcctccaatggatccttacacccacgaaataatgg

SEQ ID NO: 125442 - DNA, 989 bp, Cannabis sativa
gtattatttatgttctttgaaatggaaggaaagatcattatgagaaaaaatttaataatttttttatcaatattttttatgcattttaaattttattccattctattcatatattcattcacattctcattcttatattttcattcctcccaaccaatttattctaaaaaatataacctttttttttctttctttttttaagtcatagaatctcgtcttccaaacaagtaagaaataaatatatgatacaaaataattaatatatatattaatacctgaagccttgtggtttgtgaggggaattgaaatgaggatgagatataaccttaataaagtccctccatagaagaactttatcaatggcaacattaaaactagtgccgtacataatgggctccaaaacacttctgttggctcctttattattgcttattatttctggcttttcctcagccggcatattgaaaaagtctctacacatctctatcattctcttcattaaactctctcccacaccgtggttaatcagctgatccattttaaatcattaataattaataacactatatgtcccttttctataaataataaacatatatatgaagtgtactaattactatatatgatcatgacattgatcatgtaaaacaaaaatctgtaattatcaacataaattaaatatatatactttgttgtaattatattcttaacctttttccaccgatcgattttttaggtatatacaaacaaatgaccagcaattagcaaaaagatgggggagtcacttatcacatacaaatgtacaaacatataaatatttacatatacttatgtatacatagccagagactccttcaaaaaaaaaaaagaaaaaagacacttgtggcatatataatattatatacgcctcaacgaatgtgaaaattaaataaatatatataaatgcattttaagcttaattttgttatctaatttaaaaaaaaaaaaaa

SEQ ID NO: 125443 - DNA, 876 bp, Cannabis sativa
gagaataatgagggggtattttggggtttaggtaaaagtagtcctattttttcaagagttataagtattagtttagataattaatttgggtataaaaaatgtatataaactcaaatttcccgcctataattctccaatgcgcgttattcgtcaaagagatcatttgtctatatttatttatcttgtgtgatgagagattgtttgctcttattggtaattttaagtgtcgatgttagttgcatgatataaaagtgtgtcattggcatgatattgtatattttttttttttcgcagataatagctacttatatttcaaagccaccaatgtcaaagctttgaatattttggagcttcttcagaaattcctttaggacaaaagataaaaagggagaaataaaataaaaaggaaataattatttttgaatggattgtaattgtatacaaacagaaatatgacatatctaaatccaacgctactcttgctccttcatgaatcatgcattcgtgcgaagaattagaaaagttggtatacagttataatgtgcgttactcttacactcaaaatagtgtgaatatattctcttcttcttttaacaaccaaaagaaaacactatattagactactaatatctacgagaatatgaagacatctctctttttcttttttctgtacttttttcaattttcccactatcctaatataatcttatttacttattgatattggttaatttttttagtcatatttctaaaattagttttttattttctaaaagtagcattagtgtaaactaggagtgttcatccgatccaatccgtactttcttggtcaaacaatatccaatccgcactaagtgcggattttatattttggat

SEQ ID NO: 125444 - DNA, 845 bp, Cannabis sativa
  modified_base (793)..(802): a, c, t, g, unknown or other
ttctctacaatggagaatggatagggagctctctacttttttgctaaatttttttaatagtattttaatcgaaaaaaattattacttttttattattttattaaattaatttatatttaccaaatttaaattataaaatattattaaaacaatcaaacattaactaaaatagagagcaagattggagcaaaaataaaaaatagttctctattttaattttttaactattttaattaaaattaggctaaaataaagagtatgtttggaaatgctttaagggaactcattaagatataattttcagaattatcaagtagggttttctagcaaagtaagtttttgatagaatttctagtcctctcagtaggtgtaccttaatcttctttatatagctagtgtttaaaatatttctatttaaaattctaactcataactccatccccaagaaagatacaaaattgaataattcataattaatagttgtataactttatatatggtttagatatattttataaaaacatttataattataagttacgagcgcatacaattagtttagagttaaactaaactaataaataaaatatcaatatttttagagtattatttaaaaaaaaaaaaataaaaaaataagtaaatttaagagtgaataatatattttatattaattaatatttatgaaactaataaaaaattcactacaaaaaactgaaactaaatgtgataactttttagtttcaacataatttttttatggaaatttacattgtatactaacttttgctatttnnnnnnnnnnatactgtcaggcggtattttttacatttttactgtattttttt

SEQ ID NO: 125445 - DNA, 1748 bp, Cannabis sativa
cctgataaaatatttccaacaaggtccaatgttcatgatttgggttctaaccctaaagctcctctaagagttgtggagattgctagcctttcagtttagcagaaaaagtgagttattgtattgtgttgttttaatgttgcataatagtttcttaactattatttttcattttttaacagtgattgtggcgcatttattgctacttttgcagagttcttcatccatgggaaagatgtccctactgactttgacattgaagtttaccgcactcgccttactgccctcttattttcatatggtcaaaggaaaaataatgaaaatattaacaatgaggatgagaagcaaaacaagtcttccaaggcttctaaagggaagaagtagggtcattttatggggaactactttttgctcattgtttaatttttatattttaaatgattatactttttactagatgttatttttttttgggttttatgatctactttaagttatgcatgacttattgttatcatttacaacagttggtcttttatgtattatgctacttaatacatttaatattatggcaactgctttatcaactgctatgctatttaaaattaaccattatagtatgttcattctttttcatcttaaacaacaaatgtattatgaacttataatgcatatttttaatatatttgcttagacgtacaattttataaaaaaaactattatcgaactgttaaacaacaaatttggtagcaatatatttgtcaatatatttgtaacatgtttctcaactgattagcaactgttatgtaatttgtatatttttagtatacaacttaaaaaaaaaaaactaattttgtggaaatctaactgtaatatatttttaacaagtatcaccactgtctagcaactattttgcaaccatgaaaaagctatttcaattttagaaagtagtaacaatctaccaaactaactttacacgatgtaagagttctcatagagatttaaacaattcaaataaatgtgatgtatctatttaattgcttggttgtggcatgtctttcagttgttaccttatgccatatctgttgcacctattttgtttcttctaccaatcagctataaatcttcttctccttggtcttccagatctcattttctggtttggtggcagaacaataatatctttgatgttttgtggtacatcccatgttgtgtgattgtgtataggatatattgatccgatatatatttcaagccatgttcttgtcgtgtaatactgtggacagtaattgtaaaaatttaagttcatctctttcatcagatcaagagcatgagcacatggtaattcgtctagttggaatttgttgcaactgcatgtcttttcttttagattgaccacccatgatcttgttagttagaaacacttcaaacatgctcttgtttattggtttcacctacatatttagtgaagataattaatgtattgaatgttaagaaaactgaaaagaaactataaagaaactgttaggcaacttgaagttttatgtgatcttatattttctgtgaatgagtccacaaagttgttgattcacttcttctctactgttgttgtcaaaattgttgtggttttctgtgcttttgtcctatttctgtatgtccattgttgtattaaagctctcaatgactccattagttgtaacaccctaactagcataggcgtattacaagatttttaaacgtactgtgtagct

SEQ ID NO: 125446 - DNA, 1322 bp, Cannabis sativa
gaaacaaaaccaaaacttaccttgatgctttaataacttccacaaccagccaaatcaacaagaaatgtgatgagtttgctaacaaaataattcttgaaggcaactcctcatgaggctcgggcaagaaaaatggagggaagggaagatagatgcccattattctagcttatcccttattcactatattcttaattttattaaataatcctacctaataacaattttaacttcagccacataattcaaataaaaccaaataaatgcctatcattaaaatgaccatttttccctctcataacccttaaattttaaattaaatgctaggggtattttagtcatttcctaattaatctaccaaaccgataactaaaaaaaataattccaaactagaccggtttaattccaatccaaataattcatcgtatattgccgtgacttttttgaccacttcatcgcgtttctacggccaccgaacccgaaaatatttattataaaaaggtaaccacgatacccccaaagtccgataaaatctccataattagtaaattacactttatttattcatttactcatatttccctaatcaactcgtaattagattaggtaggatcataatcctactctaatgtccacttaatcacatatttaataaaatatgtcccattaaaatatcattatattttccaggtatccttccaattaagtaggatgcaattttttgttgactttgagatgaacctgctgagggtagggatccttccaatgatgctttgcacatccttgtgctttcagggagaaggcatgtcgatgaaggccttgattttctctaggttttcttcgatccctcaagagctgacaatgagacctagaaacttttggaggatacaccaaacgtacacttctttggattgagtttcatcccatacctttaaggaatcgaaaaggcctcttcgaggtttgtataatgttctccgactgtcttagattttaccaaaatgtcatcaacgtagacctccatatttctccctaattggttcttaaacattttattgtccattctctgataagttgccctcgctttttttagaccgaatggcattaccttgtagcaatacacatctttatccgtctgaaagctattacgttcttcatcagcaacgtgcatcttgatctaattatacccagagtaggcatccatgaagctcaacaactgataaccagatgtgaaatctaccatctagtctatttgtgggagacagaaacagtctttaagataagctttattgaggtccatgaagttaatgcatatcctccacgtgcca

SEQ ID NO: 125447 - DNA, 1525 bp, Cannabis sativa
  modified_base (415)..(419): a, c, t, g, unknown or other
tagaagagatttagtgactaatatatttagtcacgaataatgttattttctatgactaaaatttagttacaaaatatattgaagttagtcacaataagattggtaaattggtcacataagtaccaatatggactttcaacaaccaaaaaagtaaactttaacaactaaaatttagtcatgaaaggtgtgatattttgtgactaaatagtttagttggcaataataaataaaaaattacataaattaattattcagtgactaatatttagtcataaaaactaatttatatattttttttaatttagagtatattcatttaaattctataataaaaacatattattcaaagctatatttaaataacatcatacactacacatttattcattacataaaaaattacaatgtcaatcannnnnatttcaattacaatataatccttgaattgtacattgtccataaacgtacagtaaaacaacaaactcaatgaatcaaagttactaacaagaaaaataaaataagctacccagtacaaaccaaattaaatgaacaacaaagaaactagcatgaccattcaaatatataaaggttcacttagagattggtatcattcatctggaattttgcatcttctatggaaaattttattgcagtgttaggtggtcctacttttccaggacacagttcgtccacaccaacagaaccatgtaactctttcagagttttaatacccttatgactagtgtcattgcattgctctatgttttccatctgcctattagtaacttgtgagtttgattccacaactccatgtaaagcaaaattagcagcaactaaaattggggatccagagcttgagcatgaggcttctgaatatttactgctgcatgaaataccaaattgcgaatgaaaatatttaaattgttaattatgacccaataattaccaagcttgttgctttgagagaacattacttctgatacttcagggctcactaaagcagctgcaatgggtaaatatgcagaagcaaaatcctgaagattaatccaacataagagagagtgtcattcagtttgagaaggctatgctttaacaaaaatatgtttgtcatatgtcgtgcaaataatatgtttttatgaatataatttttcttgcttgtgatctttttgagtgtcatttaatttatacacccttacctttgctacagttacaaggtcaggtttaatgttgtatttgtcacatccaaacattttttccaagtcttccaaatccacatatcacctcatcagtaatgaaaaaaatgtcatatttcttgaaaacagcttgaacctgcacatcacaatacatatacagatcacaggaaatgaaagttgaatttgttatgctgttgtgtgaaaaaaaaaatcttgagataatttaaagttaccctaacactaatgtaggaaaggacacaactacttcattattgtggacaatgtcccacatggaataaatggtagagaattgagccatatataagaacatg

SEQ ID NO: 125448 - DNA, 1197 bp, Cannabis sativa
ttatctctattcactattagtagaaataaataaaatacttattctcacacaaattgtataacaaataaaatttaaaatatatgtaccgggtattacacattgtcctattgaaaactcctcatttggtttctttttatctcgaggcttcttagtcttttctttatgattagtctcttgattatctttgttggagtcacgaggctcaaccagtgcatgtgtagaagacttataaatgtcgaactttatttcttcatcattagtactcaaggttaggtgacttgttcgaacatctataagcgcaccaccagttttaaagaaagggcgcccaaggatcaatgacatatccttgtcttcttctttgtctagtaccgtaaaatcagctagaaatactaacttacctactttaattagcacattttctattattccccttggataagtgaatgattgatccgccaattgtaataaaattgttgtgcactttacctcaccaatatattcattttttgaataccgaaagtgacattatatactagcctcaagattacatagagacttttcaaatttcaaaccaccaatctcacaaggaattaaaaagctacccacatctttaagcttttgaggtaactttcacttattaaatttgaatcatatattaattgattgtatttctagaataaaattataaataaaattattaaaacctcctatatgtgaatataacaatttaattattgatcgtaaaacatttaataaattacacatgcacatttatatataatgatgtgttcaaaataacataattagtaattactactgaaactatttattactagaattattatgtggaaaagtatgtgtatgcatgagtgctatggatcaaacattaatattcatataactatatatattactaatggttaattttttattgtaactattatggttatattttttttagtcattggatcactattaaatggttgtgattaatttggaaattaaataaaaaaaataaaaaatgacttgtaacctaatattaacctgttaatttatttccttttaaaattttaattaagattaattatattttacaattaaattaagtaatattattaattatttttttgcaatttattattaaataaggatcttttagcaatttattttttttacacttaaattattttaattttt

SEQ ID NO: 125449 - DNA, 1117 bp, Cannabis sativa
tttgattggatgcttcccaatggagtgaaaaatgaagatttggacatgactgagtcttttagagcaacccttcaaagaaaaaatgttctacaagttattcctatcacttatgaactgtcaactacggccacttcaaaataacaggaaagctgaactaattagtgcatatgtgtcttggtgacattgataatgtaaaataataataataatatctgtattttatggataataagttcaaaagattaacattctagaatctttgatgttgatgtttacataagtcctaggccaatgtgctttttatgttgaacgaatagtgtacaatcaaattaaatatatatatttgattagtattcattaatattgtgttttgaatttttaaacatgcttagttaatttattgaaaattgattatagttaatttcttgattattatggtgctggaaaaaagagatattatcaagtttactagtgcgattttttttttgtctaaaaatacgagtacaatcttgtatatagttgacacgtggacccaatttcaagttggaaaaaaatgacatgtcaataacaactcctttagagctaagtacccttgcatgattgaaactgtgcgacccagacaagatctactcgcatactatatgtgtaatatccagattaaaatagtatttaaatttttttgatatattgattattattttatttatttgtgctgttaatgagttgaaattattacttagagtagttgtgacaattttctatagatagctaaagttgtattgactccaaaggtaaaatattgtggtattttcacaaggtatgtgatcatttaattaaagctcaatataaatattcattatagggttttataatatatttagtgagtttaattaattctataagtggtatcaaataatattattatgtaattaatgttaaaagaaattcgtaggtttagagaaatttacaagtctacaaactgtttagaaaaacgaccctatatcatactttagaatttttctaggtcaaaactaagtctaaagttacaagatggagagtttataatttaaattttaaagttagatattaatttattaaataatttattattattatt

SEQ ID NO: 125450 - DNA, 993 bp, Cannabis sativa
gatttgatttgaccatgtaatgtaatgcaatgtattgctatttactatcagtagtaagtgaaagaaaagaaacatatgtatgcatgcacatataggaaatgcaccaaattcttacagtttgaaacagcagagcaagagctaattcatttcatattcatattcatagctctctctctcctctccatcctaagtagaagtcaaatccaaatccaagtgcggtaatttccttcatttcctataatctattttacacaaaagcataaaagaatcagtgagtaacacctataaaataaaaaaccaaactctaaaaagcataacaaaacaaaaaaaactaagtttaatagaataaaataatgaaaaacccatagttggtgaaaacgtaagcatgcattaaagaataaagatggtggatggtataaacaaacaatgttatccatggagtcttgagaaagcaattaacaatgcaacaacatactacgagtcttgttattcatggagtttgagagcctgggagagagcgttaaggcttataattaattatgatatagggaaatttgggattttgattttaactttgtgaaaattcaaaatgacaaagtgaaagggagagagaggaaaagagaaaagtatacctttatgttctagtggaaatgatttgggagttgggaaaaccgaagcaaccccactcccctgatccccatcccggaaaaacaaaagagacgctcccctataccggcgacggtggcggtggcggtggttcaaatgtaatggtcgcttttccaaaagccaccttagttacacagtcagtctaagacagttacaattcaattacatacatacacatgggcacgggcatgggctcattctcatgagcccattccatttcatttacatgagaaattttcaaaaataccaataattccctttttcttatgtaataaaactaaggaaaattctaaaatgcacctctttaaaatggatatattgatgtac

SEQ ID NO: 125451 - DNA, 3170 bp, Cannabis sativa
acaattttttggcattcgacaaaaaaatacaatttttggattgtgggtttgggtggatcctaggcataagcatagctcaccttagtcataggccgacctgaacacgtgcctagtggaaaatggacaataattaggtatttttacagaaaaaaattagatatataagtgcatacaaactcaaaaataataaattttcttctataaaaagaaaacaaaagaaaatttttggcgatgacaatgtgttttttttatatacataatttatttatttttaattattatacttattttattattttgtttaagttcaattttctttctttataacatgatttaatttttcatttttggattaaactatttttttctactttaaattagtttatattttttattgatcatgttatccatattttttaagaagagacacgtgacgtaaactggaagataatcacctaattaactatcgtctaagcctttccgattgtagaaggccaactgagacctggaacgggcccgggcccggtgaaaactcaaggccctaccttgagacacaatgtcctttcaggacctggaagccttctcagccttctgggactcaaacaggacaaagccctctaagcttacaataagaatgtcagatgcctatcatgatgtggaaattgcatatctcccctgatgtgtttgtctttctaacacataatcagatattgtcccaagtgtcagacgatggtagtccgtgcacctccactgcatacatccattttgtccgacgactcctccgactattttgtctatcaggtgtgatttccacacgataagtgtctagtgccagagtggtctcagttgtacagatgctttgccccacgaaacaatatcttctaataggccaaatggtcatgtctattgtgtatttttccccaatagtgggcatgcttctacgtaaaactcgaacgggttatgggtatgccaagacccaaactctaccctatataaaccccattatccctttatgcaaaggggacaaaagacctaactaaaactctactaaattactctttaaactttcttcttcttcaaggggaaacctagagagattgtcgtatagccagggttagggttttcattgcaaaacttacttgtaatacatttctaaagcctaaaaagccaacatattgactcgtggctaaggataattaatatctgaaccacgtaaatcctacatcacatttaattaaccgttatttaatttcttaagctttcacttatttagtttctaaaaatctcggtaaacagattaaaatatatgttttataatttttttacatttcaaaatcaatataaatggggtttttttttttttgaaaaatttgaccaatcattttgtgttacgtatttgttaagtcatcactcaacatctttgttagaaatggatactaactaataccaacggaaataattattgaatgcttttgttgtgaaaaaaaaatagctactaaatcaataacaatttaaaatattgggtacttttatgaccattttctctaacacttatacaaatctctaatttaaatttagccttaatcaattcatgagaaattaaccaataaataataaaaaattagcgaaagcatactagaattttagaattaattgtataaaggttaagatcttctgaatttccagtcaaattttttgggaaccttagtctcttgatagtgggaattcaaattgtggactatcttctattacattaataactatctaaatagctacgaatatttattgatgatttctaatttagctcctaagtaaattagaaattatctttatcgtatccacatattaaaatcataacaatatcgttcttaagttataaagtttattaccaaataagtcacataaatttaattcatttatacgatagctcaataccgatttgtatatatatgaccttatatagataaattcctaacaatacgtattacctctattactctattagagtgaatagtaacttatacccaagaagtatacattatatttggtaagtttgtcgtgaaaaagaaaaaaaaaattaggtactaaataggggtgcacatcgggtgggttttaacgggttttgggtttttgagtttgagtttcttgggtttgagttttggactcttgggaccaaacctgcccgtatggagactgagtgtttcaggttttggatccgagtgggtcgggttcgggttgggacaggtttggatggatttcgagttaggctagacttttttttaatatcacttttctaacaaaaagaaaaaaaaaactacaaaataatacaattatacaatatattattatacatacatattacataaactaacacgttaacaatttaacacacacacacaaattcacaattaaaaaaaaaaagatatatatatatataatatacataaaaaaaaatatactaaccatgtttcaagttttgggttttcgaaaaatattaaactcgaacctggcccagtacagaaccaggttacacccaaacctagtacagaactgggttacacctgaacccggtatactgaaattgaaattcatttttttttttagattttctaagtttcgagtcgggtgggtttcgggggggtttcaagtttcgggtataaatgtgcaatcctagtactaaatcaccataaatcataaaatattaggtatttttattgtcattactaacagatgaaagcataaatattttatttattaattattttctatgaaagaatgccttgaaagagagcataaaaaaatataagaaaatgaaactaattattgtagagaacaaattttaaatcaataaaaaaacatattatattaacgtaatctaaaaaaattacaatctgtccaaaagaaaaaatatttagttttaatattgatacatctacacacaagtatcattttacattattacctctaaatattattttcaaaaaataatttattttaaaaatgagaaaaattattaaaatatagatttaacataccttaaaaaagatgagaggtaaattttttttgtccaatttgaggtgtgtaagacctcaaatgaggcgagggattgtataagtcccatttatatatatttatgttatattaattgtggctatataattatataataa

SEQ ID NO: 125452 - DNA, 1785 bp, Cannabis sativa
  modified_base (26)..(32): a, c, t, g, unknown or other
  modified_base (300)..(311): a, c, t, g, unknown or other
agggtccaatctgtaacttttgcaannnnnnnggtctaaaatggtatttactcttaaaacattcataataattcaaattttccgctttaaataaagacatttaataccatcatattaaatgttgttgggtcatttactataaattaattagaaaaattaatatgaggaagagttgcttttaacaatagttggaagagagtgagagtgagagtgaaagtacataaggtaaatagcggcataaatacctaaagttttaagtttgtaagcgacataaattcaatgtttatttttagcggcatnnnnnnnnnnnntttgtaaaattgtaattttcttctagttttgtcagtataaactttgttttgaatttattaaatgaacatttgaaagtaactgatattacatgtttctgtctagaccgaataataaagaatctggaccttaaatggggtttgtttaagaaaataacagagtttgtattgatgaaattagagaaaaattacggtttcacaaatattgggtacttatgccgctaaaaataaacattgggattataccacttataaacttaaaacgttagatacttataccgccatttaccctaagtaataattggagagaggaacggacccacatcaataattaagctagattgcacaatcccactcagatcacgttgtgttttttttgtactgtaaatcctggtcttctacttattggagtgagtcttggaaacagagcgccatttctaatccaatcttatcagagaagagatggtagatggtcacacacacaatattgtgtcccttgattcttcattccctttcctcgatggcttctttgaagctcatcacgctcattctttcactcatgttgttcaatctctctgcctcaaggtaccactaactaactctttactcttttattttttatctcatttatatattatgtatgtatctatatatttatatacgatatcacctagcataatttgtaatgcattatcttcatcagtcttagtaactgtgatacagattgtccacaactccaaatattctgtcccatttattatctttctctgtccctaaccaataaaaacattacaaatcaactaaaatgccacattctcttcaataatttagggtgactattcaatggttacattaaaaatgtaactatgatagttatattttttttatgacctactataacaaattactaacaataaaaattctatttttagactcaaattaattatatacttaaaataaattaattttttaatttaaatatttaatatgacattattcatagctaatttttataaatattttttatttataaagaaataaataaaatcaggttagtattaggttacaggtaatttattaattatttttatctaatttctaaattaatcacaaccgtttaataatgatccaatgactaaaaataaatgtaaccactacatatttgatgtaaccattgaaacctcttccaatagtttaatacatacttcgctactaatgttatcgttttcttctaattcttttgttttttttttccaaaaaatattttaaaaaataaaattattagtttaatttcagatattttatttatgaaaataaattatcttttcaatttatatatagatatataacctaaatatatactttttcttttttcaactacaatatcctttacatatctatatatccaatatttttatggaataattacataagacatcattttttgtaaaaaaaattacacttttacgtttaaaga

SEQ ID NO: 125453 - DNA, 1035 bp, Cannabis sativa
  modified_base (45)..(86): a, c, t, g, unknown or other
aactttatatgtgtttaattatcgatttagaaagttcatatttannnnnnnnnnnnnnnnnnnnnnnnnnnnnnnnnnnnnnnnnntaaaataaattccaacaaaaactagtaaacatcacatgcttcgcagcgaatatattaaatattttaaattatatataaaaaataaattgtgtatttaattaataataattaggggtaagcaacgatcggtttggccgattttttacaccaaaaaaatctcaatttcggttttcggttttcatggttataatccgaataccgaccaactattatacaaatataaaaaaaaaaaacgaccgttttaatccacggtttggtcggtttaaaccgactaaaccgaacttcattttttttaaaaaaaaaaataaattttttataattatttaaaaactagaaaaaatagagtattgtatcaaatatcatataatttaagaataacactttcttagttaaataaataatgtaaaataaacttttttaaatttgttcaaattatttgtgctactaatatggtaatgaattatattaaaaaacttgtattattttatgaatgtatatatatataatatggaaatgcatcaaactataataaaataaagcatgaataattgagactttaaataaaaaaaatattagtaaaactagtttaataaaattgtatattaaatatctacaaaaatagtatacattatatataatatatatatgttcggtcggttctcggtttaatcggtcggttttccattgacactaaaaccgacaatgttaaggcggttttaaccgaaagcagttttttcagttttcgattattttggtgtcgatttttttcggtgttcggatggttgatgtattcggtttggtcggttttttgaatttttcgctcacccctaataataattagttaataaaattatactaaaattttaactttactattaaaaaatttgtgacataaatacttaaaatattaaatttgttgctaataaataccgaaattcgaaaaatagta

SEQ ID NO: 125454 - DNA, 1128 bp, Cannabis sativa
atattatataaactatgggtggatttattagtaccttactactacaaaagcagctggtatgagattcatgaggaccaccaacttccagttccagttggtttcgccatgcttcagtgtcaatcttgtaaaccaagtcgtctgcgtcataaacggcgtccttgagatcatcaagccattttctcactctatggtctttgatgagcttctcctcggcatcaatgagcagcagatcagccgacgacagcaaagttttgaactccttgagaagcttgagaatggcttcttttcctttgaagaagtccttcacctcagaagctaacttttccaccaatggattaagcaaagcagagagaagagctcctccaaccaattcagccatatcagatcttcagaaactcacaaaagaattgcagggaagagtatacagtgctcagttagtgtagtacattgtaacatactgctctaaaagcagatcatgtggtccattgaacattgtttattatgagtttgttttggtttatggatagcagtgtaaaataatgataattatatgttaaattaattgtggtagactgtgctagtggtgcatggtttacataaattcaaaataaagaaataaaatactacctcattacatgtgcattcacgtgtttgaatgtgaaacagagcaacggctatgaaaataagagaaactttgattatatgaagagaaatatagctagcaatagcattgtagtatttgattataaaatgtaaaggttaattgaagatcaaatcatggaattaatcaacattatcacaaatacacaataatatcacttttagtatcttattttagagcattggtagtaaatacattaaattcattatgaatcaagaatcaacagctctgtgtcttcttcttatttttctatctctagtagtcatttctccccatatctctgaaaaatatcagccaaatcaaccaaacccacctccctcaacttatttcccacctcttcaaacattacaactccatcctcatcagaataattctctcttcattgttctcacaacatactttgtagcttccaacaactttcccgccttaaccaaaccaccaacaaaaatcgtatcgaaattcacaag

SEQ ID NO: 125455 - DNA, 701 bp, Cannabis sativa
  modified_base (669)..(675): a, c, t, g, unknown or other
atattctgttaaaccaagaatgttaaaccaagaaataccgttagataagcacttttaatatataaagatatatataattacacttcttttcaaaaaaagataaaatcctcttcaataataggataatattaatttgaatatacttgaatatcattatatactttttgcaatttgtataaatttcaagcaatcagatcacacgaacacttttcattatagattatatataattaattataatatataagaaaataaatgaatatatatatatatatatataaaagcaattgggctagctagctagatagttcagtgaagtactttatattatatcatcctaattataatcacattattaattatacatacaagactcaatttgagtatataaatcaatcatagaactgaagaaattaacaatatatatttgtctatatatttattacatatattaagataaattaaattccccatatgagcaaattaaagcttttcttctcatgccatcatatatactacttgatgcactttattcaaattattaggtcaaacttatgattatgtgattcaaagaatgttgtatatatcttcaattatatataatagcatatatgcatgggggtccctttcttgatcattattaatcattgaatatatatatatatatannnnnnnggtttcaatggttacatttttattgt

SEQ ID NO: 125456 - DNA, 632 bp, Cannabis sativa
ttagggcataaaacctaacatccacatcttactctggaacttcatctctgcatccatgaaattactgcaagaacattcaacaaaagatacaaagagagaaagaagaagaaggaaatctgatccaagaaactacacactcaaggccttgcctgcttagtgcggaagtgcataaagtaggctcagcttcgtttctaaagattcaattcaaaaggccctacttagtttcgcaagtcctaattgaattaagaagagagtatatatacttaactaaattaagtaacaaccataaggccaataactataaccaactaaataatattacataaaataagttgacgtggacaaacactgaaatgagtaaattccaaacataacttcacacgactctagatacaactggacctaatttgttactacaaaaaatactagttcttacacatccaaaattaaaaagtattaagcttcagtggtacctaacactatatataaattactttgtaaatgattaatatattctctaataactattgaattatattataattgttataaaataatataagataagtaagaagaaagaagaagaagatgaagagagaaagagaaagtgaatgagaatttctcagttgttt

SEQ ID NO: 125457 - DNA, 1387 bp, Cannabis sativa
  modified_base (30)..(30): a, c, t, g, unknown or other
atggattcgatccgatccaaaaaatactangtctaaaatattagataaacccaaattaaacaaataaatatatatgaaatacatccaatggatgaaaccggtccaatctaacatctaatgttcgatgacaaaattaattggatcggatcgaatggtaaaatttaaaattcaatatataattggatcggatctgaatatacctacaaatgtgatccaatatatatgatttttgttttgcttttttatggaaatatataatatatgatgatgttatatttcgtagcaatgtttaattgttttattataaaataatgggatttcgatatcacagaaattaggaaggcttgatctcagcacaaattgttgaagaagcaattaatgtttaattaacaaaagctttgcaagtcaagcaagtaacaataaataataatattttgctagagtagaaaagattgggttgcattgaaattattatctaaatatttgactggttgtattgcctagtcactcatttttaaacatagttataaaaatatatatatatatatatataaatttgtccctatagctagattgatttgtgaaatttatattacacttataactactaaattttaatctcatgataaaattttctataattagattaatattatgtgtgtaactaaaatttatcttaaaaataattttttccatacttttagctaccaagctaattttttttttttttttaaaaaaaacaattaggatagtgaacaccctaaccagaatataataataataataatagtaataattttaacttaaaaaaacaaatcaattttcaaagtatatataataatcgtttcaaaaaagtatataataataataataataattttaaatttaattagatggttatctaaatctaactttgaaattttgacacggccaagcgccagcaaataagcctaacttagttgattttccttttcaaatgatctttcttcgtacattattttttcttatattcaaaaactcaattttcttttctttgaaaaaaataaataataataaataataaatttagggttttttctcttcagggaactagttagcacgtggtggttacattaaatttataattaatattatagtgacttttgaaagaggaattacttcatatactattttttaactcttttttttttttcaaatttacagttttggttactccgctagtttctctggtgctatttatgtgggttgttatacggattttagttgcgtttaggttgctccgttaattgctataagtatttctgtacatagaatttcgtaaaataccaaaaaatatttgaagtaaaaattaaaaaaaaaaaaccctttttaaaaatctttcaaaaac

SEQ ID NO: 125458 - DNA, 913 bp, Cannabis sativa
ggtcggaccattgggtccgatggggtccgattggtcggaccccatcggacccattgtgggtcggtagtggtgcttcgatgatggtgcgtggtgggtcggtggggagcgtcgtgggccagtgtgtggccgtcgtttggggttcggttggggttgggagggctgggttgggacggttgaacagagagaatagaggaaaggagagagaatgggtgtgagattttgagaggggtaattttgggatttaggtaaagtgggcatattctaacaattacctataatttaagtttttctaaccaattaacccttaaatcatgcataaaaaatcaaatttcccttgataattcatatatattatcgtcttctcttttttttttaattaaaaataaataaaagatatagaaattaattattaagaataatttactataaatatttaagtttaacatacaaatgaatacttaaatttaattcttgacagtaataatacatctaaattatatttctataatttttttaggtacttgaccgttaagtatcaagttaatggtcatgtggctgtccctaattaatctcggtcattatattcttatttttattttaaaattaatttaaataatcgataagacaataacacgaggataatggcttgacacgtaatagtgaggtacttacgaaaattctaaaaatataacttaagtattgttactgtcaaattttaaacttaggtatttatctgaaaataagaattaaacttaagtatttacgctgcaaattattttattattaatttaaacacaaataatgttgttttatatagataagtgtttaatataacattaacaacaaaaggggcggtggcgcagttggctagcgcgtaggtctcatagcttagagtgatcctgaggtcgagagt

SEQ ID NO: 125459 - DNA, 1285 bp, Cannabis sativa
gaccatggacagttacccaacataagcttagccgaccagagtcaacatcccttcttaggagtggtcggccaaggccaacaacatagcacagggttggccgacctcaaccatacactcttccagagtatggccaaccaaacctttgtagtttcgagcctgcagcccctccaaggagggccagtctctacagtaatgaatcttgttgtacaagcacagttggaccaaatgagggacaagatcaaggacctagctggtccaaaatcttcagaccttaagctagacaagtcaaggggatcaccattctccgtatacctaaatgccttgcctttgcccaatttcaagatgccagtatggatgatgtatgctgggcgagaagacccacttgcaaacatcaagtactttgagatgcagcttgatctccaaaagattactggtgatgtgcgatgtagcatattcctggcaactttgtgaaaaacagctcagcaatggtactttaagcttgcctaaggaaggttcaattcctggaatgagttttcctgagaattttacacacaattctcatcctcaagacttataccatcgcagctagaagaccatgtcaaagtcaaacaatgacaaggaaaacctttgaaagattacatgcataggttcgtggccaagccaccaaggtcaatagccttatagaagagggccgatatacggtaatactgggaggcatcctcccattgagcaacttctagaatgacatttgaaggatctcaactaacaacaagaaggagttccccgatagagcagacaactttatcaaactagaagaagttgttcgacaggcccagacagagcaaattagaaaaaggaaggcataaggcatccagcagccccatgacttgttaggcgcacaggcagacactaacaactctacccaaacctctggtggcaagaatactaggagcaatcacaataacaacaactctggaagaaatagtggcaaaaaggaaaagtttaacacttcttccaagccacaaaactacaaggacaaggaggagaagtacacatacttcaccctcatgacagagaaacccgaggccatgtttatggccacatagggaacattcccatacaaaaagcccttacacatcaaaagggagttgaacaagagggacatgtcaaaattctataatcaagtgatgtatgccttctttggccaaggcatcgcaccaatcgggtatattagattccccctcactattggagaaaatctaactaccataactctgatggcgta

SEQ ID NO: 125460 - DNA, 1382 bp, Cannabis sativa
tagtggtattggtgtaataaatattgcattttgtatttttgatgtaaaaatttctatattttttagtattttttaatgaattggtgatgatagttcggtgaatattaaaataaaaaggaatattggcattaaaactagctaaattctacaatccaatctgatttaattacaaaaaaatagatattcaattatgatttgattggattagatgctaaaagttaaattctaattggattatatcggttattgaatgtcaatctcaaaattcaattaaaaactgatcaaatccaatatatttatatacattaaaaaaataatttatattgatttacataataaaagtaataaacaaataaaaaagtatatattagttgtatttttagtgggtttttttgttcaacttgtagtaattggttgttttgtgtatttattttcatgatattttgttatattttattatttggcaatattattgttttagttatttcaaatgtttagttacattatgctcgtaacaatgatatttttataaagtattaaacttaaaaaaataatgatgtttagttattacgtatttttctttatatttttaagttaacattaaaaattaggtgtgtaattagatatccaattgaaaaattgatccaattcaattaatacttggattggattttgagatctatttagattggatcgaatggtaatttttcaaattaattactaattagattagatcggatgaggataaaaaagttggattcgatcggatgtctagtcctacacttaaccacataaattgattttttgatggtaaaaccctcaaaaccgcacttttattaactatttacctcttctgtttaaaaggcttcgttaagtgtcacggtggacatgccacagtgcacagtgtacacaagtatacacgtggtaaaattttagtgagaatattagcggtaaaactatatgaactctatgattagtgacacttaaccacataaatcgatttttaaatggtagaacccactacaccttacgtatgttagctatttacctcttctgtctaaaagactctgttaagtgtcatggtggacatgccacagtgtacacaaatgtacacgtggcgaatttttaatagtccacataattttaattgattaaatattttaaaaaataattaagaataattttttcttttctttttgttttttgttttttcttattcttctcgttcttttacatttttctccatgtaaccgtaatttccaccaacactccctctctcttccgttctccttctcgcataactccgacaagtcacctccaaccaccttcaacccaaacgaaccccaaaaccgacttcccgaccttacaaatccaaccattca

SEQ ID NO: 125461 - DNA, 1172 bp, Cannabis sativa
ttacaataaaaatataaccattgagtagtcacccatataaatatttatatttataagcttcttctgaatcgtggttaactatactttgccttatacaataaaaagatctatttgttacaaatttttatataaatatatcacataataatatttctatacattttcttttccatttttatttcccaactaattagggaatcactctatatactatttttttaatatatttttttattttttatttttatggtttgaattgctctggtgattactatgtggatttgaattgcaatttaagttgctccgttagttgctatgtaaatttgtataaaaatactaaaaaattgctttaaaatgtaaaaatgagaaaactttatttatttattttttaatattttgtctctcaattttaactcaattaccaaaagtaattaaggagcctcgcgacatcataatttgatacgccatctaatgtacataaatgataccattatcttttgtaaggataatacgaaggaggtaagtgtagttcagaggtgtcttgaaacatactctaattaagtggttaggacaacaactcaattcaaacaagtccatcctttatgttttccaagattatcggtcaatgggcataaagtaagattgtggaattgttgaattacagagatttctcagaaggacatgttctttaggtaatcctttgctctctcctcgagttaatgacttccaatttgtgaaaagattttatcctttctcgcctagagggttggaaaagtaattgttatctcaagtgtgtagaatagttgttaggttacttttagcctaaatttcgggtcaatgtttagagtcgttttcagtctttgctattacttttaagacgaaatatacttgtttttctttattttcaggttcgtgtgattttgatatgtcaaatgcatcatgattcaaaaggagcgaggcatgacgaatgagaaaaatcaacaaaggaaaatattgcatcttgtcgcgacgatgatgacttgtgattgcggtgagatcgaggtaaaatggcatgaattccaacttattaagttgtcgcggcgaggggacttagggccaacgagcacttcatcaccacgaagaggattgaattatggctgcggctagttccactacaacaataatggtttata

SEQ ID NO: 125462 - DNA, 791 bp, Cannabis sativa
gtaaaataaataaaattgttatttattatgggtacttttagacaccctgtgcctaataataaaattgttatattaattagtacttaattaattgagcacatattaattaaaattttcaggtctattaccaaatggggacttcgagtatggtccaaaaccatcagaaatgaaaggaacattagtaacaagcaaaacagcaattccgaaatgggaaataacaggctacgttgagtacataaaatcaggtcacaaacaaggtgacatgttactaatagtaccagcgggtgcatttgcagtgaggctaggcaacgaagcttcaattaagcaaaaaataaaggtagcaaagggccaattttactcactaaccttcagtgcagcaaggacttgtgcccaagaggagaggctcaacgtgtcggtctcacctaactctgagcccaatgactggggcatgttgcctatgcagaccatgtatagtagcaatgggtgggactcgtacgcttggggattcttggctgaggcttctgagattgaaattagtgtccataatccaggtgttgaggaagatccagcttgtggtccactcattgactcaattgctctgaaactcttgagccctcctaaacgcggaaacggtacgtatccacatattaattatatatcttattggctaattttatcatgcatttccttaaaataggtgtactgatgcactcttgacttgtttcggcatccagaaaaaatttttagtctaattttttttcatattcatgtacgttataactatttaaaat

SEQ ID NO: 125463 - DNA, 698 bp, Cannabis sativa
aactatataattaaaaataatataaaaagtatgtgtataattttttatatctttttattcatttttttttttttatcttttgaactacaaaaagtattcacacctaattgcccctcctttaggtaatgtttcttcagataagatatttacatttatttttcctttattatttgcgattttaattagatttttttccttcgcaagttgattttacataaatttgacttcaattacatgggaattggcaaagagaagattattgaccaatttgaattttcactaaaaaaggtgtgaaatctgacacttcaggaaaaatattgatgaagggagatctctatgttacatatggatgatggtctacagtctacacaatttgtttctatttattcagtacatttttttttttggacaagcaattaaattgagataaaaatgaagagataaggtgctaattaaatttattgttttaaatgctatttcaattatcataatcggtggataatctccgtagattaaggatttttatttgatgggcaattccattccattatcggtaagaattgagaagtttctcatttccttttattaagtttgggaatcgaaggagataatctccttagattaaggtaattttcaactacctaaagtattatttttttttaattttttttttcatatttatacggtattttataaaa

SEQ ID NO: 125464 - DNA, 697 bp, Cannabis sativa
tggggtcggtggtggcttaggcttatcaactggaggtggtttcacgtaaactggggttggtggtggcttaggcttctcgaccactggaggcttagagtaatcagcgagagttgattgagtggcgaaaagtgccactcctaagagcaacaaaagaaaatgagaggaagacataatgtcttagttgtgttgtggtgagtgagtgagtgatattttgttgtactaagtggtttcttttatagtaccaaatagagggaaatcaattaatgtgtattcttgttttaggtgattttgggtcccattagggttgaaaattaaagtagagagtttggtttttgttgacggtggtgctatatttaggctttgaaatccgtctccaagatagactctcatcttccaaaatattatatttatatttatatatatctttgcccatgaagaaaaaaaaacattaatacaatttttaatttttgtatatgttagtaatatgatgaacatggttaaaagtatgggcatgcttagttttgagtaaggattttattttatgttggggtttaattgtcataaaaactatttatatttatttagaacaaataaaattatgatcacttttagtatatttataaattttgtcaacgttttatattgaagatccaagtatattgatagagatttttgaaaaaaatttcatcccacagta

SEQ ID NO: 125465 - DNA, 1535 bp, Cannabis sativa
tttaaaccgttgaagtccacattagcgatagtttttaaccgccacctattttgtccattttacgacgatcgtataggtgacagttatagaactttacgggaatatttcaaatgattgtttaaaaacgtcgagaaaaactatttttgtagtagtgttttgagcctcaccatcgaccccctctttctccctctatctctatctctctttcattttgaaatttttgtaattttttaagctttcaagaggaaaattaaaggcatttttggtggattttggtattggagctttgagaaaagtattggaggtaatttcattattttacttcttgatttcaacctttgcaaagtatgtattatattgaaaatacttctctttgagttgaacatgcatattgtgattatctagtgtttggattggttttttgtgatgttctttcattttaaacttgaaaattgctagcttgatgtttagttgagcttgaacctaattatttaggtcattttgtgatagtgttgttgagtatgaattctgaatatttaaattgtattagatctttgaaaatgatgatttgagcatgagttagtgtttggaatttgagcttgatttgttaggtgagtctaagcacatttagtttagttatgggaatgcttaaaaacacccttgtttcattagaaaaccaagtatgtgatttaggtgtaatcagatagttttggttaatgtttggatctagtaaaatcaagatttttgggagtttctgggtttctatgccaagtcgtcgcgaccagacctacggtcgccactgcaaggcttcacgcagaaaaaggggaaagccctacccaatcttgccttggcgagcatggggtcttctcgcgacgataaatggtcacaacgaccctgcaacgacagtttaatgtttgcctattttgtttttggagtaacttttgactccgaactccattttagacattctatatatcgttggaaagctcgtttcaagctctattatttggcacaatgttggagtcttaaatgtgaatatttatgaaatgtgattttggattaaccctattatgtgaaacccaagaattgtgactaggaatatcgacacttggtcaggatcacttatggattgggatttctccacatacgctggaagtcaagtaagacattgaactaagcatatagagtataaagcggtggcgtagttatatagtgtgtgattagtttaatgaaattgagggctacagttattaccctaagtatatattgtcataaatatatgataatgtattatgtgaataaatgattagagttacgcaagtaaggtataattaggttagacttggttgctaaaacccagataagtcattcgggccttatatgtaaaagagacgtgtgagcataatacgtaggtctatgttatatagacattagatacaatagtattattatacatggaataatgtgatatacagtgtagtgaaaaagttataacagaggcgtaatgtatgaaatgtgagaattataattgttct

SEQ ID NO: 125466 - DNA, 1510 bp, Cannabis sativa
  modified_base (29)..(52): a, c, t, g, unknown or other
tattacaggtcaaagaaaaatgtaaccannnnnnnnnnnnnnnnnnnnnnnnattgaatagtcacccatatatatgtattagctacattttgtgacaataaaatttgtaaagctttacactaaatgatataatatgaattattataaacacatatatcactactctccaaactacttaattatcaaatgaagtggcacaacatgatcttcacaaaagaaaattttaaatgatgaaaataattgttttaaaagaaaataatataagtggaggagaaggcaattcccaactcccaagtctcaacaagaaaggaaatatatatgtgttccttcatagtgccaaacggcaccaaacaatgtcaatgtcaatgtgtacatgctgttgttaaggagttacaccttagctattctccaatttttcattctcacattaactaatacccaaaaaataataataacaagttatatattaatctaataattcaggtgaacatttatttattttgatatattatacatctaattaataatatttgtcagtttctactcattttgcaaaaactcacatcatcatcatcagtagttgtctcctcatcaatcaatgtacctacgtatgtaaattattttcataagtttttaacattttttgtaaaccatcacatcacacatgtgctcacccccacaaaaaggagtacatggaaaatttggattaataaatctcagccctcaaattccaatcaacggtcaaagctaatgtgaccactggtgctacattttgggtgccatcacataagaaaacccttatataatatttgaagaatgttaatcacaacctcctatcacaatctcttagtcaatattcacgtttaaaattacatgttaaaatattttttttttcaaatttttttcatagcgatattcgttatagttacagtatcatctctgtaaatttttgaaaaattccgaatagttttcagtaccgaaaaacagagttcttaatatttcaatttaccacgcgtgttcaaaaaacttcaaacgtattttcagcacggtaaactattcaaagtttttcaaaaatttacaaggatgatgttgtaagcataacgaataccgccgtgaaaaaagaatattccgatatatattttcaaacatgaaagttgactaaaaaattgtaagaaaagattgacaatagcactcctcataatatttatcgtattttaaatctacatgtagatcattgtgtgacccatagatttttccctaagaatatatatatattttttaaaaccaagcaacatgaacatccaagagtagttacaataatattcatacatttatgagaattatttttgtaatgagatctcacttctctcacttgcaattattattttcttattgtaccatatcattagaatataaatctttgttatcgtgtatataaatatagggatacgattttgtctcgtgattgtacttttacagaatgtacttcgtgatgtacggcagccgttag

SEQ ID NO: 125467 - DNA, 623 bp, Cannabis sativa
attattattattattatttgtactgatcagtagcgtttgaggccacgtgaaataacatttaagaatttaactatgactattgtttccaaggataattattaagtcatataatgtattgttgctttctgtatattgtgaaaacatcatctcataactatttcttaaaaaatttagtacactggacaggtattcagtattctcatttgtctgaactactgtaataataatgtgcaacataaataatcgtacctagctattttctttttcactcacccccttttggttcatatcaaaactaaaataaagcaaaatatatgcattattatccaataacgtctatgaaaacactatctgactattactttttcctctaaatttctacatttacatatatataggaattgttatattaatcatatcacagcaatatgatatcaccaccaccgaatccgattacaacatacatatatatagtacttaataggttgggacagagggtggtagttggtaggtggcctaattcatatttattagatcgattctctcctcttatatatataacatttttctttatgtattttcatggagaaatgttaatatgcatcatgcatggcttccaaaat

SEQ ID NO: 125468 - DNA, 1218 bp, Cannabis sativa
ataaccacacaatattttgatccaaacacgattaaagctaataattaacagtacttaacaaaataatggataaaagctggtccattagattaggtcaatgctcttaaaaagtagccacgtgtacgtacacgatcacagcatgcatgaaaaatataaaagtaatacgactttacatatttatatggtgttcctctagaaaaagttcacaacctatgttcctctagaaaatagatagagatttacattatagtgcacttattatatataatcgtgtggccatcaagtagtgtcactatctcgtcatgtgtcaaattctcagagaaaaaaatcaagacatatgtcttttttttttttctcatgttggcaaaattaattaattaattaattctaataataatttatatagacttggtctagttttgttaaagaattaaaaacaaacagtgatcaataaagacccacatgtccctaaattatcgtttcaatgggtaataatagaagtagtgtaacgtgctttgtttatctatattgatcaagattagtatacatataagtgtttaatttagttattaatcatgtagagagagatattttatatatatatatatatagctagttctgaaacaatgtgcagtgtttggctaggtattgtgtccggttgaatatataaatatatatataaaaaaaagaaaaagagcgaaaccagtgattattaatactgcacacacccatatattttatgtacatatatacatatatacagatagatagatatattgatagagaactggggggcctctctgactattatatatatgatatcatatatatgtgtacatattgtttgctcgaaaatgataatatagattaataattatatatgatggtttcagtacgtacatccggtcccggacaatagttgcaaagccattatatttgtaaaacttttattttatccatcagacatgatcagtatatatatataataaactatagttcattatattggttttccttgggaaaatatgcatatatttatatactgatcaggcccataaatatatatatacgtgcatatataataggatcccactaaaattaacttttttaagtcactcacaagaaatttacgtacgtacatataaatatacatatacatatatatactagtaaaaatttacgtgcgaggcatgtatactaattttatgttaggtattt

SEQ ID NO: 125469 - DNA, 623 bp, Cannabis sativa
aacttttaaaatcccatagtaagtgtaattttctcaacaattactttgggatatatagataggttttattcttatttttatttttgtaattatagttttgacaaactataatttagttcttgagttataaagttatcaacttttaaagttattgattattgaattagtgctcataaatctactacactctaattgcatttaacaaaatttatttatatgaaggtgtaacacttttgtccattcaagctttttgagaaataataacaaatttttaaggcaaattccgcaacattattaatgatgacattaaattgaaacctattacatttaaccattgtcaaagtttccttctctattgatttcatggttattattagaagtttttacaagtttttttatacatgtttccaaaaatattcttaatttatgttactcatgtatagtacagtacaacctctattcaagaatacacttggaacaaggaaattatattctaattgaaaggttataactaaatacagttacactagaataaaaattcaaaataccaaaaaatatcaatttaacaacaatgacattaaacaatccttaatattatatcataatagaattatttttgagta

SEQ ID NO: 125470 - DNA, 790 bp, Cannabis sativa
  modified_base (27)..(32): a, c, t, g, unknown or other
atatcaagagtaatttttaaaaattannnnnntttatatttttttaataatggggtgtatttataattttatagggtgcaaataaaaatttccttatttttaaccttgtattttgacgtattaccaatttagaccttacattatgaaaattatatttttgaccttgtattttgtaaacaattacaattatcacccgtcaaaatttttttgaagatgacaaaattaaccctagttatagtaagagttgtataatttcagtcacgagctagctatattttagtctaaccactctacacttttaaaaattatattttgttacaaaatatgctataaaaataatttgtttttttaaaaaaaaattgtttcaattttgagtgttaaattaatattttggttaattcattcatttatatttgattgattatatttaaaaatatttcatctaagaaactagttctttatttaatttttgaaatagtgagactaaaataaaattaaaaaattaaaataatataactctttccatgattaagaatatctgagtcatatttaaaattattttgactttagggtcttatagttttttaaaaaatacaaggtttaaaataaaatttgtaaagtctaagatctaaattggtaatttatcaaaataagtcaaaaaatttatataaaaaaactttatttgcacccaaaaaatttataaatacaccttattttaataatttttagtttacataaaatatctctttaagggctcgtttggaatgtcgtattaagtcgtattgtattg

SEQ ID NO: 125471 - DNA, 956 bp, Cannabis sativa
  modified_base (46)..(62): a, c, t, g, unknown or other
cataaacctcgttgattagcagcgagctgcacagtatgtttaaaannnnnnnnnnnnnnnnntgctagttagggtgttacaccatggttcctttcagttgtgaccattgaaggaatagagtcaagggtggtggtaagagctgattcactagtggaagcttaaaatatgtttacaaagtacgcttgaattatagccgccatatgagatttggattgaactttgtgtcctgatttgttataaagaaatttgatcttattatttgatagtcgagcagaggcctttgcgtgaaaaaaaaaaaacttagtgtttttatcacctaagttcatccaatcgactcttgaatgttgttgccaatagaacccttcttgtttgccaccaaatattaaacatagacaattaaatgttataaaattatctacttataaaatttcatctttatttttattttttttcttaaaataaaatttaatacctaattggaaaaggaaatatttaaacatttttattagacacgtaaagatgtccaaaacaacattgtttacaccaagagtagtcctgatgatgtgaacatcaatgtttgatacatggaaagaaagatgacatcttagagttgagtagtctcgagtcgtagcaggtcgacctgggaggcgtccttagccttgcgcccaggttgactttgagaactccaaatagaagtttagacttcaataacttgaatctaactcactatctttcagtattttgtaccatgaatagatcgagaaacctaatctaagcctcaggagctaatattatacaacttgcaacccgaagccaacctaggcacctagggtttcacctggcacccaagttgacattcccaactaggatttcagtttctgagaccgtcttagtgcaaaagggtcaaaacttacattgggacatcaaatagacatactgttggattttatgcccta

SEQ ID NO: 125472 - DNA, 1343 bp, Cannabis sativa
tcatactccagctgagtatcatcatctcgaatccactatagttaatctgaacttgtacagataccacttgcataagtagcctaactagagctcacaacactcgatcatagaagattaatttcagttcttccacctaagcaagagtatacgaaagtccttacaagaacaacgctccaaagaaagatctcgatctggatctttgttttgacttgagctatttatagatatagcttgtgtaccaattcttactaactttctgattttagttgagaagttagttaaaaccgttaatatttaggaggattggcaccatatattgtttacttttctttggttgagaatataatatttaagaaaccattcaaaaatgaagaaaaaattatacaaagaaaatgaaaattaactactaaaactgtagctttattccaattatgattcactcactcagagtattgtctcattttacagcataggtaaactatctttgtaatgagaaaagcacaaatgagaaattgatacaattacagtattggtacaatttaatattgaattctacatattttactctaataaagattatagagaattactaaccaactataaatcgataccttataatagttctcctctatcttgtttggtataaagtggaattgaaagaatagaatttaaattaattactaaaattacaatactattctttctaatataattatttattattttttaaaaaccaaatatgatattgtatatatatattttgtctttttcttaaatctcttcattttctttctttttctttttgccaaacaaataattttacttataaatttctctcttttcttccactcttctagtgacggattcactaatgaaaaattaaatatatatttttttaatttgataatcatactaaaaaaaaaagagaaaaaaactccacaaaactaaagaaattaaataaaatagtctctaataattttttttacaataattaagcctccaattttaagtattaatatctcaccatcatatctacatggaaccaaaactcctactaaggattttctttcatccccaaattgggtggcatcgaaaatgggcttaatttattgggcctttcttataacaaagatgcctttagcccaataagcatgtcattaagccgacgtctatcctattatcgaccccaattaatagcatgcataactagaataataataataatattacataaaatttacacaaattattattgtaataaaatttttacatttttacgtttaaatattttttttttacattataaaagtattttataaataaaagtattttataaaaataat

SEQ ID NO: 125473 - DNA, 837 bp, Cannabis sativa
tgtccaatatctccccacattagcattaacaataaaaattaagtcctactgttttgggttgaagaaagagtcctataggacattaattataaaagtaggtagaaaagatgaaatattaaaaatagggtaaaaattaaaatagctaacttaaagtggatgctccacgtaatttctttttttttttttatagcattggattggaattttactattggcttttttatactttttgttgagtcggattgtttaacggttgttaatgcttttctaaacgttctttttgtcttaatgaatttagttctttgttggaggattagcaaattttgatgttctttttttgaaatgttcctaattcatgtacatcagtcggccaataagtttgctcatgcattagttcgacatttgtatgattagataaaaattcttttattgggaattctgtttttaaagttgtattatattatattttctttttcaattaagttattcattgttgaaaaaaaatcataataacctttcaaaagaaaaaaaaagaacaataataattaaatggtggggaaaaacaataataaatgctaaaaagtactagtggtgtttagtactctcttaggagtgtcactattgttagtgcaattaagtatcgggtctcatataatttaatgtaatagcttttagagagtatcgctagctaatcgtaaagtgacatatcaagaaggtgctagacactactactgcttaatagtaagagtattgctattaggcaccaatagtgtctagtaccttctcgacatgtcgcattgcgattggctaacgatactctttaaagctattatatta

SEQ ID NO: 125474 - DNA, 671 bp, Cannabis sativa
cttggactctgagggtagaaatcgtctgttatgttgcactggtatagtgatgaattgcatttggaatttcaggaatgcgttgatgcatcctcctaatgttgttccgagcttggataaaattaggagggatatccattgtcgtttctttgaattgtcgaatcaggagatgggggattcgactttcattgattctggtttgtctaatcccactcttcctgttttgcattcagacaaatgtctattggtggatggttccttccttgatggcaattttggttgtgcaatggtggctctcgatcaacagtcgacgcattggtggtatggacaatcgtccggtacttgtgattctagcttggaagctgaactgaaagctgtcctttttgggctgcagtgggcatcatcgatcggttgggataatttctctatactttctgattccaaaatcctggtggaggctatcaacttaaagaaattgccacattggaagttcattgctctattttcctcccttttgcacttgatatcctctttttcttgttgtcatgttaatttcattaatagggaccttattacttatgttgatgttttggccaaggctgcccgtttaaacttgtcttctgcgcagacctttgttggggagggatttccccctgtgaatcccacttctattt

SEQ ID NO: 125475 - DNA, 1004 bp, Cannabis sativa
tgtcactaaaaatcactcttgactctttagtgacatgcacttttctgcgtgtcattatatagtgtcactaaaaaggcaaaatgtagtagtgaatgaggtaaggcatgagcctttcgaaatagacatgcttcacagaataatgccttttcattgattaaaatttttacattaacatgatccaacactaattgtaagactcgattggatgggtgacgtagtctcctatgccacttatcctttattgaaatggaatgaggctcaacaacatgttggctcttttttgtttttgacactaaacaaaaaaattgacacactgcagtagaagaggatggagacttgtggtggtgaggctcagacttgtgacttcccaactggtatagaccttccttaattgtcccttgaagaagagctctctttgtgtccatgtccttcacaacacaactggtaggaaaaaattcaacagagacattattgtcctgagttagtttagaaatactgattaaatttttagcaatatgaggagtatgtaaaatattgttatactcgaaatttggttggaggacacgtgtcaagataaagggaatgtgaatcggtgccataactcattaattgcgtaagtatcagagtatatttgtaacccgctaactgtaaggtcttaggcaaggaatcaatgtacgaactggtacttagtgtattaacgagaaaccataagtcgctaaaggagaatagtgaggcactggagaagagtaacacataccttagcttataataagcaaagtaagtgtcaaagtcggaccggctcaaagaacaagaatgcgagataaccatctctctacaagaagcgagactcatatccctgacaagtcaaaagatttccacatactcgcaatcgacgtaaaatatatcaagtcaacctcggaaagaaggatggttccagctcgccattgggatcactacaatcacgtttctgtcgagacatctccagattcaacaattaaagacgt

SEQ ID NO: 125476 - DNA, 1078 bp, Cannabis sativa
agctcatcgtctaaccgcagagcatgctttgccaaccataggccgcgaaaatctaagagtataatactaagagttaatcaaagttggattaacttaattaattaatcctatatttaattacactaagagtataatactaaaaaaaaaaatactaaacaccaataatattttttgataattctcttaaaaataatatgttcactgtccacattttattttaattaagttaatccaactttgatcactttgttctcctaaacaaaagcttgatcaatatttgtttatcaaaacgttcatcaacattcaacacatacctcaaatagctaaaaatgagcaaaaaataatagtgatactttaaaataatcacactacttttaaatatgtactcatgtataattatgtgtttcgaaagcataattaaattacataaattttagagtaaattgcggcataaatacttaatattttagattttatacacttttatatttttgaaggcaaaaatacctaatgttataattctttctcttatactgttattaccacttccgttaactcataaatatgaacacgtgaagggttcagatgcattacatttattttaattttattttaaaacttaatatttttaatatcagaaactaaatgctacttgtttcaaaaaaaaaaaaaaccagttctcatactaattttcacatgatattgacacttcaattcaataatcatgttccatatattgcactgattcactccgctatgataatttagtattgcatctctcttattttttttaaacaagtagtatttatttttttgatattaagaatattaaattttaaataaaataaataaatataatgcatttgtgccctctacgtgtctatatttacggaagtggtagtaaagttgtaagagaattgtaacattaggtatttttacctccaaaaataaacattaactatataagtgtataaaatctaaaacattaggtatttacactgcaatttaccataaattttaggctaattaggatttttgcctcctgaactttgacatgtaccaaatattgccccctgaa

SEQ ID NO: 125477 - DNA, 922 bp, Cannabis sativa
  modified_base (26)..(67): a, c, t, g, unknown or other
tttcattgttttagagatattcatannnnnnnnnnnnnnnnnnnnnnnnnnnnnnnnnnnnnnnnnntggtaaaatattcccaacatgtactccatctatactctttctttggattacgttgacatgccacgtcagttgaaaaaaatttgggttaatagtacccaagggtacttgctagataaattgcatcttataaggctgggaattagtgaagtaccgtctctagtataacaacttagataaatggcgagtcttaagtcatacatttaactataatagactcgccattaactctcatatagagtttctacagaaaccaaaaatgagattaaggttgtacatgcctacaaggccttaacaaaacccttgccaaggtcaaaagagaacaaaaacttggttgcccgcttggaacctaaccattggccgaccagggttcccaagctaataaagggtcgaccagcattccatgacctagccaagtgccaacaagggaccccaagcccaagcatgggccgaccggactttagggtaagcccatatggtcggccagctcccatgagagaccacatggctggccacgtcttaaataagagcttcatggccagccagggtgtgttactgatcaaagtttatgtttttcaattattttgcgttccaaattttactttttaaatgttcttggtttgacaacaatgttggagtaaaaactgacgagcttagttttactttggttgatttaagtaagacaggaaggaagaatgatcaattcatgatggctagccaagcaatttacacttctaatctggcttatgataaatggtttgttattttatcgacaccagagaggaggttcttagagaatgaagaggatgaggagaatggttatttatgttatgttgacttcattgttggtcaatcaat

SEQ ID NO: 125478 - DNA, 991 bp, Cannabis sativa
  modified_base (27)..(36): a, c, t, g, unknown or other
ttccaataaatatttagaaaattattnnnnnnnnnntgtttcaaaattaatttaaattgagactaattaaaaatctctcaaggtccagttctcgtggaaacccttcaggagtgaagaaatatcacaggaaggtccggttctcgtccttcgctcgtccgccggcatcgccgatcaacgacaacctccttctgcaagtcttgtcttctgtgacatggtgtgattgattccgggttgtgttttgatgtttttatcagttgagtctcttcttgtttgagtcttggttcggttgagtctggtttctctgggttgtcttcttgttttcagtttgcttggtttgtttggttcgtttgggttcggtcgtttttctgggttgagtctcttctttttgaggcttggttcgtctaggttgtggctggtgagtgcttgtcgtccaggaatacactggaacgggtgggttgtgacttgtgagagagtttattaccattgttaatgcgctgcttggcttacagaggactgatcttactttttggttgtttttggtttgcttggtttgcttggtgggacatagccatatatctctttcatagtgtttggaataataataagaataataaaggaaagtttggtgtttgtttgttggagtcaaagcccacgagtcagaaagaggaaagaggaaagaggaaagaggaaaaaggaaaaaggaaaaaaagaaaaaggtaaaagtttcctcatttattagatatacttattaggaagtttttatttgtttgttggtaagaaagagggaaaagtaatgaaagagaaaaaggataagttttctcatttattatatttatttattaggagaaagtttattaggtgattttttttgtgtgtgtgatttgtgtgttctgcgttccggttggttgttgattatggcttcgtcgagtgtggctatgcgtgatcttgaggaaggatgtgcaaatatcagtattgagggtgaagacgatgg

SEQ ID NO: 125479 - DNA, 1191 bp, Cannabis sativa
ttttaaaaaatacagggtccattttgtcatttaacaaaacacagggtccaatctgtaacttttgcaaaacacaggatccaaaatagtatttacccatcaaaataaataattttctacaccatataaaatttggtgataaaacaatcattaagaattaataatagctaaattttcaaaaaaaagatatattaattgcttataatatatcaataataaaaaataaagtgtccaccatagtatattatttttgtaacaaacaatcaagttttataatttttagaacaacaaagaataaaagatgtgaaagtaagaatattagtggagactacatcattaagatagatgaaaataagaaagtgattatgtttaacaggacgagaagaaacccaaaaaaatttctatgatttacagattttaaaaaattatcagaaattatttttaataattttttaactgcataataatcattaaattaataataattattaaagggagtcaaaaaaaaaataatcaaaattaaattctaataactctggaaaaaaatcgtcgaaaacgaagtccgaaaactatcatactttccctcactctccgtcagccgtgagtgggcttcatcccagccagttgttttcaacctctagtcggtgctccaggtgggttgcacgacccagttctctggcagtcaggtctggacaaattacgaccaaaaaacgcgacgaaaacattagaaaattgaagagttttttttggaatatgatttctaatcaatctatgagatcaatttagagtaaaaacagctaaaaatgataaatctaattgaagctcaatctaaaaactaagaactaaaataatccaattattgtaattatatctcatccaattcaaaaaataaatcttgtaaaaacattgtaaaacaattattaatgagatatgcataatcaatgttaatcaataatcaatataataaaaaaaaaactccaaatttgatttcataattaaaatacataaactctaagagtttaatcgtaaaattcttccaacttactcaataattttaagcatataacatattaatagaaagaaaatttaacaagaaataaaacccctaaagttttaagattaaacaacgaaaaattttaacataaaataataacaaaattaatatgtaattaaaaaaaattaacatatacatat

SEQ ID NO: 125480 - DNA, 1196 bp, Cannabis sativa
  modified_base (1158)..(1170): a, c, t, g, unknown or other
tgatcttttattaattattaaatctgattatatcaaaataggtttcatttaaggcacaaaattcaacaccactctccccatacttatttctcttgtgctcagaaggccactcctttctcattactcataaagctcaatagtctaaccctcgtaaacattcccttggtattgaaattgcacgcactaccccaataatttcacacctattcttcgctgacgacaacctactcttcaatacagctccccaatcgctacgactacaatcaaggatgtcctacatgattacagcctagcttctgtccaaatggtcaattaaagaaagtcttctctctgtttctcacccaacaccaacgatcgaggacatacaaaaccacatcacctctctccttggcattccaattcaggactcaattgagaaatatctaggcttgccctaaacctttggtcgatcaaaaaaagaggccttcaattacattaaggatcgggtctagtctgatttgaacaaatggaattcaaaacacttctccaaagggggaaaagaagttctcttgaaattagtagtcctagccataccctcttatgccatggtttgcttcaaactcctagctttctttcattccaagcttgagtctatgatggctcgcttttagtggggaggaactggacatcatcgtaaaacctattggaaaaaatggtcctcccttagctattccaagttccatggcggtcttagtttatgttcaatgaaagttttcaactaggcgatgttggccaaataagcttagcgatcacttcaggctcctcattccctagttgcaaccttattaaaatctcgatattttccccacacaaccttcctagaatctgctaaaggtcataggccttctcttgtttggattaatatctcttcggggaaggaacttctcatgtcaggtctttgaaaatcagtgggtgattgttctacattctcaatctttaattaatgacgcttgaatcccaggatatggcaagttgacctacctaaaacacatctgagatggcagtatggtagtaccagactttataacccgtactaaagaatggaacattccaaaaatccataatatcttccctactgacatcaaccaagccattatctgttagaaatattttaccagnnnnnnnnnnnnntaccatgtatgtttcattaacatcct

SEQ ID NO: 125481 - DNA, 1029 bp, Cannabis sativa
ttgtcacattccattctaatgtcaaccaaacacggtaatattactttcctaggtttatcattcccttcatcactctccaagcaatgttaaacctattcccatggaatgaaacttgcataccaaacgacccctttacgtcatcacttgccttttctacttgcatcaatcagatatatttagacaggtgggccctgggatccatcccgccctcatatagctccatctgaggcattgtaaagtgttccagcaagggtgcttctattattcttctcacgcaaggttccaaatcttattcttctaagttagatacgacttctacttttgagtcagatacgaccccactttatttttgggcaagtcattttgtgaacttagtcaacttagctatttgatcttccaaatgcttagtgttatcatcttggaattcaagctcacagactttgtcattgatgtgatttctaagattgtttccatgaggcctagccttctcacctctagcttgttctttttgcatttaagtgcttctagaggttcgctgtagagaaattatcttctggaatgggttgaacctcacctactctatcgctgaataatatatttttatacttgggtaccatgcctatcattctgcggaactctacctcgtggatcaattaggaaatttttccctggagcattaaccaccttattttttcgcagaggttggttggcagtattcatgttgttccttggagtagtggggacaatcttttttattggttcctttataacacccttttatctgtcccctgtgggatcagaagttctagggtctttggtttgttttcctgaggagcatggtcatcaagaatattgtcatcgcgagccacttcccctaattcaattttggcctccagttttgctagagtttctcacatttgatggagaattcctcctgatctgccaactgttggaagttattttaccaggaacttggatctactcacaagtatgttgatttaacaacctaaagatgaacttctaaaacga

SEQ ID NO: 125482 - DNA, 1562 bp, Cannabis sativa
ttacattgtttcagaaattcatatttaggatgttaaacaacatacatggtagtaaatcaagatcctggtaaaatatattccaacagagccttcttccagacggtcttacgtcggcagccaccatgcatatctctttcttcagctctcaatgaaagcaccaaaatgtttatcgagtttttttgaaaccaaatatttatagagccaaggaaaataatgaaggcgtaaatagcaagattataggaaagagatttttccgtggttcaggcattaattatccttagtccacgagtccattttattaggctctttggccggcgactgttaatacaaatagaaaaaagaatggacttttactccaatccaccgtgttcctcttgaagaagaggaagcttagtaggaatattctagagttgattatggggttacagtacgatgttttacaaagaattagtctttagtttcaagttgaagagccaaaggaaggaaaagtgaagtcccctgccttgtgagtcttcatgggtatttataggccgatcccctcgcctcggtcacctttgataaatttttgtagggatgaacccctgccgttggattggtaggtgacatattttccatgtggtctttatcgatgtcagattatactggctgtactggcagtgatttcgacgcgtgtcattccagggccaatctcatttgaattatccttcttcttagccgttggatcatttagcacagtacacaggggcacacgtgctctgcatggtagcgtggtgtggtagacaacctctgacatcgtacaagcaaaaggcccaccattggatttgtagcctgacatatgtgggcagagcttccgtgggtcaaaagcgtaccccgaactagtgcatcttgatggaaggtccatatcctttgctggagcaatgggtctcgtcttctagaatggagagagttgctagctcgcggacatctctctcgttgctcgcattcgagaagacttctcttgcggaggtcagttccccgaggttaggacctttatcctcctggagcgcggagcgaggcccttgggcggcttaatgattcctcgacctttcctgattaattcccacgtgtcatgcttgcgaaaatgcggataatacatattattaaaaaaaataaacaaaatattaataattttataatatagtagtaattttttacctataaattaaattaatttataatcttaaaagatattttttattattttatataaaaatgaattcacatatctctttccatataaaaagtaaataaataaaaatatcaaatataagtatatatatctctcttcatacaaagagtctttttaaaaaaaaaagtttgaggaaaagtacttgttattattaaacaaatagagaatcgtttacaataacagagtagataggcggaggaataatctccaaccaagaacaagcctcatccaaccctaatgcaaatttagcaagactatgtgccgcttcatttggagtacgtttaatatgtgaaacaattattttagggaaaaaggataagagactattaacatc

SEQ ID NO: 125483 - DNA, 1344 bp, Cannabis sativa
  modified_base (26)..(36): a, c, t, g, unknown or other
  modified_base (1279)..(1281): a, c, t, g, unknown or other
tattttcactttttcaattttaaaannnnnnnnnnnattaaaaaagtgttaccaaacggcacttatactagaccattaaaaagaatgtaagagtcttatgaattaaaagtcaaattcaaactcttttatattaaacctttaagttattacaatgtgaaaataatttttacaatagtcatattaatataagaatccaaagctcattaaagaagaaaagtataataaaaactaatgaaataatatgaaaaaaatgagagagttaggattagatgataaaaatataatattattttagtatcgtaaatttttatattatcatttatttatattttgttcaatttttgtattaatagtttattttgtaccaaataataaataaatgtgtacaattactacaaaataaattatagtcaaaatatcatacttattcatatataataattaataaatatcattactcatatagtgttgttgaagaaaaaaacatggaataagaaagtgtgttagttggaaaaaaaaattgatagctaaacctattaatgtatagtaaaaataataatttatattattataaaaaataattaacctataatatatatatactttacatggactgtttaaaatatatatcatatatattttatttgtagttttttatctttcactttaattcaatttatttatttctatgtaactctccctataactagccattataatgtgcgcaattattatacatatgtaaaatctttctctttattttctatgtaaaggctaatcttacatatactatacttgcttcaactttttccaaataacacaaatttattatataaatattatataataaaatgttgaatttttttctttcatttatttactttattattattaattttttattttttaaaaaataatgacaatattacaattacattttttttttatttcaattgacattttaataacaaattgaataaaagcatacaacttaataataattaatactagatatataaacaagaaattattattttagttttatattttctctttgattttaaaaatatctcatcattattataatatttacaataaacatttcattatgagaaaattattcttatagacccttttcatcattataatttaaggtacaaatttcacatccacataatttatttaaattaattaattcttttatctaaatatttcatataagaaaattatattacttactataaaataatataatataatataaagtagatgagaagannnaagaagaagatgaagagagaaagagaaagtgaatgagaatttttgagttgtttattctaatgg

SEQ ID NO: 125484 - DNA, 1194 bp, Cannabis sativa
taatattcaaataaaaataggtcaataaagctatatttaaataattaattaataaactttaaatgactaaattatcccttgaaaatagaaaagttgctgatgttatctccctatttttgtggactgtcaaggctgaattcgctgcttaacttgctattcacaaatgaaggttgctcatcaaatgcctactaggaaaatgctcgatgtccatgcaccttccagggttcatgctgaccggctacacattgctttgaagctgaccggccacacagtgcttggaagtcggccggcctatgctggccacaaggctagctaggggtagttggccagtcccttgaggtgggtggttcatcatttcttcatccctcttaagtactcagacgcctcgtttattaaaataatgagtagatggattggccgtcttgttggtgagttgtactctcacgtggcattgatattgtccacgtggacatgcaacatcaggtgggcaaaaattgggataatattttccctccaagttcttgtgcggacgtttgtacagatagagactttattagcttagttggggctgatgtagccttaaccaggtagatctcgtagtatattgagcctttgaaatatttgatcttacttacatgatcacattccttagcaataacttaatagcaatacacttctagatgtttattgatgcatgttgcatggcaagtgagaggaggtcccacagaagctttgtaagctcatggggggactcacttctcatttcccacatttcattctctgtcttcaaaaataaaattttgaaagctcttcattctctattaaggccgacgacccctagtgctccatttcttgagatcttcatgttattttgatgattcaagcttcccatcttcttcatcaatgatttctactagtgggtaagctttcaaatcctgttcttcaatttttttatttagattttcaatgattgctttgaagcttttcttcattttgaacatttttcgattcctacattagattgtaatctttttggtattatgatccacatgatagttttagaatgcataatgtatgaattcctaatgaaaaagattcgattttgaccttcgttgtgattcttgactctttgagtcacaaagaacatgaagaacatatatgagtttttgaaaaacacacattttgatccaaaac

SEQ ID NO: 125485 - DNA, 2971 bp, Cannabis sativa
  modified_base (1034)..(1036): a, c, t, g, unknown or other
ataagatctattgacaattggactatgattaaaatcaaatcattggtgttatacctgaaattcggttgacaatttagaggatgacacgtgtcaaccttgagggatacgaagcaacatttataatgacaattatattaaaagatatcaaatggaataactcattaaatatgcagagtcaatagggtatattaataactcgcagacttcatagtctctggcgagacaaggatgcacaaactattgactcatgtataaatgagaaaccattttgcgtcagaggatataactgtaaaggatgacatcgatagtacatagtgaggcatcaacctcgcaatgtgtagaaaagtgttgacgagacgtgtaggctgttagaacacttagcgtataatatacattatactaactaaatgtaacaacttgaaggacgtaaatgatggatagcgagggatccatctcgctatagaaatgcatactcctggtaccttcactaatcagctccagacatctttcaatgaattccactgctacgtcgcgtcagctctctcagaaagaagctgacattcaaatgatgttggctactgaagttcaccctgtcaccaagaactgcgattgtcagatggagcatgtcttcaagcgcaaaaatgactagatttacattactaacctcggaaagacatgggaaaagctccagctcgctgccagggttattgttgttattgagtgttcaagcacctagcgagatgtcccggcgaggtacactttgcagtgtatctaaatccacatcagagttgacccattaaaagaggttaaaatcatagctatatgattttcaaataataactgcatttatttacgttgggcataatcaaagcccacaatttcaaggaaatattattatgggattcgtatctgaatgtaattaactgccaccctatgtcattataaacaggggcagaatgtacagaaaaagggataaaaaattcttgaaagaaaagaaccctagtttgtatcagaaaaatctgaataagattgannngtggactatgcagagttaactgcaaaaccacgtaaaaacttggtgttatttttgctttattattctttcttagatttctatcaatttctatgttgatcctatcacgaaaataggcttattatcgttaacaaaattctgcgttaccagtttggtgcttttaatgagagcctacgtgataaaagctccacaaaaatccctcctaaccaaaagaaaaattttcttcatggaagataatggtgaaaacgatagtatttaacctgaagagactactgatcgcactggaaaagagtcggcgggctcagggaggtctcctaattcacgaacaacatgatctatacgatcaacatgttcgagaagaaaccaacatgaaagtgaccaagacctagaaacagggaatgtggagcctaacacgaatgttggtggttctacatccatgagagatggcgcctatgacccacgagatatgtatcgttggttgagttggaaaattgtcaactctagtgacgtttagaggaggcaaaccaatggaatactgaggttgaatgggaggtaaccgcagccagggcggcttaggaagacaacactcaaaaccaacctgatcctggggtgaggaggccatgaggtagacctcgtggctcacaaaccaggaggtaagagatagtacagggggaccctcaaaacgctcaggaagaacaacctggggaaactaaggatgcccttgaagatgagcaactgaataacctggcacatcatcaagaggtgcctcggagaccccagagatttgcaacccaggggaatggaaactgtgatttaccagaatcctctcgcaggaatgcgagcagaaggcaaccgcgtagagggagtaggaaatccctcgtggtaacgagagagatcctgggactcaacctagggcaggtgggttgccaccaagacaccgtcaatgtccttcttgaactgatagggaaggggcgcatacgaatcctagcaggggcatgtatcaacccattctcaaaggagaaggccggtgcatgacgaggccagttctagttctggacgtacaagaactcatagtcaatctacgcaaggaggggatagaacttgtcgtagtactgatcgagagagtacgggcaaaaataaaactaaaagttactcaaggacaaggtctgtaagtaactatgattcacaacaatcggatcttcgtaatcaactaaaccagaagaagcctaacttacgccaacaacttgaccaaaagcaagaggatcttatctaattacgaatcaacgagttggaggataagtttaggagataccaagacaggcaatttgggaaacttcgtggttacgactcagacgaggagcccgagcctttccatttagacatcatgagtgcaggattaccttagtgattcaaaaaccctcacgtctcgtcatacgatgggactacagatctggtcgcacacataaataattttaatactatcatgcgagccaaaaatgtaacaaataatttatgctgtattttattccctacctcactagttgggggagcgagcagttagttcaacaaatttgcccatcattcaatcacctcttgggaacaactgtcaaaaggctttaagaagtagttgcaggcagcgagagacaggcgacctgaggcgtcttctcttactaacataaagcagcagtcgggcgagacgcttaaggcctacctgagtcgttttagtatagctgctgcgagagttagaaatttgaacggtagtatccagcttactgcccttaaggcagggatcacgagcgatctctcaactgctggaggtgagctgtgggataacttgctgggttgcccagtgaaaaacatcagcgagttcaatgagagggcttaggtgtttgttcgaaagtaggaagcaagaaaagagatgaagttgttaaagactgg

SEQ ID NO: 125486 - DNA, 583 bp, Cannabis sativa
ttttgccaacacaaaatgaaaagtcctggcaaaaatgacttttctcagtgcgtaaatgcgctggtaaaagttagttttagccactacaaatgtgcgctggtaaaactttgacttttttgtcagcgtagtagcaaactctgctagtaaaagtgacatttcttgtagtaaatattgtcatacaaaaaaaaaatattctaacatgtatttttaaacaaaaaaattgagaaagaaattgtaatagaaaatggtaactcctccaaatttaattgtcatgtaaagaggtatcacactaccctacaatattattagtggtcatcgaaacaaaacaaatatagtttaaaaaagagaaatattaaaaagtatgatacttgagttgtcatattattattggtataattcactatcagtaattcataaaatttagtttaataactattatataatattaacttttcagtctaatttttttttttaattttcaaaaaattttaaaatagtttcacgatcgaaaacaagtggtattgtaacttgttgctccaaaattcgcccaaaatacgtggaccagtcgagaggggacacgtgg

SEQ ID NO: 125487 - DNA, 1274 bp, Cannabis sativa
  modified_base (42)..(70): a, c, t, g, unknown or other
  modified_base (1238)..(1240): a, c, t, g, unknown or other
gtgaaccatgcaacataaaacgttatttctgatctttattannnnnnnnnnnnnnnnnnnnnnnnnnnnnttttatttagggcacaaaattcaacaataataacaaaaataattggataacaacctaactttcaaaatacaaattaattcgacatcaacatattaaatgaacagaaaaaaaacttacaaataggacaacaacaaccttaaaagaaatttaaaaaacataaaaaataataatgtttaaatgtttttaaataaataaactgaaaccataactttgttagaataataaacaaattttgttggaataaaaattatgaaaccatgatttaaaattattagagaacaactccaaagtaatatatacattaaatatacattaaaatatttttttcaactaaaataaaattttcaaattaataaaagaaattactcaattagaaataaattagactacaactaaaaaatatacttatgaaattaagcatatttttatttttttattatttgtgattgtaaatataaaaaaaaaaataactagacaacgacgcaactttaatataaaaattaaaaacacatcagtattgtaaaaaaaaacttaaaataacctatatatatatatcaactaattacattttattatataaaaaaaaaaaaaaactctacatcaaatccataatgtaccgacaaaaaataaagcaacaagttgaaaataaactaaaaatattcacaagaacaactacatataaactcaaaattaatcatcacactgaaaaaataagacaacatttcaactttaatatgtaaataaaactagacaataatatattgagtcaacaacctaataaatcgtaaacaaatacaaaaaataatttaataaaataaattcacctacaaattacctatacactataaacttaactatatatatatactcattttttattggttcaacgactaacaaataacttaataacaactccaaaatcaactaactaataattgaaagaaaaaaaaacacaaaatttattcacgataatacattttttttaaataactacaaatttaatcactaatataaaatcattacactaaaaaaaaaataagaaaataaattattttaagaagaatcatgatgatgagctaaatctagagtaaacatggtttaagatatacctaaacctattaaaattatggctgattagtaatttttctccctgaattttgacatgtannnaatcatgccccctaaacttttttggccattaaaa

SEQ ID NO: 125488 - DNA, 1386 bp, Cannabis sativa
tttttttttttttttttccgaatagctcctagcgctgcgacgcccattacctgtgcaacaatgccgtcatcttgtaaattgtggattttcttcttttcatgtttttggctaaaaattttggtttcaaattagaaagaggctcgataaattagagagagacaggaattaagaagaagaagaagattggagcgagaagttggtgatccgtgacaattccaaaactagtttccttctatttttcttttattttcgatgtttatattgatgtttaggttgattatggagattatgaactaaactcccaatttgaggatttgatggacattgcttaagattattttatgagttaatattagtaattacttgttctttcttccttgattgtgtgatttattcatctttgtatttattacatgtttaagcttgattaccttgagcatgatttatgatactgatgtgaaatttgaaaagtgaatgttgggaatactctaaataaataaacataggtttttatgtgaagcaaaagtatttgcatagcttatgtgacttttaaattattgcttaatacaaattgtttgatatactatcttagagatgcagtaattgacatgaaatttatgacatctatgatctaaaaagagtttaggttaatctatagtatatcatctcacatgagaaagaagaatagttaactagtattaacaattgggtaatcaaagcaattgaaatcagtttcctaatttcttatatattgattgaacttttttattgcttaaaatatttttctgcattattgtttccattattagtttttattttaccaaatagaaatatgaatgcaatttggttaatatttagctacaattcccttaggttcaacttcacctgtgtgcagtactagctacttgttaaatggtacgtatacttgcatagcttgaatatttagcaataaaaatccaagtcccaaactaaaaaattagttggttatatttccccagacttgaatatttcactttccaaaagtgattcagtactttctaaataccatcttcttcgtttgattttgcaagtgggaaatctgaagcatctaagactccaccgtcctcttctcgattcaagttccaatctcagtttggactcccaatatatagttaagtataccctaaaatgttaggtatacttagtattcccaacatttataattaaactgttggcattcaatattttcttttaaaaaaattcatttagtcggttctctactgttaggattggtttatttcaatggttaatgttgatataaacctccacttacactgatacttaaacaacatacaaggacagaactgtaaatacaagtaaaagccctaagttgaccttcggtctcta

SEQ ID NO: 125489 - DNA, 660 bp, Cannabis sativa
aaaaaaaaaaagaaaaaagtcatctcaaaattgtaatgacagttagtgactaactctttctcagttggtatatataaagagttattcattttttgttttgggattaaatattccgccttgggagataatcaaataaaatagaatagaaattaaataatttttattttattctttttttgttgtattctaaagtattgtaatattatttaaatagaatattttttttctatcattttgatgacataattattctattttgaaatggaaagaaaaatctatttcaatacaagaggagaaaaaaaattaataattattttattaatttttttatgtattttaaattcgattatattccattcaaattcttattcttattcttatgttttcatttgtcacaatcaaatgctacataagagattacttggagttgtaggacttagagagagctaagcttagatcttgagagactgagcaagtttagattttaacttcaaacagtttttaaaaacaaaaaataatttttaaaaactaatatgggatggttggctaaatttttttaaaatattgttctgaaaactgagttaagaaataattaaaaattagagaacatcaaaatattattttttattttcaaaaatatttttttttttgtctaacata

SEQ ID NO: 125490 - DNA, 739 bp, Cannabis sativa
cttttgatggacatctattgatgagacaacatgcagtttgcaaagcttctccccgaaatttcttatctaaaccagcaccccttagcatgcatcttaccctttcaagtaatgttttattcattctctctgcaatcccattctgttgtggtgacttgattacaatcttatgtcttgcaatcccattgtcttggcaaaactttgtgagttgatatgagcaatactctagtccattatctgttcttagcttcttaattattctacctctctgattttctatcaactttttccagttaacaaaagttttgaatgcttcatccttagtcttgagtaaaaatacccaaactcttctggtgtagtcatcaataatgctcatgaaataactagcacctccaatggtcttagttcttgatgcacctagagatgagagtgcacatagtccaaattacccttggttgtgtgtaatcttagagtgaatttcactttactgcacttaccatacacaaactcttcacagaaccccaatttctttccaaatttgcctttgagaatgccctgtttctccaattcatagagacctctctcactaacatgacctaacctcaagtgccatagtcttgtgttgtctctgtcactattcttgacaactaagtttatttttccaacaactctcttcccttgcagaaagtaaatcccatttttgatgtctcctttcattactatcctagtacccttcattact

SEQ ID NO: 125491 - DNA, 1751 bp, Cannabis sativa
  modified_base (1673)..(1690): a, c, t, g, unknown or other
ttgatatgtgagttattatgtagattttcgtaaaatacaaaaaaaaaatattttaaagtaaaaaaataaaaataaataaatccttattattattatttatttattttgaactggatataattgtacattgtgtactaattttaataaaaatatttttagttatatttagttaacattcttttttagtatttagtaaacaacctaagagaaagttgtaaaaggtggattttagttttaccttattcgggaatctattttatccttaaaaaacgatttaaggcattccaattttattaaaatctaatatatttttattattctaaaaatacatataaataaatatatattaatattttacaaagaaaataaataaaacaaaaaaaaaatacatgttaaaataaaaataattaaaattattcattatttttaaaattattaaaataataaaatgcttaaaattaatacaaaatataaatcaattatgtgaaaaaagaaaaattgaaaaaaaaaataaagttttaaaaaataattaatttaatatttttttaataaatggagtccgagtatctttgtattacacatcctttctcctttaatgaatatttgaaaatacctaaattatcttttactaattataatgtttcccttataaaactttttatttctaattggtgcaataaaattaagagggctaagagtatttttaatagggattattcattagagtggtcttctcaaatatgtaatattttaaaattaattttatttaaagtgttgctcaacataaataatggccacataatattttttcttttttttcaaaaaaaaaaatttattagaaaaaatttattttttacttaaaaaaatcattaatttaatgtgatgtgagataattgttagagttgtcaacttagaatattttttattttttaaaaaaatgtgataaatactatgtagatgatagagaaaataaaaaaaaaaaaattaaataatgtaaatattttgacaactataaatatttcttataaaaaaattattgtccggattaaaaatgctctaagaaaactctttttttatgtactttctacaaactatttatatgaaaacaattttttcctttgtagcttcaatatagaggaatattttatttttcttatatgataaatatgattttttaaatcttttttttattcttatgtaaattaattttatttgaattcttagaatttttttgtatatataatttgtttactaaaattaactcaagatcaattcatgttattgaatcataccatataattaattgtaataacaaatattataaagaaaaagatataatattaccaaaaaatattagatcaaatataaataaaatggacaacatcaattttcaaaatatatatagagtaggtgtgaatttatttttagtagaataaaaaaataattatgatgtctactttagtctttttgtataggacaacaattcaatatttcaaaaaaaaaaaatagatataattattttatcaaacactacaccaattttttctctcacaacatatatagttacagttgctatggattattttctctctcatatatatggtttattgttcttcttctacttttgtcttattttcacaaatttacaatataagtacagtagaacctctatnnnnnnnnnnnnnnnnnnagaataacctctaatttgttataagaaaatcaagtcccgatttgggccagttataaataag

SEQ ID NO: 125492 - DNA, 849 bp, Cannabis sativa
gcagtctgttgattaagaaggcagaggctctaatagcctcaacccaaaactttagtggtagagatgcatgggctaaaagagtcaaggctgtttctatgagatgtctatgcttcctttcagccacaccattctgttcatgagtggtgggtcatgaaagtctatgatgtatgccttattctaccagatattaggtgaatgcttggaactcacctccccaatcggattggaggtttttaataggcaagtcaagttcttttttccacttgtgttttaaaattaataaaggtctgaattgcatcagatttatttttaagtaggtaaacccaggtgaatcttgagtatgcatcagcgaagtgggcatagtaataatagccattagatgagatcatgggtgatggtccccatagatcagtgtgaatgagttgcaagggttgtgtgtggacagtttcaaaattggcaaaaggaaatttatgaatctttcctaaacaacatgctgaacaaaaatcagaaacagctttattaatatggtgaatattacaatggttgagtacacttttgactgtctttacaggaggatgccctagtctaggatgccatagttgaaacaatgaatcattgtttgaagtagatatagactgatcattgttacaaaaggtggttactggtatagtctgaacattattgcaggttgcatttaaaggaacatgtagattacaagattggtctgtctataatagatggaagatttagggagtgaaacacatataaaccagcttcaagagtaccctgcagcagcaccttctgagtcttctgatccttaacaaggcaataatcaaggtgaaactcaaa

SEQ ID NO: 125493 - DNA, 766 bp, Cannabis sativa
gttgtactttctgagatgttctctattctagtaccttggtaggacaactagttccatgttctcaatgtacctaccaagtttgtacgcaccttgacttgttatctctctaactttgaacaaaccttcccagtttggtccaaacactcctactgtaggatccttggtattaaggaatgctctttgaagcactaagtcacctacgaagaatttcatttccttgacttgtttattgaattacctagcatctttttactggtaggcatgcaactttaagttagattggtcttttctttcttctatttcgtcaagggattctgccagcaagatgtggtttacttcttggtcatagtaggccaaaagtacccttgtataagtatcttttgggataggcttttccccccggcatgatttccatagaagcctttatgcacttctattagtagcccttcaactttggtcttggtgacacatcttaaaagtggtattgagaaaccacatctgtacatgacttccttttcaataaaaccacctcttgcaacttacaatgtcactcaggcaaactcagcctagtgtaccaagcatatagtatggactacccaatcaaaccttgtactagccaatagcttttaaacattttgttgtgcctctctacaattgcacgtggtagttgtctttctagcatccctgaacttaactcaaagtaaccatcatcatctcctctctaggatgtccagtattcccacgaagaaaagcaacccagtctcaa

SEQ ID NO: 125494 - DNA, 1032 bp, Cannabis sativa
aactataaaatattatagttataaaaccacattagtatattatccaacacaagctataaaagcccttaatcaactattaataaaaataacacaaaataataagaaattatgaatcgatttataaaaatcagaatgaaagagcaaaagaaaaaaaaaatcaaagcctgaatctaaaattaggtagttctatttaagatttttttttttttttgaaagaattataataaatcaaatctaatgatactaatggtagcaataaccagtgccctgtttggggcagctcctcccactcaattttttctttttttttttcgcttaatacttaaaattttgttactaaaaatttaatatatatttccctattttagtccatgttaatttttacatttgtgctcctttaatatatatattgaacaatatatttgtatttatatttataatttttttaattatattttgttttatttttcactccggtaaataaaatttttgagtccaccaggggcaagaattaacatcttaaataaaaaatcaattaatcacatctaataaagttgtttacgactattaattaaagtttaattattgtccacctactagtgggattgaaaagacataatctatatacacaagtgtatatattgtcctcctaaaaaaaccatagatgtataatggtaaatattactgtttagttttaatcatacacacgacaccttaattctttttccaataaactacatttttaatttaatcaatttagtctcttcttccatctaaagtttttttttttatgcaatcgacacatttttttttatgaaaacaatttgttatcatatataataaaataacattgttatattaacactacctcctagtaaatttattagcaagtttgcatataataattataaaattaaatcgtatgagaattaataattatatcaatatatgtaggggtgttcatcaaactgttcaaaccgttcaaatcgcccgcaccgcaccgcaccacactgtaaaaaaaatgcggtttga

SEQ ID NO: 125495 - DNA, 1168 bp, Cannabis sativa
atgaatgatttttacatcttgaaaattggccagcacctttcggatttgatgcagcaggttgctttcagccgagtgatacggctccaaattgttgatttcttccaccagcaccttacaatccgattgaacttcaatctggctaatagcctcagctggaggatgcttcaacgcttccaggatcgcccaagtctctgccatcttggctgaacaaatgccctctttgtaaatctgaccagcagcaaggatttgtccatccttcttacgccagatatagccgaggcccataccagcagttttatccacgactgcggcatcacagttgacacaaatgcagctgttagcagggggaatccacttcttcatattggtggtggcatctgcctcttgctgcaataaatcacttccagttttaggcacatttgggtaagcagaaaaaatccagtttaaaagctgctgaccgttcatataaggaagttgctgccacttcctatttcggttttcccatatagcccacatcactttgatggtgtcttcaaaatcgttcctggtattcatttgttttatggccaccaacacatcaaacatggaacctgcctctagtctagagcagtttttgtaccaagaacagagtttccaagtggttctcactttctcacagctccataaagcatgtgtaagggtttcctcgtacctgccacacatatcacagcaagtatttatgtccatacctctgtgtttcagattagtctttgcaggcagccagttgttgcaaactcgccagctgaaaagcttcatccgagggggaatttgaaggctccataacattttccaccacttctgaatctcatccatgttggagcaccttgtgggatgaagatttagctctctactaacccgatatccacttttcacattataatggccattaggggtaaaaggccaaaataatttgtcttccatgtataaatctataggaattccttgaatccaaggactatcatcttcatgaaagtatgtagctatctcggccatattccactctccttcctcagttataaatttagaaagtttggtttgaggcggaaggtgaggaaatttagatagagtagattcatgaggtctagggagccatttatcttcccatactttgatcgttcttccattaccc

SEQ ID NO: 125496 - DNA, 1039 bp, Cannabis sativa
attctttgattagcaaagattgtattgtaattgaaaaagcactgtggcgtgccttaacattagggcgttacataaacttaagtatttatgccgtaaattactctttttttatgtgttaaaatttgaaacttaaaatatattaaaagagaaaagagtgtatacaaatttatgagagagaaatagaaagggtagttatgggaaaatatatagcagaaaacaatttaaaaaaaataaaataattatatatttcttgactgtttgattaaatgattaataatcatccaatgattattattattaatattattgaaaaaaaataataaatatatgaagttttgtaacgcccattacactaggctccaagttttcacatggcaaaaagaaaaattaactaattaataaattactaaagtaatattttaaatgcaaattttttatttatttatttttcgaaaatataagtggctaaattcaaagagtcagttgctcaaattatttttaccatataaaaatattttttaacacatcaacattcacatcatattaaataagatttttttgataagttaatttcacttgtatatatattttagagcatattgatgaaaaatatgattttttttcatttttatttattaaaaaaatataagtttattatgtttatgtttattaaatattataaatttctacacttttttatttttttctttataattcctcataaatattaactaggctaatttagatttttgacacctaaattttgacacgtaccaaatcatgctccgaacaatcgagattattagatttaaatttttttgtctaattttactaaacaaagtctaatgtggatgaaatacccactaattatgatagacgtgtaagatttactccacattgtgccgacaggtcttgatgtataacgatcgagtaagtttgaaaacatattgttgaccgaggttttcgacaaccaatacaatgttaaaagattagagagttgtaagaaaattagagcaggatttttacgtggttggggcgt

SEQ ID NO: 125497 - DNA, 1959 bp, Cannabis sativa
  modified_base (1531)..(1531): a, c, t, g, unknown or other
  modified_base (1865)..(1893): a, c, t, g, unknown or other
tatctataaataattttcataatcaaacataattaactgataatttccaaattaaactaagcagtctttacatcgctggtctgctaagtcactccctacaaatcttcccgctttggatgctaacgtaggagtgttgactccattaagatatggggttagcaagccagaagccataacctagaaaattgccttccccatgttcatattataccaatctccatcctcaggccattcacgaatgattaataactttccattgatgatccagggtctatttcgaaggatttccacacaatcctcaggctggtcgaaaaagatgccccaaacaccacgcttcatagtcttaaatttccaatgccccttgagtttccagatcttgttgataatctttctatatctagacctaaatactcccttgccactataaaaaatgactagcacaccagtattgattacatcagctgttagttcgaaatctggttccagcacaagagtcatgactccaaaaaattattgcgtaggacatcaatatcttcatttcacttattaatgttatcattggtaggaggctcaaccaacccttctgccacctcattattagtggcttcgataataatctctgacgattggggtagttgagaaggaacatcagtcacaataactttagggggcccattcacaggaacagattcctttgtaatggaatcacatgggataccaacgttgtctcccatatcaaccacaagacaagagacaaaataaactttgtaatgaaacaataggcaacgagacaaactccttaggaataagttttagggaacaaaacaaaactttgtattttgaaaaggagaaaacgaagaagggaggcggtttactgaacagtcgagaaatcaggatattaagttgaaaactattaagattgacattgagtcaagttggacttcccaaaactctcacttgagagaaaaaaaactattgtcctgatattcagagaactaacttaaaaatatgaaacaaaacatttttttttctgaatatccagttcagattatagaatatgttcaacaagtacactccaaggattgaaaagcgcaacaactaatatttataataatgttatagatacagctccgaacacttaattaggcaatgcaattataggattatcagattaaagtattaactttcctgattaggcaatgtggtgtaataaaaatggttactttatgaggtaacatatatgtaatttatattattcaatgaatatggcttctattattggtataggggttttgtattactaaatatttttatgctgatgtttattcgtgacagatgtcagtagtgatttgggtttcattttatgagtaatgcgtaatcattggattttaattgtctgagtataaatgattatattgaatagtaaattttatgattgttgttattatttttcttattgggttcttgtgactcacgagtgctatgtggtgcaaataaaggagaagaaaagctagatcaaccatgaggtcanagtcttcttcagcaatgtacatattgaacctaccggcctgcgtgccgagttaccaaaagttatttggggtgtatctgctatgtttttatttcatattttgacttatcgttgtatttagcctttttgtaaaacttttacattagggatccacgaaacacaattttagtgtcgatatgatgttcgtttttatgttatattttagtgaagtttttaatattatcacagattctaataattatttatttttagtactaaacttaaactagtttataaaatcacacacatggcgtccctatagggtagggcgttacaactgttggattttgtgccctannnnnnnnnnnnnnnnnnnnnnnnnnnnntactaattaataaagatccagaatcattttatgctgcatggttcccatgatttatttcatgattat

SEQ ID NO: 125498 - DNA, 1332 bp, Cannabis sativa
  modified_base (418)..(428): a, c, t, g, unknown or other
taaatcttgagtttcatcacagatacctggccatgttgtcaagaagtatcagtgtagaatacaagcatagtggaatcgacattcagtgccaggttaatcctttttacttttctcttgaaatcaatatatagaataggctaattaggattattttttttccccgaactttgacatgtatcaaatcatgttccctaaactttttctttcgttaaaaattcttcctgaactattgagattgttagatttaaggatttttgtctaatttcattcaatgttattgtttcagtgattatttatgtagtaaacaatgctccctagattttaatatctaccaaatcatgtccctcaaactttgatatatactaaatcatgcccctgaagtttcatccatgttagattttttttactaaaattagannnnnnnnnnnaaatctaacaatctcaatagttcttgaaaaaattttaacgtctaaaaaaattcaggaggcgtgatttggtacataattctaattaattagcctataaaatatatattgaccaagacatgagaaaatagagatatgtctttatctcatattaatgtaattcaagttgaaatagtttcactatattggtggggtgtcattattgacaacaactttgtatgtatgcagattccagtatttgtggccacaaagatgacaaagctaaaagaaagctcaatcttcatagcatcccctgaaacatacagcaaagcaagtgtaagaagcattgggtatgagcaaatctgtaccccttactgggctcactctctccaatggttcatagcaaatgcattgcctgatactttactcaattggggcattctttcctactttgttgctgtaaataaggtggcaaaactcaaagagtctaagaaaaaggcagaacaacagaaaactgttgttgatgagtcaaattagagtatgataaactacttacctactttcttgaagatttactagctctttgtttattttaaagattaggtaacttagtatgagggactcttcaaactattttgttttgttgtcccactttttgtgactttgttaggaaatataggtttgattctgttggtatgtatgtgattggagctttattatcttgctgttcagctagatatcatcttgaaacaacaataacattatcatgagaagagaggacaaagtgaaagaaaacgacattaaaatgaacaagacaaaaatttaatatgaactgaaataaatttggaaaattatataattttaattttatttacagaaaatattgtctttttatgttgtactctagttaatttgttgttgatttttt

SEQ ID NO: 125499 - DNA, 1583 bp, Cannabis sativa
agtaatcccgattagggaattagggtttcataaatattttgggtagcgtgcctaattatttagggcgttacagtagtagcattgtcttctacagatactgaatacatggctgcttcagaggccattaaagaagcaatatggcttaaatgattaacaagtgaattcaacatcaactcagaagatatcacaattcattgtgataaccaaagtgttcttcatctcttgaaatctcatgtttcatgagaggactaaatatattgaaatcaaaatacactttattagagatgtgattcaatccaaacaagtctctttgaggaagattaacactcaagagaaccctgctgagctttaacaaagagtttgacaagagacaagtttagactttgtctagacttactcaacatcaactctaactaaagtctcatctatgacacactttcattggatttaaagtgtactaaaccaggtagaaattgtgacgtttaaaactcttagacaatacttctaactaccttgatagttggtagttaagtgaattagtcttgtcctaactcactgagctctataaatagaaggtttatgattcacttgagaaggggatcaagttagtaaagaaaaacacaaagaaaaaccagcttgtaatcgagatgaattctcttagtaatgagttgagaatgaggattgtaaaagacatttctatgtgtttgattggattatcttaagtgagattatgattgtaattggtgtgtatcaccactagtgtttttggtccaagtgtttgtaatattgattcttgccatttaatatcaaaatgatcacaactaacagagctattttctatttggggatcagatccaagttttattcaaaacttgtgattgaacctcactaattgttcatttttcatttctggtttactggtttactggtttatgtttccaaccttaattctatcttgtttttgcattcttgttggtgtataagtgtacaacaaaatttttaaaaacagtttttttttttggtatttatgaaagtattcctaaattttaatttttgtaaaataaataaataagtaggattaccgaacattgtacttttagaattaacctactttattatatgcttatacagtatcttgtttgttataatgaaggataaaaatattttataaaatttatagtcccaagaaccagattaggtttataacatggatgaataaaattaaaagatattttatgagtagatgagtacggagggagaccaaatacggcgttgtggacccatttagaattgcaagatctttacgtctttagtactaaccgcacgatccaccgtaacctaaaagctgatcaatcttttgggagcagtagtgtgtaatgtattttatatatatatatatatatggatatatatatatttgtgggtgattctacaatggatctcttaaaaatgatgcattgatctgatacactcttaacttgtttcggcatttagaaaaaaaaatttgactaattttttttttcacatttatgtacgttatagctatttaagatatcatataaatttttgaaaaattcagaata

SEQ ID NO: 125500 - DNA, 1617 bp, Cannabis sativa
gatgtagaagaacattatatttcattgaaaaacaacttcttttagtgataattttttagtcacaacatacattttttgtgattaaatataacttttattcacaacaaaaaattacttctgactaaaatatagaatttagaaacaaggtaccactaatttaaatttagtcacaacaagtattgtgagtaaaattacatttagtcacaataaattataatttttgaaactaatacctttagtcacagaccttttagtcgcaacatagaattgatgctttataattagttacaacttttttacttttagttacaaattttattataacttaaagaaaaaaaaatttgtagtgttttaaataagatggcatcaataatattgcatatttaaaagaagaaaaaaagttaaaattcatacattatttgaatgtatatgtgtaaactttaaatataactttctttttacatgttttacttattacttatataattgtgtttggcctattcggatttaaggaatacccaattttcgctaaatattaattgtttacaacacggacaaaagattttgttggtttgaaatatttgatacatgttaatcatttaatcttttatatattattttctcctaccaaaatgactctttctagtctataatatctctatattattttcccttctttgccaaacatgatatgatatatagatatgattactttctttcctatcatctcaatttttattctaccaaacatataatgattaagctaataattaataaataatataaataaagatacttcaactgttcgaatcttctataaccacaattcgtatattaacttctagaatcttattatagttatatattagtttgagataatatatattattaatcatgtatattatataatacaactatacatagtaaagtcttatatggttgcattaaagtcctatagtaaagtcttaaatgacaatatgtacactagaatactgtaaagacatacccaattttttcacattatatgattaaagacgaaaaaatataaatttgaatacggtaaggaacaatgctataaattaacacgacatgatatgaaaaatattaaatacaacacgatataacaagcttgaaaaatagtaggatatgcataaaaaagataatatgaatagactaataaacttgaaaagtaggacagacaagcacaaaaaagtacgatacaatacattaaaaaaagcttataataatcataataaatatatatttgtcaattttaaaataataatacttaaatacaacactaaatgtcataataattctataattaaaatggttagaaaatattaaactaaaattatatattaaaattttacacatttcataattaccaacgtattaattaattaattaattaattaaagaataataaaattgatattgaaatagatattttgtagctacatactaagattttgtagctctagactagaaaaccagtaaagaacaatagtgaaaaaaaaataaaaaatacacaaaaattttaggctaattaggatttttgcctcctgaactttgacatgtaccaaatcatgcccactgaacttttaaggtcgttaa

SEQ ID NO: 125501 - DNA, 852 bp, Cannabis sativa
atccacataattattaatatttataacaatgacaaaattgtttatattttttgtatatgctcgtgttaggaattattatcaaattggttttattacaaaaagttgtcaaaaattaagcttagggtcctatttttatcattttggaaaatatataatctattttgtcatttaacaaaatagagggtccaatcgttaatttttacaaaacacaggatccaaaatagtatttatccatataaaaatgtaagtaaaaaaagttgtaaaactatttagtttttaggtgtattgtgtaaatttttctataaaatataatacgaatgtgttacaatttttatagaccggtctaatttgggttggcctattaaaataattgggaattatttcacaaatgcacaaaaaataataaaaaaattataaaaatacgattttacagaattttaaatatttttatatttttgtaattttatttataaaaaatacggtcttttgatgtatttttatgttgtacacttattaatttgctgttaatttttttattattgttttgatattattttcctgtgtaatttttttattgtttttatatatttttttaaaaggctattattttcatgttatttttataaaatactctaaaaatataaaaattaaaaaaaataataattttaagtaattatcctaaaattaatctcaattcagccaactttcttattgttaatattatgtcgaactaattatcgaatcgcatataatttaagagcattgctattaggcaccagtggtgcttagtactttttcgacatgtcgcgttgcgattggctagcgatacttcctaaaatctattatattaaa

SEQ ID NO: 125502 - DNA, 1218 bp, Cannabis sativa
aaaaaaatctctcaaaaaaatcacacgtgaatgataacttaatagtaccagtacttaaaaataaaaatataatatattattaccataaaaaattaaacttaattatttatgagcaaccgaaattaaatttaaatatttatgcatcaaattattctattaaatatctatttttgatttttaagtgtatcaaattttataaataaataataaaagaaaaaggaaaactcttttctcccattttctctctctccgcagatcggttctcctccggtggtctctctccccttcggtggcctctgctctttttctccgacctatcagacagtgagtctctttctctcactctgagtacttctcatctcattaagtggttttgcaatttataaattaacaaagggaagcattttatgtcttggttttgtggttgattttcgttcaaaggttcgaaccatttcgttatatattatatatatttttgttttgttgatgatatatgctggatttgagcctcatttggtattagaactgattctttctttctttctggtatggaattaagttctaccagctcgattaaccctaattatgaaactccatttatgtgtgtaattgtatgtaagaggtcaggagtttaaatggggaaccagtaattgtttcttattaaaattaataattaatgaacaaagggataattgctcttatttgggtttaggattgaatcacttcaattcaatccttgcttgcacactagttattgtgcttcttctggcccctttctgtgaattgtctttaatgatgtcatattattctttattatctatttttgaatgtattgaataataggttgatactgttgatggtccataaagttgagactagatggaatggaacttcatggttggttttttttcaaaaacaaaaatgatttttttttttttgtttttaatgcttttcccccttttgctttcattacttaattgaagacatggccataatatttcttaatgtcccattttgattccatttattacttgacatttggtatatggtttttcagctcactactatacaatttattgtccaataattctgttgtagttgagcttgattcaaattagttggattcattttctggatttttttttggattcacttcacttgttatgtttaagcaaaagattgattttttttttccttctaaaaattctaattttcgtt

SEQ ID NO: 125503 - DNA, 918 bp, Cannabis sativa
  modified_base (891)..(892): a, c, t, g, unknown or other
ggtgaaacttttggatcaagtggctggtatgcgtctgagctgcccttggagaagtgggctgcttgcagcagcgtcgacgccttttccttagcccatgctgccaagcctcaagaagtggggtaagtttttgacttttccatctttgttctcaccatcgtgcctggcattctcatttttctttagtgtcacaggcgactttgctggcagaaagggccaatgaggaagtaggaactctagtcatggaacttgagcaagccaacgctgagaatcgagaactgcattatgctaatagggcccttcttactgaacttgtggaagctagagctcaactcgagggcctaaagagagaaaaggagctactggaagacaactacgactgacaaacttgtcttatgcgaggtatgagaatacttagtgatcttaacagggataccataaagaggatgcaaaaggaaaactcctatcgaccatccaacagtactcagatacctggagattgagtagttggccgaggtggtgatcctctctggaaccacgacctgtaatatcttttactcagccctcttccctttcttctctttattttgtgaaaatggttttaattatgccctaactgcggggcagtcagtaatagcttcaagtctttatacttttcatctgagctttaattttgatttattagtttactagaccattttaagggctgtcatcttaggttatttttcagatttgtgattccaacgaccaacacttcaaaacttaaaacttaccaagttttttattcctctactgatttaggatgtgtccaaagactcttatctcctattttcaggtaggattgttactattgtaacgctttgtgaccattacagtgttgggttttatgccctnnataaaactctttacaatctgattagt

SEQ ID NO: 125504 - DNA, 1422 bp, Cannabis sativa
tctgtttctttattgatgttgaataaaatagattacattgaaatgtagttcaagaagtgagcctccggagaagtacaaaaagcatgtccttcctctccgggagctagaaacatgataacacatttcttggaggaggaggacattcaaacaatcacctcacatataatacaacacggggaaagtgtttgggaatgccgtaagaggatatgtcagacaatgtaagcctcgtttacgatgattacacgatatcaaaacggctagtgacaactccattatgaagagtcacatcaatcaaggaaggataaagattaatgtcacttaatccctaagatacctacgacataggttaggcatgtcctattttgtatctcttgggaacttgtgctcatacattgctggcactcaaagagaagttatcgcttttgaactatccccacaaatctctataaatacccatgagaaaaatgggaaagggccggatcgatggaaagagagagagaaaaactcaccaagaacattctctgtatcggaaatctaattaataacaaagactcgtggactacggctcattaatgctcgaacaacgtaaaaaatcatctccattagttatcccaaaagctctcatcattatctcatttaatgattgccgaaaacctcggtcaagaaaagtcaagtggtctgggaagattcaaaatccaaaagctttgaaagatatgaccaaataatgtgaatttcatagcgatcatggacacatcacagctgaatgtgtagcactcaagttttaagttgcatggctacttcgtataggacaactatgagatttcctttctgataaaggcaaagcaactgtagcagaaggggataaaagataagagagtccaccttaacccgttcagaatgcgaggaccatgaatgtgatctcaggaggatcagaagttagtgaattatatcttgagcagctaaatgccatgcacgagaaccaataaatagtcaaggaaagccgagaaagccagagcagtcgttggacagaccattagctttgtcaatgacgatgcaatagatttgcttcaccctcaccatgatgccttagtcatttcattatatattgcaaattttttttattaaacgtgtattaatctataatgggagttccaataacgttttatttctcactgctctcaaggatatgaaagttgatgagtcaacaatcacccgcaaatctacagtcttaatcgggttcagtggtgagcaaaagaactcaattagagaggtcaacttgcatgtttgggcagaaggagtaaacctccaaaccaagttcatcgttgttgactgtccttcttcatacaatgccatcattggccgaccatggtgttggaaatattttagcaggatctagatttacaaacaagtatgtttcattaa

SEQ ID NO: 125505 - DNA, 698 bp, Cannabis sativa
  modified_base (597)..(598): a, c, t, g, unknown or other
gttttagtaattaagaagataggaatcaactttagcataaatttcatctaaaatttaagatttcttttcatgaataatattgttcctatcaaaccaaatataccacgtagtgcaaaaaaaaaaaaattccaactcagatttggtgtgagttttcgaaagatggaacaaaaaaatctctaagtttcatgacactatcaactttgaaatcaaatgttaaatttgagtgactccaaaccttcttagcatgtttacaactaaacatggcatatcccaccgatttctaagcattagcacaaagactacaagctgctgaagttagagtcttcttctgaaacaaagaagtcgcacaaggaagaatattatgcatagccctctaaccaaaaattttgactttggaaagaagctaatttaggttctagaaggatatccaccatgcctcttgagtaacagaactggatgaatgattctcttctgctagagagcatcctagaaaattacttgatttcacagtatagttgtaacgtccccgcttcaagcctccattgggtccttacacccacggaatgaataaattttatacacgagtacgtcactctnnctgcttcatggattgatgactgaccctacagaccaacacgagtattttcagcgtgctttgtcctcactcacacgcatcctgagaaaacttcacaggaggt

SEQ ID NO: 125506 - DNA, 517 bp, Cannabis sativa
atacgaattacttctaaataagtattatttattgatgaatgagtattaataaaaaaattaattataaattctaattttaaaaatattaaaaatttaataacaaataataaagaaaatttgattttaatatttaatttaactacttaattaaaatatatataatctcttctaacactaaattaaaaatatatttatataaaatttatttaaaacaaacaattttttttttccaaattaccttcagcctataatataaaaataaaagagttttttaattcaataaaaaattaagcataaaaattaaaaaatttcaaacaaagaaaaaaaaattcgcccatgcttaaaaaagaaagaaaatataaatggacccaaaattatttattgtatatcaagctagtgtgtgtccccatatatatatatacatctctcttttacaattttggatatttaagctggcagcaacttgatgagctaaagttatataaattggatttttactccatacatcatcttatct

SEQ ID NO: 125507 - DNA, 958 bp, Cannabis sativa
agttgtgaattactccttaacagcccccctcaaactcaaagtggataaagagaccactttgagtttgtccctgagaaaaggaaacctgctactcgatattgctttgctgagagaatcggctagttgatcttgagctggtacatgatgaacctgaagttgattttgcagaaccttgtcccgtacaaagtaaagatcaatttcgatatgttttgtacgagcatgtagaactggatttgcagccatcattactgtactcaagttatcgcaccagaccgtgggggttgaggagggaacttgcagctcagtaagaagggattgcagccatgtaacctcggttacaactgcagcaagacttcgaaattctgcttctgtggaggatcttgatattgtttgttgtttcttggatttccaggcaactagattcgagcccaacaaaacacaataaccactggtggacctcctatcatcgggatcagacgcccaatcagcgtcacaaaacgctgagatatcaaaataagtgtttttctgcaagtgtaacccgtaatcaagagtgcctgaaagatatctcaagatccgtttgacagctatccagtgggactccaatggtgattgcataaattgggatactttgttaaccgaatatgcaatttcaggtcgtgttatggtagcgtattgcaaggcaccaacaacagatcgatacaaggttggatcgagaactgagtcactaccatattgagagagttttaggccactggtcatgggagtgctgttggatttagcttgctgcatttgtgttctgcacaataggtcttgtaaatactttgtttgtgacagatggagacctgtggtagtgtgagtgatctgaattcctaagaagtaattcaagttaccaaggtctttgagtggaaagtgagagcttagttgggatattagatgagatacttcattgtcattgctg

SEQ ID NO: 125508 - DNA, 517 bp, Cannabis sativa
agaatcgatgtacaaaatcataagaacaaatagttcaagaatctaagaatcggtcaagccattccattagcaatttcaatgaatcaaaataagcaactagagaaacacataatcacaatacatatattatatataacgtttaaaaatctgaaatatattgaaagatttgaggagatgactcacataaatcgccaagaatttcaagaggagcataaatacgagaagagaacaaggaggaagaaaagtaatcaaaatattttgagttgcttttgaagaacccacatatttggcgcgagggaattagagggacgaaaagggcagtggaagggaagttttttttttttttttttttgaataactaggaaatattgcacgtgtaagtcatgtgctacctaacatttagtatatataattatatataggaaatgtctatagtggagaccttggttttgtcctatggtagggatatttttctagcctttgattattgatgtaatggtaataaagttaaggaaac

SEQ ID NO: 125509 - DNA, 1219 bp, Cannabis sativa
  modified_base (27)..(38): a, c, t, g, unknown or other
  modified_base (90)..(115): a, c, t, g, unknown or other
agaatttatacattaaatataatcatnnnnnnnnnnnngtgaaccatgcaacataaaataatttatgatatttattaattagtaaatctnnnnnnnnnnnnnnnnnnnnnnnnnngggcacaaaacccaacagttataaccctagaaatcccaccaatcctcacgatggacaacctgggaaatgagggatatcctagtagatgaagatggcccccaaaatccaagaaacattggcaatagagaaaatcaacctaacaatccaggaacctcctgtggaaatacaaaccttgggattgtataacctgaaaaacttagagcatctcgcatgaacgcagatgctaaacaaacacaacctagggatcaagggtttactcaacacgatgtgaggggtgtaggcagtcagcttggctcaagttaaccaccgagacattcatgaagggcaaactgaaatgatagagacaacacgtatacctacctaagtaggggatgtgtgtcaaatctattttgaagatagaggctaatgcaagaagaaccttatgaaacaggatcaagtattgatcctggcgggtcaagattaaagactcatgggcagagtaaattaaccaggacccatgtacgtgaaagacaaacactagtggggaaggtacaagttgccactatcaagatgattaagaaagcatgagtaattcataaagttatcagtctaagagttactctggaacgaggtcggttagcaattatgaacaaagaaatgaaaggcgacatgaccctgatctacggaaacacttaaatcgtagacaaccctaataagccacgagtttcatgttcatattcaaacgcacgagctcgtaggctctacggtgctatactcgcaagatgacctttgagcctatcatttggatgtctgtgtctatcatgatcgcataatcagacatttcatgcgttgaccacgtggaacacgtgaatccctaatgagtcgtcaaacacattagtcattcggaccaacccttatgtaaagaaatgatctttactagtcgcaggagaggtctacttggtcatctcatataaccggtatatgcgcgatcaatattaaatcctctcggtcctgcttattcttttgactaaatgaggtatagtatgcgactagaccctatcttggttgcatcttctcgcaagttctcttcaagcgaggttagctctactagagctattttattta

SEQ ID NO: 125510 - DNA, 1585 bp, Cannabis sativa
ggacaacatcagattctcttttcgatcaaataaaaggttgctagagtggtgtccattttagatgagctgactactctattcaatgaataatatctttgactcctgcgtaaatgggacactgtatcagtttcttggaaaccttggaaaataattaaatatgttttaattttggtattttttgcaaacatattttctacacttgttattttttgaatttgtgtatgattttatttgaaccaagtaatttatttctatttattgatatttgtagtataaaaatgaacaatcctcaccccaatcctcaactagtatatgccattgcaaatgaactccatgaagatgttgagagcatcacttcacacttaattttgatgaactcaaaattccagaaagtaaattttttaggaattattctatcaaaggagaaattgattcaatttattctcaatagcctttaacctaagtataccaaatttattgtatcatgtacggttaacaattggaactcgtccgacatggataagctggatactgaattgtgttttaatgagcggacattgtcacttcccaggagggctcgctccagtgttgtagaggagggcaaaaggaaagctgaagatattgaggatgattaaactgacaatgttgcatcttcgagttcaattataaaagatagaattaaaattgaaccggtaattgagacaatcaaagaacaactaagtagacgtattcttctatgttctcactgcatagagaagggaaattttaaagcaagatgtgttagacttcttaacatcggaatgaaggtaacacttttgtgtttgaatcatgtgttttagagaattacaaatccatttggattattgattttggatctactaaccatgttttctcttcattacagctgcttgaaacttaggattacttaaatctaggggagttgaagcttaaggttgggaatagcgaatttgtatcggtccaagctagatgaaaagctcacctcaagtatcagaataaatttttgattttagacaatgtgttgtttattttaaatgtttgtagaaacttgattagtgtttcatgtttcaagacacaaagttatcaattgaattttttgggttctgtttccactatttctcgtaatggcatttaattgtccgttgctcacatggaataagggctttatgctttaagaccagaattaccaattgcgttcatgaacaaacttttaaatatttctaaacctagaaaccatacaaaatcaaaagattaataataatgatgaaacatatctatggcatttacaacttggtcatttaggctatgatagacttcataggttaaccaaagatggtcaattgaaaaatgtcaccttcggtgatttaccagtttgtgacacttgcctagaaggtaaaatgactaagtgttcattctctgccaacagagagtgtgggaaagaacctctagggttagtacattttgatgtctgtggagctctaaatgtaaaagccagaggaggttatgagtacattgtatctttcattgatgattactctagatatagttttctttacctaatgcaaaa

SEQ ID NO: 125511 - DNA, 629 bp, Cannabis sativa
aactaaattagtgataacttgaatctaaatgttatattttagtcacaagtaattttttgaatttatgttgtgattaaaaagttgtcactaaaagtgatcttttttttgtagtgaattaacgtgtaaatagattattaagaagaggatagataaggatattttgaatgatgtatataccgtatatgagatacggtgatgacaacgactttgactttgaatgtagtggcaactacaagtaagagtactgcagttttgaaattatagtttttaataaatttatatagtaacaactataaataagatacggtgataaaaatatttttaaatgtagtggcgactacatgtactaattttgaaatctgactttcaattattcatattatatataaaaattataattttttttttattttaatacaattttataattcaattatcattagaaaaatacagtcacgctagaagcgctatatgtttcttatatatataatatatagaatctctatttgtctaaacatactttattcaagaataacttctaatttgttattaaaaaaatcaagtctgaatttagaccaattaaaaataaaaataaataaattaaaattagttatatttttttaagtgtc

SEQ ID NO: 125512 - DNA, 1910 bp, Cannabis sativa
ttagggcataaaactcaacacggagatagatgacgatcgatatgaatttatctttgaaaatctacaataccagggatctagtataaagagcgacttgggttgagaataaataattcttgtgactccaagaaaatatatgatggataataaaggcatacaaagaacaaaagggaaccttactctaaaaatggtttttagcaaaaaatgacgaaagtgatgttaaagaagaaaaggctattttatataaacctcgtaagaaccgttgatcaacgatagttaactcaagactcaattgaaaagactacattaattacttgcagagtttttctcagaaaaatacaaccaccaaaaaatgaagcttgttcaataagcataaaagacgacttatctctctaggtgatgattaaaaagtcttttttcaaaactttttttttaaaaagtaccttttatgagaaaagaatttttaggggacagttgttatacccttatttcaaacaataaatgaaggactctatttatgtgacacgtatacaaatgaagaacattaaattatctcctcgcaaatgaaagaacatgcatgggtcttcttagaaaccatcaagtgtattaagtgattgatgagacgtgtacaacatcaaaaatgagaatctcacgtatcaaaagaaagaaggcatgaccaacataagaagaaagacaagtttactgcgagattgaatgcattcgacttagtttgcacaagatatacaacttgaaaaggattacttatgaggagaggaattcttcatccacacttcactctcttagcgatcagcgagaaatgtttaatccatcctagtgattcgcgaggcgatacgcattcggtacacatcaatctttcagtgtattcttcgaggagtaaaatattaaaatgaagctgctcagtgaaaacgtgataaagatctagatcatatcaaaatagttattcattttaaatgttggctgtaaaccgttcccaccaatttatagttaaatgaaacatggagaattgtggtactaaattaagtacacaacgaaataataatttatgattatcatcataccacatcctcaagattaccacatatatatattaaatctgaaattaaatagacaaaaaaaattacctcttgaagcctattagtgtatccttgtttcttttcctatgttgtatccttggatgatgatgaagaactcccaccatagtgttaggttgtttttagtattatttttaggttaatttttagtgtatttttaatttagttctactcttgtttggagcaattttacgctttttatcttttattttcgcagatttaaaatagaagaagattagaaaagatcaaagggataagatgaaaaaaagatgatatataaaatagagaaaattgtgtaagaaaataaagttaaaacttcaagcttgaattcgactatgttctgattagattttggaaaaagtgaaaacataaaagttctagatctctcttttatctttccaaaacatcttgaattgtccaattctgagtaatatcgagagagttatggcaaaatactatcagtcgacgaagtagaaaactcactgccccttctaatcctaagcaaaataggttttttttctttcagcgttttctattttactttatcattttttggctataaaagaagtggacttcaatagtttttgtcaagcaatttagagggaaaaaagagtacaaagttcagagaaagaagtaaatattggaggcattttgcagagggttttcaacattattttattctctatcttcttatctttcttaaaactaatatgtgtgattttacttccatgaacatgtgtagctaaacacttgattagggttatatggatattatttgacattgctttatggttttaa

SEQ ID NO: 125513 - DNA, 549 bp, Cannabis sativa
tcatcaattgagatccttgtcttgtccaatggcgcaacattaagactgtataatgctcagtcacaaaataatcagaaagtgcctctaccaaaatagtaggctatttctttcaacaattctttgtctatcaagctttatgaacacaactttatatcgtggaagcattaggtcctcgcatcgatcaaaggcagcagacttcaaaaatttcttgatcctaatcgagctcgacccatgtatctaactgttgtggatcaaagaatcaacattatcaatcctgaatatgaagaatgggaacaacaagataatcttcttgtttcttggcttctctcgtccatgtctgagaaaaccacgaattgaatgatcgagtatgagaccactgcacaaatctgggaacaattaagaaagtactgcatggctttgaatgctgctaacataagtctttgcaagacttagcttcgaaacaccaaaatgacagggtctctatgtgattacctgctcaagatcaaaggtttagtggatcgtcttgctacgattggtcatcgacaaact

SEQ ID NO: 125514 - DNA, 650 bp, Cannabis sativa
agattgacattgataaaatattataactatttaaagtgttctacatctaaaatagattatttttagggaagtaaagattttaattatgaagtaatttcatagcagtacaattatataatgttttaaacgagaatttagttgttaatagtgatgaaacctatatgaaaaattgggtgtaccaaagaaatagaaatttgaataatacatactactatttcaaattaaaaatgatttaaaaggtaatcaaattaaaaaaattgtatgtctaatatgatattatttgataaaatctttaattatgatatcatatgtttaaatatacacattctagtttactttcaaaaaattgaaaataacattaagtcgaagcacttctaagtaaaataacattaagtattttgtagacttatgcatattttaatgagtcctggacttataaaaattatatttattttaaaagttatattatttaagaaagttttaattattcacgttttttgttaaaccatttaattagtaaaggtgtacacaccacttaagaaaaatacgataacatgtttattttagtagggtgttacaaaatatttcgtaacttcttttcgaagtaacatagcttcccgaaagacaacttgtaaccatattcaatattt

SEQ ID NO: 125515 - DNA, 1621 bp, Cannabis sativa
ttttcacttatcttttactttctttaaaaatttgaaattttctcatttttcgttacagaattaggattaattggattggagtcctaattcctatttgtatgtgccattcaaaattagagagaaaaaggaagaagagaaaagacttttggctatttgcttatcatttattgttttcctttagttctctattttttccttaatcctaatagcattaggaattgttgttaccttttaaatttgtatcctattcctatttgtatagtaatttcgaaattggcttaaaaaggagaaggaaaaagacataattgtatcttttaattatcatttacatcttccttaaaaagcattatatttaaaagactcccattagctttatgattaggagattgaactcaactataaataagtgagtcgacaattaaattttcacacttcttttatcattccacacacctatagctttttagagagcacttttggatttcatcttcattaagcctccaaacattcttcattccaagttagaaaaaacattttttttttcttaaaattcactaattttttttcttattttttatccttctcctccttttttggtcttactccaagactttttaaattccataaaatctttgaaataattctcctaaaatatctaaaaatccaaaacactctcctagtaccttgaaaaattcctcccaagttactttgatggttttcaacccaattttgactttcctagagttgtaagcaacatgagttgttgagcttgagatggctagaatgaagagaattagaaggttacctaatgagtatgatccccatgtggctcagttcattatagctaagcttactgtgcctaagtctaagaacttagacaaggcacatggtgggaaggtgatgtcaacttagcttctcaaagctaccattaagagtgatgatgtgagagatcatgtctaaggcctcttttgtctaacaccctcattgagcttcacgctaaaataaaggatgactacggtctttctgaggctgttttctggaagcctcaacatggtgctcccaaaggctcccaaaacacttgttgtagtgcctggttgagattccacatgaatgcgggtgcttacttgtcattgcatccatggttcatatccatagctgattttttcggtgtttgcccttactagataaatccaattggctataggattcttgccaccttcttcatatttcaccaccttaggaactggcctattctaactcctcacgagataaactttctttatgacttaaaaaggagtccaatctgcaaagaacaaggcttttaccacttccattaatttggcccatatagagaaaacattaccaagaataactgtggcctttactaccaatcgtacttctatattcctattcttccatcgagacacattaccttccaaaaagccacccctttcaaaagacttaatcgtcttattcacatgaagaggagagatgatgccattttgcttgagattaatgcatgggaaagagatgggcgaactctcttggatgcaacagtcgtggatgcaacagtagggcatgaaatattaagcttcatggatgcttattcggggtacaatca

SEQ ID NO: 125516 - DNA, 714 bp, Cannabis sativa
  modified_base (667)..(671): a, c, t, g, unknown or other
tatttaaaatttcgtgaaatcgtatttttataatttttttgttatttttgtgtatttctaaaattatccttttttttttttctccagctaggccttccagccctttacaggcttaagtgtagcttggtcgaggtatgtagttttgctattgattaaattttactactgcgattagtcttgtctttgtgatatatttttgagtgtcttttgtttaagttattaagattagtcttctctctgtgatatagttttattttattaattttgttttgttgttttgtcttctttgttattagatgtctcgtcaacaaattgatgttagtgattgtgaataacaaattctattaaagaaattagtggtataattacatacattggcaagataattaagtgctcaaacaaagatggtcgataaaaaagcatttgatattaatatatttatatataaactaattaattaaatcaatatataatataataaaataaatatatatatcaaggccgatcttatgtatatgctggtgaggcatgtgtagggcgcacacgttatacaatggtgtgagtttgagtctcataacactctttctcaatatatatatttttgaaagtgaaaactccaaagtttaaataatcttaggtccgacccaatatatatatatatatatannnnnactagaagaaagttacgtgcaaggcacgtatacttagttttat

SEQ ID NO: 125517 - DNA, 1166 bp, Cannabis sativa
ataaatataattggatgaccattagatgattattggatcggttatctattggatccgatgtcccatccaacaaccgatctgatccgattggatttttaaatttacattcgattcgattcaattatgattggatatctgattctattggatcggttgggattggatcagtcaattataattagattggaggactttctacacacctctaactattggcagtatttggatatataatcaagtattgtaattttctaaattaaaaatcagtcatttaagtaacaatttttttatggaaattaattataagtcttattttgtagtttgtatactatgactcttacacatatgatttttttaatgatagaagaatatatcgagtagttaattaataatatatattcaaaaaattattaccagacaaaaaattattgtaattatatgtgtagttactaaattttttatttaaaatattaatttactacttaattactaattatcttattaaaaaataatagaaattcatatttaatttttgtaacacttttaaaaattattattcaatttttttttatatatataacgatctacattatagttgtaataggtatctcaactgttttaaaaatattatgaataatttacaatgtaaaaaatagagttaaaaaatttagttagatgcgtgcttgtttcttttttgcatggaaacacgcgtgtaacttaatgtttgaaccttgttttagacactataaatcattttaaatttttcaaaaataggttaaatacctactataactacaatgtacacattcatataagaaaattttaattatactttatctaagcagtaaaaatagaaacaaccctactagtaggagcaaaagtgatgtctctacgtagaatttttcataaaaaaaatattgatgcacatttaatttcaaccataggaaaagtctgttgtagggacattatttttgtccctaccgatatggatgtctttatattagagcttaaagaaattataactttttatacgagcgtcactacaaaaatttttacttttagtcacaataaaatttgtgactaaagataagaaagttatggctaattataaattatcattattgtgttgtgactaaaaagtccctggctaaatgtattagtcacaa

SEQ ID NO: 125518 - DNA, 859 bp, Cannabis sativa
  modified_base (830)..(833): a, c, t, g, unknown or other
ttatttagatttgtttttctataatatgtatctatagtattagtgtatgtttagtagatagatcttacttttttttctaattatttttttgtatgtatgtatggagtagatatagatcttactttagttaatccaaattgagaagagactagtgtgctatttttttaaaaagaaaaaatgtatccattaataacataaatcaaagtataggacacaatattaaagaggagaatcagttcctttccacaaagcttcctcatctaagcgtaaagcatattttaacaagacgatgagcaacttcatttaccccttgaggaatatagttgacagtagctttagaaaaaaaaaacagcaagctttgaatctccgttgcaaacctattccgatggagattatgagaagcattgttacaaatatagtcaacaagtatcttacagtaaaattcaatataatctggctgaataaaatagtttctacaccaagtaagaacatgctggaggcgtgagcttccattatcaaaggcgaatggaaacctcagcatggtggtgctaaagtcaaaagcgcgtcgttgtgattgttgtgaatagccataccaaaacctattttgttattatttgcatcttgagcagcgtccacagtaaacttcaatcaataggatggtattgttatctcatagtgtgatggctacattggtgaagcatgactagcagctttatgagggttgttgatgttttgatattgagccaactagtcttcagtccattgtattattttgatgggcactaaaacagagggggtgatgcagatgttatgtaaagaccgcttagttnnnnttggaaattagcagttaatcacgttt

SEQ ID NO: 125519 - DNA, 633 bp, Cannabis sativa
cgctcttccgatctctcttatctcggtttcaacatctttgatctcggtacattcagctataaaattggccaaggcctgtcctttaatagccgacctctgttgataagttatttcatactactccaactctatttccaacttaaggaggcaccctagcatatcgggcttttgtaacacttggagtaatggttgttcagtgagtaccgtgatggggtgcgcttgaaagtagggctaaagcttttagaaggctaaaagtaagaagtaggttaacttttctataagggggtatctactattagcccctatctactaagactgcactgatcgcatgttttgtcaccgcaaagtatatgcttaactcttcaccatctaggggtttagataggaccggaggctagggtgattattgatttaaagcttggaaggcattctcacattcttcagtgcattcaaatttttttgccccgtaagatgctaaagaaagggatacacttatcggtcgactttgagacgaatatactcaaggctgtaatttgttctgtcaagctttggacgtctttgatcttagttggggatttcatgtcgatcaaggcctttatcttttctaggttagcttcgatgcccctagagttc

SEQ ID NO: 125520 - DNA, 1713 bp, Cannabis sativa
  modified_base (1103)..(1110): a, c, t, g, unknown or other
ataaatttgagtcatttttttttttgtctccaaaaatctaaaattatttaagtaaatataacattttttttaccttaattattaacattttaaaaaaataagtttacatttttattaaaatttaattatttttatttaattttttagcttgatttttttttcaaaaaatattagtttatttaaattattaattagattttcaataattttagtttgtcttttaagatacgtgtttataaatgaaataaaattttgaaaatatttttttaggaataatttagatttttttaagtaaatttaatatttttatcaagtttttttaataatttttattcattttttcagaatgtagaacattataatctttaattttttttaaacaaaaaggaacacaattttatattgatcaaagttcaagagataaaaatactaattttgacggtaaaagaaatagaacctgacagaagggacataattatgtaactattatattttacgagaaatttttaacaagacatatattttaggggtaggatcaagtagtgtcgaaagttcgggagaaaacgcttattattctatctttattagttgaaacctgcttaactatcactttacttgcacttaaccctctaagctcaaattttgacggtaaaaccctctaaactactgaactgctagcaaatttaaggtgacatctatttttcactattaactgccaatatagagtgcttatgtgtgcatttaaccctctactatcactctgccaatttaaagtgccatccatttttctctcaactatcaatctacttgcaattaactttctaagttcaaattttaaagataaaaccctccagactactgaactactagcaaatttaaggtgtcatctattttccactattaattgccaatatagactacttatgtgtacacttttgtacacgtgtcacatttatattagtacacctagtattattatttagaaaatattaaaataatttcgaagtttatagtatttttttaatttattttaaatattttatttttattttataatttaatgtaattttaaaattaattttgaaaataatttttaaataatnnnnnnnngtgtaccaatataaacgtgtcatgtgtacaagagtatacacataaacagtccatagtgacagttaaccaggtgacaccttaaattttctaccagtttagtagtttggagggttttactgctaaaatttaaaattagagagttaaatgcaagtaaaatgacagttatgaaagtttagctgctaaaaactcaattataaaacatttcacttgttttttaaaattttaaatttttcgcctattaaaaataagattgaaataattacttgtgtgcatactagattttttttatataataaatataaaataaaattataccattgattatatattttgaattttatttttgactgtacaaactattttaaattttttgaaaatagcaaaatatataatataactttaatatacattatcatataagaaaaaatgaaattataatttctctatatcatcatagaaattttataaatttaaattataataacaatgatataggaataattttttgaaaaatttacataataaatcaaaaattaaaaaaaattataaaaatacatcaataccgaaaaatatttatttttactctttaaacttttttattta

SEQ ID NO: 125521 - DNA, 2176 bp, Cannabis sativa
tttaataaattgagtgaagtgaattaatatatgtatatatctacatgtgaaaaatttgatgtatatatttgagtgagggcttaagcctacatataggcatatgtccctccgtccctgcaagtcatggtgatcccgactattgacctcgcttttagctaacgacactaagtctttatagcgatgagattatgaataatgtttaaacaaaattaagcaataagaacaccaaaatttatagaagtttggtcccgtgattatggtaatagcatattcctctttttcttgtattacttcaaggaattatcaagatcacaaggagctggccaagtgagtttctcaataaaccttagggaaaacttacaattatttttatagcataatagctcttaaaaacatatgatttcaaatcctcaaataatgaagtgatttcactatttatagggaaacatacatgaattaaatttctaaaattattatgaataattagtttcctataatcttttctttaatgcatatcaatctcataaaaatagggatctaattgaggtataaatgcaaatatatttatgaaaaatatctttcctactcagaggatttagtttcactggatggtgagaacctgctcggacagtcacctatagactctgtccggattatacttgctgaaggtttaaacttaatcaagttcatgtaaaactctctggacagatcgttgaaggaaattaaagcacccgtctaggctttgaaatgctctccacgtgtcactcttattaaatgccacatcaccctatgcagaaattgggataacataagtccgtgtggaaaccatatgctcatacgtggacttgctaggcccatgagttgctcggacaggtgacacgtgttcaactttagtactctattttaatttgatgtgatctaattacgggatacgaagatacggatgtctcttcgatatcttgggcatttaattgcaggagcgcaccctcttagggatttgaagagtgggagatctcaagaaattcgtcagagtcttcggagcccaccgtgcaacatcattattaccttaatcatattggcagagaagggtacataagattcatttgggaattggaaaaaggttggaggcaatacctgcccactttttggatgtatagggtctgggaagacgttccagacacccttctcaagggtcatctagagtcttcacaaaagattttcgtgctcgcagagatcttagttaacattgcaaagcacacagttcaagccaaatcctctgcccaagcataagaaggtggcacaaactaaacaaacctataagagggttttaactgaggacccgcactttgcctggctaatggcaatgactaatagggctgaacatcagtcggtttggtcggtttttttacaaataaaaatccaaaattcggttttcggtttgaattggttcaatccgataaccaaccgaccaatccagaaacatccttaaaaccgaccaatgtgaaccgcggtttggtcggttaaaaccgaccaaactgatttttttttttgtaaaatataataaaatttattttatgagcacattaatacaaactctaaacacatcattctatattttataagtccaaccatacaaattataatgtctagctaaaagtccaaactctaaaacataacataatacaacacaaatcaaatataacttataagtccaaaaaaatattattccaaaaccacacaagcattaaaacaatatagaaattggagtccaaatccaacaagcaaccatgatcccaccttgcatctcccactagctcattcattgcactgtatcacacaaaacaaaacaaaaaatatattgaggatatcacttattagtatcactatgcaatattttatctgaataaagttcacttgaagtagaaaatattagtaattcattgtattttgaaaatattattatttttaagctacgtaaaaagtaacatttaattaagcaactaatgattaattatataattaattctattaagaagttactagttaggaatggaaagtgctttccgccaggagtgcattggaataagaattccttttgagcaatattgtgatcgtatgggaataagttctcctcaattttcaaacccttcccattccaagggcaattccagccaaa

SEQ ID NO: 125522 - DNA, 807 bp, Cannabis sativa
aggaggtggtctttgtaccgttgccgattgtcaaatggtctaagcttgtaggcgtagtgtctgtagcgtgccctttgtcggtgtgtcaaggcatgcaggtgacatgcctctactacttctttatcttatcttgttagattgagatttctccctagggatctcagacttttgagaaggggaaacttttccttggggtcctacaccatggggagttgatgacttccattttgggtctcgtgactaataagggtgtgagcctctttgcctagatgctcttgtggacatggatgagatggtgcttgaagcttctttgtcgagattggcatgttaatctatattgtcctcctttcattctctctttctttctttctttctttctttttaacttaagggtgatgttggtttacgaaatgttttaatctcttatgatacctagaatttaagggagacgtcggttccttgaaccttctcgacctatttttattaatggaatttaatggagacattggttcattgagccttctcaacttctttttatctttggaatttaagggtggcgttggttccttgaaccttctctacctcttttaaatttttgaatttaagtgagacatttgttccttgaaccttctcaacatcttttttaaattttgaattgaagggagacgttggttctgtgaaccttctcaacatcattttaatttttataatttaagggagacgttcgtgtaaagtccttttttggcaagttagttgacaaaatattttttttatggtaagattgttttgcattcatacccgatttct

SEQ ID NO: 125523 - DNA, 857 bp, Cannabis sativa
aaacagaaaactgattaaaaaagtattaccaaacggcaccatagtatattgttattgttgctgatcaaaaattgaactaccaacaccacaatataaagtatcattaatccccatattctattagtttaactaatttttaatcaagaagaaatagaagtattgaattccatagagtactaacttgatctgtggtcctcctgcttcgtcgatggcaggaaatggacgtcgaagatgggtcgtcgctggcaaagaacgagaaagagaaatagaatagctcgattgagagggagagcttcgaggtcgactcgaagagagattttaattgccaatttaggtctgattcgtctaaaggtgtttagggatttgagaaaaatttgtcaaaatagcctttttgacagaaatttacaaaatagtcttttcctgtttttttttattacttttgttttatacaaatggcacttaactcatttaaaaaattcacttcgtattaaataaaattaattagaacctcataagattaaaaaaatcctaactttcctttcttacatagaagaacgagagaactcctcttcctctttcttcttcttctcctcctctttcttcttcttggtagtaagaccaaaagtccctgccattgttcataaatggtggcaagtggtggcagtcacagacaaaagaatttgacattcattgcaataaaaataaaccctaaataattttcttgtctcttctcattttgcttcttttctttaattttttctctcaatctattatatgaactaatcattcaaaattataatagaatcaacaagtgatgcttcaatcacaatacccacaccacccaatgaacatgaaca

SEQ ID NO: 125524 - DNA, 1377 bp, Cannabis sativa
  modified_base (26)..(38): a, c, t, g, unknown or other
atttctaaaaacaattttttgaaaannnnnnnnnnnnnacaataccaaacatgctcttagagtcgtgtattgtttttaaaagaaattaccgacagttaaactatcggctatactgagccacttatactgacggtctaaaaccgtcacacaaaaaaaaaaaaaacccaattcgatgtccaccttcgtcatcaaccattgggaataaattttttaaaagtttctcgcttcaatttcaggaatattaaatactcacttctgttaacgatggttcttgaaaaagaaacgatttgaggttcgatagacatagtggttttttgggataagttgagaaatgtctctttttgtattcattaatcaaaaatagcctcatattatattttatttaaatacacccatttttatgagtgagtacttacccaatataccctcactctttacttaagtctagcatataatttacattaacctaaggaatctaatagggatatatctataaaaataagtatatcttaaaaaatataaaattaaaacaagtaaactaaaattgatataatgtaatttcctcgtgtttttcagtacaaagttaattatggatccaacctatattataaaatagttacaatacatatgtacaagccacgtaaactcgggaaaattaatatcaatccattattcgagctcaatactatttttgtatgttttgacattagagattcaaacttgagactttcttcgtgtgagaagacatgcgaaactatacgtatgactttattattaaacttttattaaattgcattgttattatatattttatagtgcccaacactataccgatatagcacattataaataattaacaatttcttatattatttatttttttgatgaataaggatcattgtattgctcaattaccaattagagtctccaattacaactcatacaattaactttctccatatctctcatgctattgctatttggtacatctttccataaaccactccctatctatagatttagcttgttttggcattacaaggttaattctatattgtaaatctttcttaatttcaaagaactagctcatcatgaaaattaaaacaatagatcataaaaacataccctttcatcattaaaaagaaccagcagaaggcaaggaaatacaaatacaaatcatacacgtgggaatagtataaattacaaagcaggactatatatatataaatatatataagtacgtattagtagtgtacgtacttgatgcatgcatgcagcccagccttaatcatacatagttttattttttatttttcacacacaacataacataatacataagatcgatcgagcatgcatggagtacgtaaccatgca

SEQ ID NO: 125525 - DNA, 1377 bp, Cannabis sativa
  modified_base (581)..(581): a, c, t, g, unknown or other
aaaaatcacatactcaaaccaaactttaaagcttcaaaagtacaaaaccatggttctagggttaccttagcttgattctttctaaattccttgctgaaaacaccaagaattagcaacaattctcctcgtctttggctggttcaaagaaagagaaggaaaagagggagagagttcttcaatttttttacttttcttgacttttcttgatttttttctcatttgaataaacaaaatgttgaataacatttaagtggccagctgactcttcctacaacaaccacctaagctccacctttgaaattacaaaaatatcccttgatgcttaacgtaggcaaaaataaagtgtacgggtaaaatggtcaaaaaccataaccccactaaaactcggtattctatttcatccaacatacattccatgaagaaataaggttttggacttacccttgtgatcaaactagtcatccatcgcattttccgttgtcgctgagcaaaaattgtaaaaataacataatttacatataattcaaataatactcctagagtttaatgaaatctttggaattgagaaattataactctantgcccatttctaacaatggggcccacaaattattgaatccataaataattataaaaaatactaataattaatgctaatttcttttactaatcaatattacaaatgcagtcattacagtatgtaaatgagatagtttgtctccatggagctcctaagtctattgttccaaacagagatccaaagtttacatcaaagttttgggtgagtctttagagggctatggtgggtacaaagctaatgtttggcagcacaactttccaccctcagactgacaattcagatcctggaagatttactgcaaccctgtgtcatggactttaatggttcatggagtaagtacttgcctttaattgaattctcctacaacaatagttaccaaagtacaatagggatggctccctatgagattttatatgctaggaagtgtcgctcccctatgcattgggacaaaactagagaaaggaagtacttatgtccaaaattagttcagaggaccaatgaagctatagacaagatcgaggcttggatgcttgcttccgaaagtaggcaaaaaagttatgctaatccaaagcgtagagatgttatatttcaggctggggaacatgtttttctctgggtttcacctgtaaagggtattagacgcttcgggaagaggggtaagttaagccttaggttaattgggccattttagatacccgagaagctcgggcaagtagcgtatcagctagccttaccactagtgttatcagctgttcataatgtattccatatttcaatgttgaggaaatatgtttca

SEQ ID NO: 125526 - DNA, 2775 bp, Cannabis sativa
aaactaataaatcctaatatccccccctcaagatgtactgtatatgtcatatacagacattttgcgaacatgagaagagagaatggtggatggtaggggtttggtgaaagtgtctgcaagttggagagtggtgttgacagggatgagtcgaattgcagaagctttaatcttttttcggatgaaatggcaatccaattcgatgtgttttgttcgttcgtggaaagttggattgttggcgatgtgtatggcggactgattgtcgcaatatatgaaggcaggaacaggttgtggaatgagtaagtcgttgagaaggtactgaatccatgtgacttcactactggcagcaacaagggcacggtattctgcctctgctgagctacgagatatggtggtttgcttctttgttttccaggaaatcaagcaatcaccaaggaatatgcaaaagccggaggtggaacgtcttgtggtggggcaggaagcccaatcggagtcagagaaacctctaagatgcaaggaagatgtagaactgtagagtaatccttggccaggacaacctttgaggtatcgaagaaggtggtgtatagcttgcatatgaggggtgcgaggtgatgacatgaattgactcaagatgttgatagcaaaggtgatgtcgggtcttgataatgtgagatataggaggcgtccaacaagttggcgataggctgaagggtcctctagaggagttccttgagtgtcatcaagtttatttcttggatccatgggagttttagatggcttactgccagtaaaacccgtgtctgtgagaagttgtaaagtatacttgcattgagagagaaaaatcccttcagatgaccgagcaatttcaaatccaagaaaatatttgattggtcctaaagccttcaatttgaattggttgtgcaaagaagcttgtaattgatgtaggagttggttattgggaccggctatgatgatatcatcaacataaactaacaaggcaatgaaggtattgcctgatcctttggtgaataaagtgttatcagcttgagattgcttgaagcgttccttgatgagagcatcggagagcttcttgtaccattgtcgcgatgattgctttaaaccatagatggatttctggagtttgcaaaccatagtagagtcattggtgtcaatgttggaaggatttaaaccgggagggatgaccatataaacttcttcgtgaagatcgccgttaaggaacgcattgttgatgtcaatttggagagtgtgccaattttgaatggcagcaacagcaagtagaagtttgaacgtgaccatcttggcaaccggtgagaatgtgtcaaaaaaatcaagtccttcttgttgggagaatccttgagcaacgagtctggctttgcatctttcaacagtaccatcactgttgaatttgatcttgtaaacccagcgacatcctatggctcttttgttgggtggaagcttgacataagtccatgttttattcttcaagagggcaaagagttcggtttgcatagcttgattccaaactttgtgttggcttgcttgtttgtagttgcgtggttcgaacaaagctgtgacagcaagaataaagtgtttatgagatgttgaaagtttatcatatgaaagaaatttactgaggggatgaggagtagaggattgatcttgaagaatggaatggcattcataatcccgcaagtaagctggtggttttgtttgccgtgtagttcttcgaagatgcatctcatctgttgcagcagggtgtgataatggtactgctggtgtataatctgcagcagtatgtgtaggctctgctggtgcaaaatcttcagtagaagtagcagcaggaatactgctgtgtggtgaagtttgtgcactaggagtaagcactgctgcttgttgttgtggtatattgttggaaactgtgttcggatctgaaataacaggaaaatcattcacatttgtgttagaaataagtggagaaggaaaaaccatatgagagaaaggatcaatttggtttgcatcagtatttaaagttttaaaaggataaatggtttcatgaaaaaccacatttctagatataacaatttgtttatcatttatatcatagagtttatatcccttaacaccttggggataacccaaaaacacaaggcttggctcttggggaaaatttagttctatgagccgtgagtgtagaagcaaaaacaaggcagccaaaatttctaaggttggagtaatcaggtaggtggccaaagagaagttcataaggtgtcttgtttttgagaagaggagtaggtgtgcgattgattaaaagagtggctgtcattatgcactcagaccagaattttatagggagattggcttgaaaacataatgctcgagcaacattaagtaaatgctgatgttttctttcagctatagcattttgctcagacgtttcaacacaagtgaaatcatgcaatataccaagtcgattgaaaagatctttgaaaactaattctggtgcattgtcggatcgaaacctttttatagtgcagtgaaattgattttgcacataagaaataaattgaggaatgacagtagcaacttcagatttgtgttgtaagagataaatccatgtgaatcttgtgtggtcatcgactaaagtgagaaaatacttgtaattggaatgagatgggatatgataaggaccccaagtatcacaatgaacaagatcaaatttattttcagcaaaggaatttttattgggaaagggtaact

SEQ ID NO: 125527 - DNA, 1578 bp, Cannabis sativa
  modified_base (792)..(818): a, c, t, g, unknown or other
tgggcagccaatgttgtgtttggagagaatgacataacagatttgtcacgattgatgaattggccagaagctttatggtaagtatccaataccctcttgatagcaaggcatgaactctcatctgcttgacaaaaaagaagactatcatcagcgaagagtaagtgggaaatcatgggagcccttctcgtaagtctgaagccgtgcagattgccttggtcttgctcgtgttgcaataatcttgagaggccctcagcacatattaaaaacagataaggagattacgggcaaccttgtcttaagcctcttgttggaaccaaagatcctgtcacttcaccgtttatgaggaaagaaaatttgttagtggtaaggcagctcataataagtgaaatccaaccactagcaaaccccattttctgcataactgcttctatgaaagtccattcaactctatcgaacgccttactcatatcaagcttgagggaggcaataccatggcggccgaaagtcttgttcttgatagcatggactaactcaaaagcaaccaagacgttgtcggtgatcaatctatttgacaaaaaggcactctgagtttcagatataaccaaaggaagcacctccttgaatcttgcaacaattatttttgtgacgagtttagagattacgttgcataggctaatcggccgaaagtctttcacatggtgaggcttcttaatttttgggatgagtgtgatgagagtatggttgaaacttgaggggtcggctccatggttaagaatattcagaaccgcacgnnnnnnnnnnnnnnnnnnnnnnnnnnnatgttgttgataaaacatggccgacattccatcaattcccgggctcttatattcatacatgacaaattaataagtgtctaaggatcatttaatgttttttaactggagaatactaccataatttttgtacgataatattacttgaaagaaagtaaaaaaaaataaaaacaaaaaacaaacataataagacaaacacatttattgagattcaataatattttctcaatatttattgcaatatagattgaaacaaataaagaggctacccaaggccaaataaatcagttaacttactttttcgtgggaagtttctcctagaagcatgaccgattcaacatcttccggtactgcaattgcaatgtctaatatatattgctagagacatggaatgggattgaatcagagaagaaataaggaaggagttttggaatgagaaagttcaagtatgtaaacaacatcaagctccagtcaaaaataaatgccctcttactgtttcatgtgctgatattgtttctctttctgcaagagacggcattgtcatggtatatatatacatacatctaactaatacatactatttaattaaattttagactaatatataattaacattacttatatatatacatgcatatataattgtaaaataatatgatgaatatatataataagtgtagttaggagggtgctctcttaatgggtattacccatgaatggataaaattaaaaaattttgagtttttatgcttaatttttctat

SEQ ID NO: 125528 - DNA, 651 bp, Cannabis sativa
aaaaataaaaatattaccaaacaacaccttaatataacgctacagcttctttattctctcgaacacacccctcacatgcggtaattttccacactcttattagagaaaattcaaatatataaaatatatattcatatataataaatgtatctaaatattatatataattattaataatttaccccttagattattttttttttcattacactcattatacacagtttctttatatgttactaaattaaccactttagaatatatcccctatttggggcagggccggccctgaaacaaactggaccacaggaaaaaaaatttatttttggacccttatgttaaaaaaaatgtgatatttttgaaaatcactaaaaaaatatgtaattttaaaagggcaaaataaatttttgggcccccgggctaggtgggccctaggcacaggcctagcccccctatgcccagggccgggcctgcattagggagctctgcgatctacgaatctctctttttttttcgatcgaacaatttagcagagctataaatttataaagtaagttaatatagtagggttgtacaaaaaaattcgtaaactgcccaaaccgaataacccgtccaaaccgaaccgaaaaaaccgataaaaattacaaaccg

SEQ ID NO: 125529 - DNA, 2483 bp, Cannabis sativa
atgacctaaaaatattaaatgtggtctcataaatacataaacatccctaaataaattgacatgtattaacttaatatatttgcagagaaaaaattatgtaataagacctgtaatatttttactttaaaggacttgctttattgtttttgctagaatcttctgcatgttaggtgttgacatataatatcaattatatattgcaatagtttgggctttttataattgaattacacatatacccttttaaatgatacacataataacaaacaatttacttctaaatgattgaaattaataaccaagtaaactttaaaaatgaatttataatttattatttaaaaattattattataactatattagtcaaaaaaaaaatatacacattataatttactattaatatatattcaagtatttaacacaagatatattatattaaataaacaatcttacatatcaaattttattacaatccaaaatatataataataatacaagtaccattttttaaaataatcaaatcataaaactacaaaaataattgtatatataatatgtatgtactttaattaaagaataagattgcggtgttttttaattaaggtaatgtttttagaaggaagagagaaaattctactaaaatagaaaaattatactaaaaatattatacaaacaaataaaagtagagctagacaaggacaatgctaggtgtagattatgtagggcagttacctgatatgaaaatattaagacgggttgttaaactatttggagcttaggtacataaatttttttagggctttatacaaatatatttttggtcaaataaaattaagtaaaattgtttgatgtagtagtaaagatcattttaaaagttaaagagatcacaagtttaacactccacaccttctttttaatttttaataatttttttttttgaagaataactaaaatattattgttgggatttgaactatctagaaattgtgtaatataaaaatataataagtcattctataaaagtcactttaacataattaaatatgttttattatatctaattctataatcttgttgaaattttgaagtctggacaagatataaaaatatgtagtcgtctcacttcaatttttatagcttcgcccttgatatgaaataggagattctgtttgtgctccactaaataaaaagtatactctaatatttaaaaaagttaagtttaatatacaatttcttttaatattttttaatttttttctcatattattttatgttaatttgagtagttattttaattttattttcatatttttttaaaattgtgtacaatttttttctactaaatttcacatatatattttttttttaatttttttataatatttataatatattttatttttgtttaatagatatatttttttaagaaattgatttggaagaatttaaaaaacaaataaactaatttaattaaatatatatatatatatatatatttaatgtaaaataaaattattgaaataagatttatttataaatttttgggtataagatagaaataacataaaaagtttaaatacacaaaattataatttttatttatgcaaggaaataaaataactaacttagaaactaattttaaaggacaattatgtttattgcataataaataaatacatatgttatatttttaaaataataaaaaaaattattgacttattcagtgcttaaatgtttgaaagatttttaaaaaatggattttttcatttttactcttcaatatatatattttttgtatttttacagaattttacatagaaatacttatagcaactaactgaaatactggagcaacacaaactgtaaatttgaaaaaagaaaagtttaaaaatactatatgaggtaattttcctttaaaaaatcactataattacaatattaagaataaatttaaagtaatacaatgtatgtaatttatatactaactaccacgtgcgtagcatgtaaaatttaactattttgataaaagatgagaatataaaaataggctgttatcgacttgcctatgtatttttgcataagtccaaatgtatcactcattttcacatttatatattggttaaattacggtataaatttctaaaaatttttgataagtttctaacgttaaatattggcagtgaaagtctttaaactcactattttcgtaagtccgttaattttcttttctaacagttccgttaagtaattaaaaattcaacgtgttgacaaattattattctaaatcatatttttcattaaaaattacaaaaaaaaaaaaactaaaataaattatttaaaaataaaaaaaaaattaaataatttaatattttttaaaagatattaaataaataaataaaaactttaatatattttttctctcctcactgttcaactctctctctctctctctcactttcggaccaaaaaaaaaaaaaaaaaaa

SEQ ID NO: 125530 - DNA, 727 bp, Cannabis sativa
agtttataaaatcacacacgtggcgtccttatagattagggcgttacagtcacttgatgaggacagactgacacaaaaacgaggttgatcgtcgtacagaagttgaagaaggtcttggtcgatatgatgttcttctcccaaaaaatcaccagtgttcatctacaaaaggtaggacacaagatgattatttggttgggatatggaataaaaaaaataaaatataccgaccaagtccgatcgaaggattaaaaaaagagattttgcatgatattaggtttataacccagaatttcaagacttcagattaagggttgattttcactaaatcctgaatgggcaagtaaaaccgaatatcatggaattaaagtcaaaatgcaattacagtcaagtcgtatgtttaaccacaatcaaaatatcatattctcaagcctagattttctacgatattcttagaacaagtttaaggattatcaaattttctacaatggaaacccaaaaaataagagattcactatattaaagaggaaaaggatgaagaacttactcattgttcgaatctttagagctattcagatgacacagatcggcacttcctgaaaattcttcgaaggatttaagaggaaaaggtgttcttgctctgaaatcgtcaagagagaaaaatgctaaaagtagtttattagggatttttgccctatttataagcaaaaaagtgagaaaggtaatcatt

SEQ ID NO: 125531 - DNA, 1761 bp, Cannabis sativa
ccttccacataaagatcagatacttgacaaaatctatgtcccctagaatattgaaaactttccttaatcttctccattgactgtccaggaatccagggagtatcccataattcagtatctccctttccaaccaaaattcccgccccatttttgcaaatagatctagcctgatcaagaattccttaccacactctcgaatccccagcctgcttttccaccttccagatatctagccgagagcagtatttagattggagaatcttaacccagagcttatcttcttccttcatcatcatccagcacaatttagcaagaagagctaagttagtatctccaaatcttcttaaacccaggcctccacagtttttaggctggcaaatgtcattccagcttttgaaagctctgtatcgagacttatctgagttcccgatccactaaaacttcgttactaatctgtcgagatcattgcacagagtcaaaggtggacataaaataaatagggatactctgcaaaaccgaccccacaagagttgtccttcccgcttaagagagacatttggccttccaaccttccaaacgagccatgatcttatccttaataaagtggaaatcctttctcttgctagccgagaagaaaaagggattgccaagatacttttcttcgcgacttaagcaattcatatccaagatccgtttaacctccgctttaatatctgaatgagtattggaagaaaaaaccaggccactcttcctcttgtttaccaattgcccagaccaattttcatagatggtaatgcattcagcaaaggtcttagcatttagggagtttgctctgcaaaagaaaatagcatcatctgcataaaaaaggtgaaaaataggctagaattgcaagacactttgattcccgaaaactctcccctgttttcagccttggaaattaatttagataaaacctcgctgcataagataaataagaaaggcgataggggatcgccttgtcttagcccacgcttaggattgaagggagctagaggagccccattgagaagaatgaaatacaacaccgagataacacaactcataattaagctgcaggccttgtcacaaaaatcattagcttgcaaaactcttaggaggaaactccattctagccatgagtgggggatttccaaactttgggctatagtgggtcccatatcagggataaggtccaatccctctgaattcacagagaaatcaggggttggtaattcaaaaataggaggcccatgattctgctgaacattctccatctgtctaatttcatatttaaagggccggcccatagtatattgtattttttttttctttttttgtatttttttaatttttttcccattttttaataaatgatgtttgtacctaattgtaagaaaatattcattttttgcattattacacaaaaataaaaaatttaagtgttaaagtgtaacaattaaaaaattaaaatattattatcataaatatttaataaataaataaatattaatatttatatatattttagtgtgaagtgaataatgcaatcacttatagtggttgaccttgacttactaaaacagtggtgcagcttcttcttcatcataatccacataatatttttccagtaatgacaaaatatatatatatatatattatactagcaaaaaactacgtgcgaggcacgtatagtaaattttatgctaggttttttttatgttatttgaaagtgagattattatt

SEQ ID NO: 125532 - DNA, 750 bp, Cannabis sativa
ctcatcatcttctccaaattctaaaccctccccatatccttccttgtccaagtcctctccatctatctcttatcttctctctataaaacacataaccctctccattgcttgaagctttgccgaaccaccaccacgctgctgccacctccctctccaccgcccgaagcttcaacgaaccacctccgcgctactgctgctgccatctttcagtagtgtaatttattactctcattctcttctcatatatattagcttagtatttttatgtatattgatttgtattttatatataagtgtgtttatatttatatattttttatttatagtattagtttttagggttcatatcagagtcacaacggaagagcagaattgaatttagtttttaaaaaaatatttgttaaatttgatatgaaacttaaaccccgaatctcaatagaataatatataatacaaacctaattaattatatagagatttacctcttttttcctattagaatttcattgctactttttgtataaataaaacaaacatctaatataagaactcgtcgaagatttcacaccaatgtcttccagatcagcctcaacacttaggaaaagagtaaacttttaaatataacgagatgaaataattttttgatcgcagtgtattctcgaataatgagacactatgattgaaatcgggaaaatacacaacacactactatgtgagtatgtgtgtcgtgtagagagagagagagagaga

SEQ ID NO: 125533 - DNA, 1197 bp, Cannabis sativa
aactgttttcagtaccagttttattcttccgtatttaattaatcacttaattaaataattaaactggaaatattaaaatacggaatttcaccaataaaacaatatagtcatttataattgtatacaaataggagaaaatttttagtaaattttttatgaggtattgtaatagactttgtcaaaaaaaaaccaataaaatatttaggacgtgagtgatatatagtataaatgtttatataaacttaagtagcaatagtccttattgactaaaaaaatagcattgtataatatattaatatagttacttaccaatcaaaattaggaaattattttcttcatcatattttttttgtagtctcatttaagagatcatgtttttctattgtcaagattgattctatttgaagaaaatcacccaagaataaaaatattcaataataaagtatggacaaaaataaatttgattaaaaaaagtagagtgatatatatatatatatgtacactcatactgatcgaaaaaactatacatcttgaattgcatataaaattgagttgtacatttgaatgtttctaaattattagattcaagatcttcaaacatccacaacaaaaagagagaaagagcaggtaaggttagataatttagaaaaatgaagaagcaatgttttttttttttttttgaaattaaactcttaataacaaaaatcaaagtttaatacatcaatacaaaagaaggaaaatccttaattcaaagctaattcaccatccacccttaagtgcatgcactactaattcatggccacgaacatgaactagggatgccttaagaaaactgtgaagtaaactaggcaaaaaactaataaataacctagctcattacaaaatgaagagcccctaaaaaaataagaaccaaaactaaacaattagactccacataatcaagaggggagtgtgtgagagaccaatccccaatgatgctactgaatctgcaagaatataacagcttcaacatgaataactgacaatctagagctatcgtcaattccattgcatccacttgaatgacttcaaaactccctacaaaaacaataaatccaaaaatgagtctttataaaaataaatattcaccatgagagtattaattaaaaaattgaaggaagaaaacttatctatataagtgtctcaaaatgtgatgaa

SEQ ID NO: 125534 - DNA, 1131 bp, Cannabis sativa
  modified_base (298)..(304): a, c, t, g, unknown or other
ttttgagtggattatttaccacaactcaaatattaataaaatacatttaaggtttttaaatctttaggaaattctgtagtgggtgctgttttttttagtagaagtgtattttcggtagatagaaaattataatataattttttatatgatgtagttatactaaatatttttgaaaactttaaaatatgatagtattaaatttaattatgagagacttgatttttaattatagcaataataatattaaactttgtgtagaactagacacccctaaatatatattttttttttttatttnnnnnnntatatattacaacatgttttacctgggactcgaacccaggacttccaacactcacacacccacctatggccacttgagctagtctcaagtggtaacaccactaaatatttaattctagatttgacaacatatcacataatagcaattaatatattgttagtgaataacaacatatcacgtaattattatttctctcttgagctatatatttgttaatgaagaaaaataaaattatatacatatgtatttttaagagtggtgcatatatatttcactagacttattaagaatatattgaggttcaaagacttttatttaattatactaatcgaggtttaacatgatagttgttattgtattaaattttactctatgcactaaattgtgttttttaaattttaatatgtacttaattgtactccataaatttctgtttgcattaagcatcagttagtaaaattgcatggggttggatagttcttaaatctaacattttgattaatagttcaaaaaaaaattttaacagtctaaaaaacttaaaagatatagtttagtacatgttaaaatttttttaaaaaaatttaatattgctatatttattacatatatataatatatatataaaataaatcattatttattttattttcattatgaagaataaaacatcatatcttaatctctactctagctctttatactatccatgtacagccgcatattatttttaataaaatgccaattatgaaattagtgtcggaattcatcaaactataattacaaaatatatataaatatatattttggtaggaagaatcacaaatata

SEQ ID NO: 125535 - DNA, 2596 bp, Cannabis sativa
aaaccatattaaagcataccagccgaaaatatacaatgaataataaaatatttttgtcaattaaatatgccaaaaatagaattaacacggttctaattaaaacataagaaaaaatcaattcaaaaaatactgataaataaattaaatagaactggatccacaataaaatgacgagatgacccaaccacacttagaacctaatactgatacataaattagagcaaaaccagttccacaataaaatgaacaaaatcaaataacacacaataactcagagcagctggaccatatcaaaaattgcgcaaggaggacactcaaactattaggaaagattttgtgaaaaaattagatatgaggatgaagagaatggcaccataagcaggagcactaatatttaatgttcttaaccacgattttgtcacatgaatttattttcttttttttattttattttcaagaaacagaacatagtattacatcaaatggtagaatacaaagaagaaaaaaaaagcatgctatctttgaaatagatagcataacctgaagaataacaaaagtgttgactggcataaagtagaaaacaaaaaataaaatagtaaagagaggttgagaaaccttgaaaccattggagatcaagtcataaaatgtttccacatgagcaatatcctcaaactgaagaattggagccgaagaagcaagtgctccaatggctatgtgaggataattgagcctcttccatgatgccaacactgtttttttaattcacaacatcttcgtcatacaaaaaagtaaaagaaattttagattcataaatatataattactaattgaagaacacttacttcctttggtggaccttcgtatgatccaccaaataacacgacatgacagtcctttaccaaaagtttcgctttaactcaatgatcaagacggcgaaatcaaccaatgcttctctcgagcagcatcgattctccatagtatctatgctgctcataatcatcaccatatcaatttaaaaaaaaaaaatctttcgattattctaagaaataagtaaaggaaaaataacctaccttagggaagaggaccatggcgccaaactatggggcgatctcccagacgatgtcagtattggcagcgaaccaggcgatgtcgccctcgttgccgcagtagacaaagatggaggccaacctacctcggggaaaagaaccatggcgccaaacttagggttcttgttcggattgagaagggccttgtactccggcacgcgggcagcaatggaatcgtgaaagtatggagaagaagaaccaagagaagtaagagtcgtatatttcttttcggcgactagcaagggatgtccgtaccggctgaaaatgcataaaaatttaagatatgggatttttattattttcacaaaaatatgtcataaaaaaacctatataaatgtaaaaatacaaaaaacaaaaaactcataacccttttaactttatttatttatgccataaaaaagtaaactcttataatttttccataatataatttctacactaattaattacatcactcaaaggacaaagtgatcactaacataacattattcttcgttttgtcaatcatcaccttacaattaaactcaattgtactaatacatcacacaattgaactcctataagaatagtcctaactttcatcacaagggaattagagaataccctttaacttaaattgagacaccagtaactaaccaacaacatcaaaattgagctttaaaacttaagattgactaagtcaccataattgcaactgcattgaaataaaattaaaaacaatattgtcaaataattttttcaaattgagttgcaaattatgttattttttttttcatttttaagattatgctcgagatgtacaagacagattatcaaccacaagcgcacgaatctttattgtagtgtagagattgtgaataacaagataaaacccatgaaaattgcgtgagatcgaaaaaaaacttatttaatctaaattattaaactctaaccaagtttaaaaaatgatgatgtggtatagttcctccaaatgaaaagatctccaatatcatttttagaaagttgttcctggaaagttaggtgtctcccagatgttgttctcggatagctaagttgttaattccggaagggaattcccggatgactatcatgtccactccaggttcagtcttcaggatagctagccctcctctggaaagaaattttggatagctagttattcttcgtggaagattgatctccctggaagacagttctggatagtcgactctagctagttctatcttatccggaagcttcttcagcgagtacttttggtctatgatcctagtagctcatatatgttcccagatgcacttagactaatcctgacgtcgagatctcgctcagaagagagttggttaagttagttatggttaaactaagttaacaatttcgcttcttgcagccactgactttaggatcttaatcctaagcctataaataccattaacacttaagcatttgagcacgagcaaaaatcatatggttttgagagagagagagagaga

SEQ ID NO: 125536 - DNA, 1050 bp, Cannabis sativa
gattagcaacgagctgcatagtatgtttaaaaatcacgtaatatgcctatgctagttagggtgttacaatcttagtcccgatcaccagcacaggcctcctcggcggctctccgaccaccacccatctcttcttcttcttcttctgttcctgacgtctttctccacaaccaatgttgaactccaacctcctctggcttcctcctcctctgctggctccgaagccccacaacacaaggacatagctttgatgtggttggacgttcattttccatatcgacgatgaggcagaggttctcgatctgccattaaagtcggcgaacaagaaaaagagagagtacgaccttctgttcaaaatctctagctttttcttctagtttcaaatctgaaacctcattattttgtgcaaatagaggtcaatctttgtgttttccatatgtgttcagtcacaaatttaatttattaatgtatttgattttgagttagggtttgagaggcttgagtttatgttatagatttgagattgaattaaatttgaaattgatttttagattttattgtttgtgtctgaatatgggatagattatgtgttgattttatatctaaaatgagttgtcgtggtgtggttgtaatggtgttagtatttattgacaacattaatagtggtttggtggtttaggagagagagtagagagagagagctgtaaatgaaaaaaaaaatatttttttatttaaaatttttttaaataattttcacatgaccaataaaattgtaacatgtaacgccctaatctataaagacgccacatgtgtaattttataaactaatttaatacgaatagattaattaattattaaaaaccgtgatactattaaaaattttttactaacataaaacactaaaaatggacattataatgacgatgcctaaaaatcataaaactatggatacagcccaaaacaactcctggtaacccgacacacttgtcgatgaggtcaatatgtacattgcttgagaaggcagtcacctcatggcagctctaacttttcctt

SEQ ID NO: 125537 - DNA, 739 bp, Cannabis sativa
  modified_base (701)..(709): a, c, t, g, unknown or other
tagttgaatatagagaaatgtaaagtaatgagaagaaagaagtaggaattttataaaataataattttgtataagagtgaagttgaatagtataaaaaatagaataagtgaagttgaacagaaattaaaaataaattaaatggtacgttgggttttctagtcagtcaatcaactgcacgtatccgtcacggtgcacaccacacacacttccctttccttctcttctcccaacacacttttgtttattcactcttctcaatctctctattttattattcaaatgcaaattaccaatattccaatgtgtagagagagcaatttatatttgaagaacattgctattagatactagtgatgtttaatatttttaaatatgtcgtttagtaattaattagcggctaattaggatttttgttccctgaactttgacatgtatcaaattatgttccctgaacttttaagatcgctaaaaatgccccctgaactattgacattgttagatttaaggacttttgtcaaatttcattcaatttcactatttcaaagattgtttatgtattaaattatgcttccaaactttgatatctaccaaatcatgtccctcgaactttgacatgtactaaatttttccctttaagctttcatccatgttagatttttttactaaaattggaagaaaaaaaaaagtctttaaatccaannnnnnnnntagttcagggggcatttttaacgatcttaa

SEQ ID NO: 125538 - DNA, 1563 bp, Cannabis sativa
attattattattattatttgaatgtttcattttttccatatagtaatttctattattgagctaattatttttttgatttatttccttgattttcttgcctctatttatttattttttttcgtatttctctatttgtattttttttattttcttcattagtttggaagaattacgttaaaaaaaaaaaatgtcaaaaggccagagtaaagggattttttctatccaaaaaattttattgtatatcttaattggatactaaactaatttataggtcacacacataagaaagatatacctctaaaaatctataatataggaaaaaaaaaatgtttttgtcccactaacatatctataaaaagaaaaatagatcagtatgagcaaattaagtaaataataaaccatgaaaaattttcttttataatgtaataactataatttatttgtaatgtcaccattgctaatagcataatcattatctctaagtttcttttaaaccaatagaaacgtgaatcggcaaggagacccgatttccgtgctgctatttggtttggtaataatagaataccttataatgctgctccaatatcaaattcatcagcagaatttcaagtatctgcaaacatttgaagtaggttagattatgcatgatttaatttgatcaattatcatatgctaatgatattctcagtatgagaacatgagcatctatcttggtcgctaatgactgcatatttcatctatcaaatttcatgaatctttatttagtaaatgacaaagtgagtctcataattattccaagcaaaaaaaaaaaaatggttcttgtaatgccacaggggatattttggtggcaagtggaataatactaaaacactgcataattttgaatgcaaacaattttgactcagctgcttaaattatgataatgtaggtgttgaatgaagcaagagaataaggacaagatgaccgtacaacaagtctgataagatgaaaaaggaacaattttaattatgtgaatgtagaaccgaccatatatagaccaaaagattgaaataacagtgggaaaggcatgccatgggagcaatcataaaccataaaagaaaaataaaaacaaaaaacagagtaaaaactaccatttaagcatgacactatgacagtcattgtagtatagtttattattactgtcacaaagcttgctttataataatgttgtataagatcagtaacataatcctaggctttgtaaaacattaaaagcttcaatgatatatgaacagtagtatcatcagataatttatgctcaattacatgtggaactgcccaaaatgttagtatttaagagtttgtgtcctatgcattatgaaacatatgctaatgatattctcagtatttgagaacatgagcatctatcttggttgttaatgactgcatattttgttagagagtcccacattggcaatgtgtggaaagataatagaatatataagaggaataggctactcctcccattgtcaattagttttgagatggaacctcattcatcttatacatctaggtacatacaaa

SEQ ID NO: 125539 - DNA, 1594 bp, Cannabis sativa
atatacatatgagcccatattgaggattttaatccaacacatatattatttgtattgcaggcacatatttgtgactctttctgtctcaaaaatatttatttttcttaaatttaattttttaaattttaatagtgtatgcaatttaattgaatttatgtggtttactttttttttaatagaatggaatctatctcacacacaaattataatatattaggtgtatttaatggaaagattaagttatcgattcttatctcattttgcaggtatttcatttgccgaaatactttgtggttaaaagaataataaacaatatgtagcattaaacttaacatcaaatctaattgagaatgaatacaatataagtggtaacgtagtaatctattttttttttttataacttatttatctattttcttttcttttttattttttaaatattttgtacaggacaaaaatttgccaaaactacaacaaattattattttgaaaataattaaaaaaatatgtatacatatattatttatatttattagattttttttgtttaattatcactggcttaaggactatttttgtgcaaatttttttattgatatatgcatagacattttttaatttaatgattgaataaatattactatcaatcattctaaattttgtaatcatattttaaataataatattatgtataatacatataatttattattttaattgtattaattagcccaattagttatatattcccacaaaaatagttgattaattgtttatatataaattctaaatcatatctaaaaaataaaatactctaacgattttggtttgtattttgtaattttggtttctttctcttcttcttgaagcaagtaccaaacaaactaatactttttttctttcaaaaaaaagtaccaaacaaactaatactactatcaaattaacgagtaagtgacctaaaatatattgttgaacaatgaatcgtataatttattagtaatatggaataatagaaaaaaaattagttttatacttctaacacaaacattgattttatgttgtgttggtaagctatagtgatgacatatgatgattacaatagatgagatatgatgatgacaacaaatgagatataaaataagatactatgatgacaattgatgagatacgatgagacaatatgtgagatacgatgatgataatagttgagatacaatgatgacaatatgggtgatatacaatgatgacaataattttgaatgatcgagatataaaaataatgcattatggatttaattttttctacgttatttattcatttttataacaatgattttttttaacaaattatttataacaaattttaaacttcttaatagataactaaaagtaataataattaataaaattgtgaatttacttatttttttttcttgttttataaagttttatgttttaataaataaaattatttattataatatagaattaaataatataattttatttttatttttataaaataatataaaatagataagaaaaaaagaagatgatgaagagagaaagagaaaatttctcaatgcttactctc

SEQ ID NO: 125540 - DNA, 1109 bp, Cannabis sativa
  modified_base (27)..(30): a, c, t, g, unknown or other
actaatcagattgtaaagagttttatnnnnggcataaaacccaacaaataattctttgcattaattaataaatcgattctatagaaaagttttttcatcagtattgcttgcatatgaggagtgcgtggagctgacatgaattggctaaggcaattgacgacataagtaatgtctgatcttggtaaggtcaagtaaagaagttgtccaatgagttgacgatatggtcaagcctctttgagaagtttaccttgctatttatttttcggtactaaatcaagtatgaaggggaagcattttaattgtgatttatcattatactgatcccaaagaaaccccatatagtacatatattaaattagaaagtaataatggtaatagaaaaaatatatcttgatgcctatcaagtgtccttgctttcgttttgtatttatttcgattatcatatcgaacaggtagaaaataatgatgataaagttcacacaatgatcttccaagtccacctcaaaacaaggattagtttcgactaataggattcacaatataacttgttcttgttttagtctcaattcatgagcaagaacattataggagaggagaaaatattataagatcaatgatgaatcttttaggttttctaattaattatatcgtatatatagatttaagattataacaatataattaattataactaataaatttattatttagattttaataaagtaaaatatttatatttaaataatatcctaaccgattatgttacaaatattattttaaaattaaacatttaactaaatatctaataaccaaatgagataatctttcaatcatttgagggaatatcttaaccgcatgaagagaatctctcaaccatctcaactaaattaaatatttataactaaattttaaatttaaataaatatttaatttttaaattaatccaaaattaaacccaatggggtccatcctttatggtaggtgcctacacgatttttacacagtataggtgttattacctaggggtgaaaatcggtcggtaatggtcggtttttaaaattttataaccgaccggtcggttacggtttttattttacgaaaattgtaac

SEQ ID NO: 125541 - DNA, 1298 bp, Cannabis sativa
  modified_base (1160)..(1174): a, c, t, g, unknown or other
gtatgattctatgttatatatgtgagtatagtctcaaacatttgattttgttattatatatgtataccaagtgtgctatatgtaaatatacaggcctaacttgggtataggcgggctggatttgtgccaggtttgtgtctagggctcacttaatccagggttcaaaaatttatttttccttttaaaaatacatatttttttaatgattttgaaaaatactatttttttaataagggtctaaaaataattgttctcttatgaattactacatttcaggattgaccctgcctgtgcttagggccgacttagcatagggatccaaagaagaaaaactttatctttttaaattatacattttgttttactaattttaaaaatatcatattttttttaaacaaaaagcccaaaaatagttttttttcctatgacgagggccagtcctaggtataggcagactagatccgcacctaggacccactcattttgaggtccaaataaaaaaaattaccttttaaaaaatactatatttttaaagtaagggcccaattttttttttcctatgacctatttcaacttaggaccagtcgtgcctatgacccataaatatatgttgtatatactatataaatagataaattgattcatgctatatacatatgtaaaaattaaagtttatatttattaaatataaaatttggctataaagtctatattgaatcctctttctcaataagcactaattattattatatgttttcccttaattacacatataataattaattggcaaatgctatgtttcatatgaagaaagtggatcggaaaggaagaggatcaaagggtatgcacacaaaaccagtctaattgatattcttggtaaggtgacatacgaagtagattttgatattccaaaggaatttggagagcttggggcaattcttgtagagaatgagcatcacaaagagatgttcctcaaggacattaagattgacggcgagggcttgcttaatggccccgttactatcaattgcgaatcttggattcattccaagagtcagaatcctcaaaaacgagtctttttcaccaataaggtacgtacatgactctaaaatttttgtctcatcccttaaaacacattttgatgtatttttatgttgtannnnnnnnnnnnnnntgttaattttttattatttgtatgattttttgttgttgttttaatgttattttcttgttacttttatgtaattttcttattattttttatagaaaaccgtaaaaataatgtaaaaaaaaaaaaa

SEQ ID NO: 125542 - DNA, 635 bp, Cannabis sativa
atgtttttatatagtttacatttgcttatattttttagttttaagttataactcttttcttctatttgtattttgtgctttgggactgaaactttttatttaatatattgtctttatattttgcttagagttgtaattgtcttaattttttaatctatcttattttattcttccattataatctcttttttatttctaacaagtaccaaatgaaccctaaatgccctaaaactcatctcgagcatgacaacagttttcagcttcatgtgtggtcccaaacacacatgtataatgtacgtcagccatatatttatagtaaaatagtatagttatataaatatcaattcaatactacatatgcaagatgaaacctcccataacactaattattattaaattatcaatattaataaattatatttaaattgacgattattttgagtaaagttttattcatgtgggaggttactaaatgtttggtttagtccttaaaaaaaattgtgtggattattgtaagggtcaaaggatgagtgaagtagaatccttttccaaaaaaaaaatgagtgaagtaatggtagatgtaaaatgtgtactatcttctttacctaaataatacgaggaaattacattgtata

SEQ ID NO: 125543 - DNA, 1005 bp, Cannabis sativa
taccaaacgccacttaaattaaccagactctcttacctaacacgaccgattgcaaacaataacaaataatatatcagcgggaccaacagtaaaggggcgggacactatctaaaacctgtatatgtgtgtttgtggatgaaaatgcatgaggttgacgttatgaaatttaagctttaattaagcaagagtctatcgtagcaccaaggaaagcaacagtcttatcgtcttctttatccgtcaacactcatgtccacaagtgtacctatcaaggtggtccaatcaatggtgcactccttcaataatttattacacaacaaaaatatcagctacctatctctcctaataccagtgaggttacttactatactaaactgagtcctcaactactactcttcacatatatgcaaacataataagatcacacacatatatatatgtgtatagtctacagataaatatatatgactattgactatgaaatatacttattagtttgatagcacaacaattgacgtcaatttaattaattgctaaggccatgaattcgaccaaaacggatgagtatgggccggccctgagggtcggcgggctaggcgtgcgcctcgagcctctgaacgctcatggccccgaaattgttaaaaaaaaaaaaattaatgcatagataaagtgttaaataaaaaaaaaatataataaaaattgtttggtgtagttgtaagaggtcttactttaaagtaagaggtcatgggatcaattccactaagcactagaactataatttttataatagttaaactatatatataggggctccaaaatttgaataatattgtttctagcgtaatattttttgatgcatggcagccactagttatgcccaaaagttccaaatactatcgtttcaaaccaaattatttgaaaaatgacactcagctacttttgtattagagagtgtcacctgtcataaattattgaacaatatatattatactcaaattattgatatat

SEQ ID NO: 125544 - DNA, 1204 bp, Cannabis sativa
acttgtgagtagagctaagatcctggtaaaataatatccaacaggtatcagacaagagattctagacgagtctcataccacaccatattccctacatctggcaaccactaagagatatcaagatttaaaagccctatactgattccaaggaatgaaagtgatattgtggtgtatgtgtcaaaatgccaaacttgtctacaagtcaatgtagagcatcagaaactagtgggtttacttcaacctttgaagattcctaagttgaaatgggaagaaataatcatagactttttggttggattaccaagaactgtagggttctattactctatctgggtatgttgatagatatacaaagtcagcacactttttaccagtgcgggataactatatggtggatcagtaagctgatctgtatgtcatggagatagtttgacttcatggtgctccaaagtcgatcgtctcagatcaagattttaaatttacatccatgttttgggcaagtttcaatgagaaatgggtactaaattaaagtttagtaaagcttttcatcctcagactgatggtcagtttcagaaaactattcagatacccgaggatatgctacagatgtgtgtattagactttaagggttcttggaataagtatctccctctgattgagttttcacacaatcatagttatcagagtactattggtggcatcgtatgaaatgctttacaataggaaatgtcgatcatccattcaatgggatgagccggtgattggaggtaccttggacctaatgaagttcaaggaaaaagtgaggccataggaaagattcaagttcgtatgtttgccttacaaagtagacagaaaagccacactgatccaaaacatagagatatttaattccaggttgggaattttgtctttcttcaggtgttcccaatgaaggaaacttggaaattggataaaaggaaagttaagtcccatatttaattgtctgtttgagtttctggaaagggtaggtcaggtagtttatcagctagccatactctctactttatctagagttcacaacatctattttaatgtttcagaagtatgactcaaatacgatccatatacggagttacaagaatattgaacttcaaaaaacttgtcgtatgaggagcagttagtaaaaattttttaacaaagaagagaagtgttggaaattatttta

SEQ ID NO: 125545 - DNA, 1648 bp, Cannabis sativa
cctgccgtacaacggattccaatccgtgttttgcatatatgggcacaaaatcggctgcctatatttgtatcatatgtattagatttttgaattattatttttttacattaaaaatattaattataatttttttttcaaaaatatctctcttatattaaatgtaacaatataaccaaaaatgttgttcttttatttttaaaattacaattcaaaatttaaacacattacacatatcttttttattttcttatattaaatatgactacataacaaaaagtatttgttgactcagaaatctgaactagacttctaagcacacctgcacgcacgattggcgagaataaaaaaagttataaagtaattaatgagagacatatcaatttatagtagttcacccttatatcacgatagtaatggagctacgtttacttctagttttttacgtctcacgagatggtaattacagtaagtgtgtaggtatcagaagcttcaaattctagagagagaagctctggccttatgggtagttttctgaaagtaaaaaatgaactaaaggagctctccttttataggtgaaggaggcccaaaaatataggagataaaatacaaataaaatgttatcgaataggattattgcttttgcctcccgtagttaaaggagtatgagcagcgatacctaacttatgatctaaagcttgctgcagtggtgtttgccttgaagatttagcgatactatctctacagagagaagtatgagatttacaccgatcacaagagcctcaaatatttctttactcagaaaaatttgaatatgagacagaggcagtggttggagctggttaaagattatgattacaaaattctctatcatcccgagaaggccaatgtagtggcagatgccctaagtaggaagggtcctaggcaggtaaccaatatggttatgattttacctcagttggaagatgacctggtcagatcgggtattgagtttgtagtgggcaaacttaataattcgtcactacaatcaaatttgttagacagagttaaagctgcgcagttagtgaattcagagtcaatgaagactcgagaagaagttctacctagttaagctaaggatttcatagtgtcaggtaatgggatgctattatacaaaactcgagttcgtgtttcgaatagtgtggaacttagaaaagaaattctaaaggaagcgcataccactccttattcgttacatcctggcactaccaaaatgtatcaagacctaaaacccttttattggtggtgtgggatgaaaaggagtggtggaattcgtatctcgatgcttgacttgtcaacagattaaggctgaacatcaaagatcttcagggttgttgcagcctttaactcttcctgagtggaaatgggaggatgtcaccatggattttgtggttggattacctagatacatgggtatgcttgattccatatgggtagttgtggatcgattcaccaagtcaacatattttctaccagtgaaaacagcattcacagtggatcagtacgcagaattatatgtaagggtgttcgcggtgcaggtggtgcggttttaaaccattttttcaaaccaactcgcacatgcgatttttccaattttccaaaccgcacccgc

SEQ ID NO: 125546 - DNA, 2044 bp, Cannabis sativa
  modified_base (692)..(715): a, c, t, g, unknown or other
agaaaatgataataagttttttttcacatattttgtaattaattaaaataatgtatacaaaattgtaaaatgcccaaaaagttatagagtgtaatttcctcttgcttagtcttcaatatataagtatatacttttttggttatattagtggcaagatattgattgggcttaaattattgaattgggctttcgtttactggtgctctcttttatgccatttgtttacagcattcatatatgaatttgcagtatcgtatatgtttatattgtatcattttattgatagtcaccaaaaatagtttagtaccgagagagtgatggaaaaagagtgatgcaatattaaatttctatgattgagtaaacagtacaatatataaaatatgattatcgaattaaattactaatattatgtgaaaattgttatgagaactggttgttttttgttgaaataaatagcatttagtttctgatattaaaaatattaagtgttaaaataaaaaaaatatataatgcatctgaacccaccacgtgtccatatttatgagtaaacgaaagtgattgtaacggtgtaagaaaattgtaatattaggtatttttgcctccaaaaataaagataggatatttaagtgtataaaatctaaaatattaggtatttatgccacaatttattctaaaaaatatacatatttttnnnnnnnnnnnnnnnnnnnnnnnntatctttatagtaagggcccaaaaaaattttttgcctatggcccatttcaactcagggtcgaccctgatggtaccacaaattttatcaagtgattctctcatttggttttgagatgaatggtgttgatgattatgtctatcacaagtttagtaaaagtaagtacatatttctagttctatatgtcgatgacatatcgcttgccactaatgatataggcttattacacaaaactaagagatctatctaagtattttgagatgaaagatcttgttgatgcttcttttgttttaggaatccaaatatatcgagatcgttctatgggtattcttggattactacaaaagagttatatcgataatgtactcaaaaggtttggtatgcaagattgtagactaggtgataccattgtcgttaaaggagacaaatttagtcttaaacaatgccctaaagcaagacttgaaattcaagaaatacaaaagattccctacgctttagctgttgagattctaaatatagcgtacattgttggaatgttggcacatacttaagcaatccaggaattagtcactggaaagtagccaaaaaggttatggctatttgaagagaacaaaatattacgtgctcacatatacgaggtcagatcactttgagatcattggatattttaactccgactttgtgggatgccaagataatatgtaatctagttcaggctacatatatctattaggtggtgaagttatatcgtggaagagtgcaaaacaaacactcatacattcatccactatggcaacagaatttgttgcattccactatggcagcaaaatttgttgcatgttatgaggcatctaactatggtatatggctgagaaactttctcctcgagctacacattgtggatggaatagaaagaccgcttaagttgtattgtggcaataaattagttgtattgtattccaacaacaacaggagctcgacgaagtaaaaacacattgacatcaagtttcttgttgtaaaagaaagggtaaagtgtggaaaaatttgtatagaacacttaagtacaaactccatgattgcagatcccttactaagggttttctacttaaggtctttcatgagcacactgctcgtatgggtgttttagattatgaagatatctagattcagtgggagtttgtctttcttatcctttgtattttttttttatttgtttcatgaaacttatgtattttaataattttctgatcataaattatgttattcagtttatttcactttgtacatttaagcaaagttttgatctccataaagtaaagtaggaccaattg

SEQ ID NO: 125547 - DNA, 2185 bp, Cannabis sativa
accaagggttgggaaaattcattggtcgtgtgacaaacttccactagtccttctcttttagaaaggaaggttgaagacagatcaaatcccagtgatctttcttaaaaagaaagccatgtgcctatgagaatcatgttgaattttatgtggtagactttggatttcatgaagaaaggataaagtcgcactgaaattcaggcgatgatttcgcattaaaagaccaaagggtgtgaaacatcactcggagtgtgacagacttcaagttattgttctcttctgagaaggagggttgaagacgtattgaacccctagtgatctttcacacacggaaaaaacacgtgcctgcaagattcatgttgaattttatgcgactgactttgacattcgtggagaaaggctaaattaacactaaacttcaaatgtttttgcgtcaaaagaccaaacggtgtgaaacatcactaggcgtgtgacacacttcgagtagttcttctctttggagaaggtgggttgaagacgttttgaaccaccaatgatctttcatgcacgacaaaactacgtgcttgtgagaatcatattgatttttaatatgggggactttgctttcgtgaagaaaggctaaagtcgcactaaaattcaagtgatgacctcacgttaaaaggccaaagggtgtgaaacatcattgggcgtgtgacatacttcaagctatccttctcggaagagaaggatggttgaagacctatcgattccccaatgatctttcatgcatggaaaaaccccttgcatgcgagaatcatgttgaatttaatgttgcggacattggaatccatgaagaaaggttaaagtcagactaaaattcaagcgatgatttcacgttaaacgaccaaagggtgtgaaacatcacttggtgtatgaaagagttcaagtactccttctcttctgagaaaatgcgtcgaagatgtatcgaacccccagtgatatttcacgcacaaaaaaaccagatgcctacaagaatcatgttgacttttatgtggcgaactttggctttcgtgaagaaaggacaaagtcgcattaaaattcaagtgattattttaggttaaaagaccaaagtgtgtgaaacatcactgggcgtgtgacagacttcgtgcaatccttatgtactgggtaagagggttgaagacgtataaaatcgccaatgatctttcacgcatagaaaaaccaggtgactgcgagaatcatgtttaattttttgtggtagactttggcttctgtgaagaaaggctaaacacgcactaaaattcaagcgatttttcgcattaaatgacctaagggtgcgaaacatcgctgggcgtgtgacaaacatcaagcagtccttctcttccaggaaggtgggttgaagacagatcgaacctccaatgatctttcacacccaaaaaagccacgtgcctgtgagaatcatgttgaattttatgtgccgaactttggccttcatgaagaaaggctaaagtcgcactaaaattcaagcgataattttgtgttcaaagaccatagggtgtgaaaagttatagggtctgcgacagacttcaagctatccttctcttctaggaaggaggtttgaagacatatccaaccccagtgatctttcacccacggaaaaacacatgcctgcaaaaatcatgttatgtattatgtggcagactttggctttcgttaagaaaggctagagtcgcattaaaatttatgcgacgatttcctgttaaaagaccaaagggtgtgaaacatcaatgggcgtgtgacagacttcaagcagtccttctcttttgggaaggagggttgaagacatactgaacacccaagtgatctttcatgcactgaaaaactacttgcttgcaagaacaatgttgaattttatgtggcagactttagattccgtgaagaaaggtgaaagtcccactaaaattcacgggatgattttacgttaaaagaccaaagggtgtgaaacatcaatgggtgtatgaaagtcttcaagcaatcattctcttataagaaggagtgttgaagacgtatcaaaccctcagtgatctttcaaacaaagaaaaaacacgtgtctgtaagaatcatgttgaattttatgtggcagactttggctttcatgaagaaaggctaaagttgttgggttttgtgccct

SEQ ID NO: 125548 - DNA, 831 bp, Cannabis sativa
aggtaaatttgattaattgatgaataaaagaggcatttttcaacttacccccaaaaaaaatctatttcattgggcctgagcgacttaggcccaatatagccccaattaacataaatgaaatgtgaagtagtaataaaaggtttcactcattcacgtttctctcagatccctcaccggcgacggcaacgggaacggcgacggcaaccgacgctctatctcccaacagcctcaatcactgtcaccataacggtaactgaccaaattttattaccactttatccattgatcagattatagtctctttgggagttcatcttcttagggatgttttctggtttgaatccaaatctcaattcgaatttgctttctcaatttcatttatataattttagcttaatgaaatttagcaactatgtttatgtgagaagaaagaactaggggttcttatttgtgaaataaaatgaattcaaataatttttaaaaccatttttcagcacaaaaaaaacttttttgggggatgttatgggctagtaaggggcgttggacccggccgctttacctttaggtggcatttggtttgaggtaatgaaatgaaatggaatggaaaagaagtaatttttattcagttcctttgtttggtctcattttaaagtattggaatgttttcttgttatagttatgttttcattcttccgatcaaacgctatctgatggggtgtttgttatgtgaatttgaattaaagagagtagacttgaagggaatatgaaactcaagtgttggaggggattaacattaccatcattttaattaaaatttaatttagtttgaca

SEQ ID NO: 125549 - DNA, 1229 bp, Cannabis sativa
ctagatttactgttttttttcttttgagttggttaatttgtacttaagtgtatatatatatataaagttgattgattagtataaaaaaaaagctacaatgttatgagtagacaagtgtatatcatgatattttataatggagattgaataataccttatgattatttgggtggcctgccatgatgtttgtttgcccttttttttttttataattttgagagttctgaatctatcctctcattgtattggccatgctcttggcatttgcttttttatataccttttttttagaggaaacttgtgttgcttctcctgtactgtggtatgcataattttatatacaaatatatttgtttacgaattgtaatgtatatggttgtggatgaaaagagtttcttttgtgtatctgtttctacagattgaatggaactccatactatgggccataaaagaaagatagtttcttcaactgtagagagtgtagtttcatttgaatgtgatgacgctccaccttcttgtgatgaattatttcctattatctatgtggaagacgggatttgcctttaccaggactcaaagagagatcatataatttttgtccaagatcttccattgcattgtcattatgaaggcaatgattttaaaattgactatcgatcactttctggcgcaatcaatggttggaatgaatggagtacttctgtgtcaacacatttttaggcacttttgaaatcagtgagtataatatcttccatgtgggtatgctctggtattgagctattttgtgatgtgactagtttgaaccaattagtgagttgctggtgtcctacgactcacacattttggtaaattggggtgaattttttataacattagaagatgtcctcctagcagcagatttatgtataatcaagagactaaccatgccttcttagcaggagtcgattgatgaggttgaagaaaaaatagatttaccaaaatttaaaactacaagctcatcagcaaaaagtagctcgatatttcaataagcaactaaaagtaaggaaattatttttgggtgacatggtactcagaagggtgttcctaaacactaaggacggtgtagcaagtgtgctcggatgtaattaggaacggccatatcaagtaaccaaagttacaaaataggagcatacaagcttggttggtatgatgaaaacatggagctagttctagtaccacggtactggaat

SEQ ID NO: 125550 - DNA, 537 bp, Cannabis sativa
tgcttgtacaacctctcaggtgggagaatcatcagtcctggtcatagatttcctcctcttcaaacaagaagccatagcagtgaggaaactagtcttgtgtgctgaacgaaaggaaaaaatttaatacgtaagcaaaatacagaaaaaaaaagtaagcaagctaatgatgactttggtgcatcagcaacctgctgattctccaactccttcagacacaccagccttagtgtgacctaaaggcatagtctcgatagcagaaacatgaacctcagcaacgttatttgtcacaacaacactaagctcatacctttggctatcaatattaagagcaacatcacaattgacttttaccaaactaccacgaatgaggctttccctattaaacaacaactaatatccaccttagataaaccaggacctttattattatcctttttgttatattatttaattataataatataatatatagattaaatatatgtaataaattaataaaatgtaacatatgacaatgtatattagttgtcatctttt

SEQ ID NO: 125551 - DNA, 1776 bp, Cannabis sativa
tacaatgtgggtccgcccctgtccccatggttcttttctggatgcctcactaggtaacaatcctagttttatttggagatgtattttggaagctcaacaccttgttaaaaagggggttcggtggtgtgttggggatgtgagtcttataaatgtattatctcaaccatggcttcccgatccggttcatccttttgtgaattcttcacatccggcctttcaaacggccacggtcagtagcttgatgagttgtgatggatccggttgggatgtggaaattctcaatgacttattcgaggagcgtgatcgtgatttgatactcagcattccgaccgatcttactcaaacaactgatcaccttgtttggtcttgtgaggtctcgagtatgtatagtgtcaaaagtgcctaaaatcttcttccacaacaacatggggagtgggatgattcagaagtttctttgttttggaaaaaactttggagtttaaaagtacctccaaaagttaagaatttactctggagggctggtatggcatgtcttccaacattgacacagttgagaacaaagcatgtggatgtctcctctctttgtccactttgtctaggaacagatgagactattgtgcattgtttagttacctgtcaaatggtctagctggtatggaacagagtgggtattggaacgattcacacaataggtacatcttttctcaattggtgtatggattgctttaaggtgttagatgttgagcagaaatgtttattggtcactctttgttgggcgatttggggagcacggaatgatctggtttggaagggtaggaatttttcggctgacaatattgttgcttacgcaaaaggttaccttgatcaatggagaaatgctcagaactctgggttagagtcgtcggggtctggtttacagactggtgacggtgctgagtgttggacagttccactggttaatagaatcaaggtcaatgtggatgcatcaatttttgaagaaagtcgtagttttggaattggtatggttgccagggatgataaaggtcttctcttggagggcggctctttgctcaaacggggtgtcattcaaccttttgttgctgaggctttaggggttaaggaggcccttagttggatcaaagagaaagggtggataggagtgcatgtggagtccgattgtctcatggtgattcaagctttacggagtgctactaatatgatttctttgtttggtagtattgttaatgaccgtaaagctttattaagtgaattgtctaatgtttctgtttattttgttaaactatcagcaaataaggttgcttatagctttgccaaagccgctattttatactctgctcgtcgtttcagtttggagtctgttccaactgatttgttaaatggttaataaagatgaattttccattaaaataaataaatacaatttcatacatcgcatttccttaaaaattacataggtatacaaatttgtaaactatttcttacttacttttatttatttatttattttgaacaaaatttgtaaactattagaatgtggtttatacgaagataatggaaacggaatgctggtgggatattattggtaaaaattcaaaatcaaaatgataataactttcaaaattaaaatcttttattagtggtaattaaaaatatcaatcccaccataaaatttggttgttagtttctttaccagcaataagataatatttcttattttttttttaaaaaaaaaaagataatatttctttttttttt

SEQ ID NO: 125552 - DNA, 1223 bp, Cannabis sativa
  modified_base (239)..(243): a, c, t, g, unknown or other
tcattttagccataggatataaatctttgactttagaaatcaatccaatgcctaataatgtgttgaaggatgccacacctcataaagaagtgaggaattacataatttgccattttttaaaaatatacctacttttttttttgactgagttgccctatataccctcactctctacttaaatctaacatataatttacattaacttaaggggtttaatggggatatcatctataaaagtnnnnntatcttaaagaatataaaaatgaatgtaaaaattaaaacaagtaaaaaaaagtgagtatgccatgtaatttcctcaatttttttttttttacatttttacggtattttataaaaataacaaaaattacatgaaagtaacaaaaaaataacattaaaataacaccaataaaatacaaaaataacaaaaaatgaacaacaaaataataagaatacaacataaaaatatactaaaaaattgtattttatgtgaataaaatctaaaaaattataagaaaatattaaaaattccatacaaacagtaaatttgttatttttttttgtatgtttttttaaaattatcccaaatttattttaaaaacaaagttataagtaaatttttttagaaaaaaaaaaattgtaatttatagtgtacttgaaattgtatataaataaagaataatttattaatggatacgaacaaaataaagtattctcaacttattttaaaagtaggtatattgggaaggatatattgaataatacactcataaaaaattaatataattaataaaatataatatagagatatttttaattaatagatacgaaaaaatgaattcatcaattcatcccttctaattatctccttaaattattcacttatcatttatgttatttataagtgcttaacaaattatttatgtgatatttgttggggctgaggtggcatgtcaagctataatttaattaaaaaattatttaaggataaaagtttttttttttttcaaatttattttaaaattaatttatataaaaaaataagctaaatttactttttttttaacaaagttaaattaaaagttcgtttttaattgtatttatattgtggcatcgtgaaaatgtgatatcgagataatttcacaaatacacaaaaacaacaaaaaaattataaaaatacggtctcatgaaattttaaatatttttacaatttttttaatttt

SEQ ID NO: 125553 - DNA, 1063 bp, Cannabis sativa
tcaccattctggtttggaggctttggcacccttaattagccaaagtctgttcaaacttcacaagcccattactcccatgagttatatataatttatatatatatatatgtattgtttcccttttgtggtgttgttagttatccccatatgtggtcttgttggtttcccacttgttgtttgacactccttttacttaccaaaaagtgttctgtgatcagaattacaaggtcaagaacattataaattaggagctttgcagtcatggtgagctgcctttggcttggggactgaaaatgagactcatcttatatattatgttatgttgtacgtataatattgtaatattctatgatgaaacatctcaaaagaaaagaaaaaagttacattgactgttaattattagtattcataaattgagagcactagctcaacatcaccaacatataattaaaatcttaagatagattaatttttggaggaaaatatacataattgaaatgaatatatagtcggtgattttaatattacaaataggttgtacgatatcgaattaattaatagaaattttgtcaggtgaaaatatgctacaaaaacatgtacaaacactcgtgtcctatatatatatacatatatgaaaattttatttgcacttcttaaaagtaagtacatattttaaaaaatttctaataatttaatgtgttaaaaataaattttaaacagcatatttcttttaataatttattttatacgaatttgaaacagagtatttgagtcatactttttgtatggttaattattttgaatttctcaaaagtactctctgaaacatcttaattatatatataaagtaggttaattatatacaaattttatttgagttaaactttgttatatttataatttttattttggttacctatatttttagttgtatgtataattatgttttattatgttattattaatcaataaacaacattatttttatcaaaaaaaatttgatttaagcactatttatatatataaaaaataataatacttagagtaaatagcggcataagta

SEQ ID NO: 125554 - DNA, 1101 bp, Cannabis sativa
tggcgatgctttgatggagctctcgtccagccattgtcgatggtgttccttattttgagctacattttctctttctttccttccttcggtgtgattcctcatggaactcctatttcatgtgtttggttttcatgtgaactcctgttttggttttctaaaaatataaggtctttgatttttggtggtgatagtgtggtaatggtgataataacgttgggtagagtacatgtggtggtatgggtggagaataacgaagaaaaaataagaagatgaagaagaaggaaaagaattatttatttattttagaatttttatttttattttttaaatgattttttaatgtttaattttttttataatattttaataattaatattatgtggattgttaaaaatttaccatgtgtatgttagggttcactctggcatgtatactagaagtgaggcttaggtagttttgttatcaaaaaatcgatttatgaagttaagtgtgacaaactgtatagttcatataattttgctgccaatataaaaaaaatatagatatattcattacattttattatatacaaggtcaaatttaaatttaatactaaatatgagactacaatatctatataattaatgagatgaggggagttggagtcatgtgtttcatctcagatttttatatatattttttttatatttttactttgactaattaaaatgtaacattttttaatcagctttatattttttaattagaaaattaaaaatattttttaaaaattttttatataaaattatttttacttttgaattaatttaaaaaatgaggataaaaaatttcaaaattttaaaacaaaaaaaaagtcactttcaaaattttaaaacaaaaaaaaaatcactttcaaaattttcttaaaaagatttttttaaaattatagtctatttgcattttatttcatcaatattttggattttgaattccaccttgaccctagtcctagccccagccccaaacttggatcctggccccaaatccggactcggaccaagaccccaacccaagtgttaggttataattaacctatatttcgggtctttaaagttagcatt

SEQ ID NO: 125555 - DNA, 2169 bp, Cannabis sativa
aacttgttcactccaattatgattatccctaagaacccaaaccctaaggtcgtatgcctcattaacttcaccaatagtcggagccttgttccaatagaaagaatcagctttgttgtatcacaaataacatttcttggaaaatctttcatcatctcaaatttctctgaaattggatcaaaccatgcttatctcaaagtgggatatactacctcgtggaggaatttaaaaaaaaaataccagtttacattaatacactatcgacttattttattcatatcgtataattttaattctcttgtacttccttacaggattataccttctccatatgaataacgaattttcttatatttaataattatactcctataattaatatatcatttatcatataattgtatatcatatattcttctaatatactatatatccattaattacttgcttttaggagataaatcctaataaaagtgtggttggtcccacaatatttttacgggtaatatcaatacctttatgaacctgagtttcatatgcccatctatcccaaccccttgctcgaattcctaggcaattcaataaccaatataaacacccccaagagaaaggccatcctcaacaaaagtagacacaagggaaaagactccacaaaatgatccaatgccaactttacagtaatttaggtaataaacactattattacaaaaaaaataaataaataaacaacacactttgaaaccaactaacattaaaaaagaaccacactcttcaaaacaaaatgaccaaaatagaacacatagtccaccgaaaaaaggagacaaaatgccaacaaacaccaacaaacaataatcaccagcatcaccctgaggaagagaggcaacatatctcttctgccacgacaacactattcgcaactactacaagagatccacaaccccaaaacgcgagacaccctaaggatctcgctaggaaaacatcccacccaataatagagtacaatgattctggagaccacctcgccaaaacgcgagcgatacccccatggagtaggttggtcactacctataacaaagccaaacttgggaatgatggagtcaaaaaacccccaacaaacattgaacacacaaatgctgaaacccatcaccgccctcttggccagagcactagagattcgcacgataaagtcgatgccatctctaacattgaaaagaacaacaaaagaaaaaaaaacctaacccctggtcaagagggatggagaaagtcatcataatataattacaaaaaagtataatgaaataaatagaacacaactcttatgtgttttaaaaaagaggactgctaccgtcagcttcttattataactttttagtcaacttttgtgcctgaaaatacatatcgaatttttttcttcaattttttttacagttacaacatcattcctataagtttttgaaaaatttctaatagtttataatgtcgaaaatatgttttaagttttctaaacacgcgaggtaaattagagtatcaagaactctgtgttcggaactataaattactgagaatatttaaaaatttatagagatgaaattataactataatgaatactattatgaaaatatattggacactttttttcagcatgtgatttcaggcgcggagtagtttgtaaatatggatcgagcattttgacacggcacgagctcagaaggcacgagcacgaccagacataaaaatatatggacttgcgcaggatatgatacggtgctataaattagcatgacatggctcagaaaatatgtaattaagcacaacacgatgccagaagcacgaaaggcacgatatgcaaacacaaataaactagtccgaatggcacgacacacgaaaagcctaaaaggcacgacacaaaacaataaaaaatcctataatttaataattatagtaattatatatatgtatttgttaattataaataattttaaataataaaaaaatcaaatataacacttagtatcataattttataattaaaactattaaaaaaaataaaggtattatttatatagtgtgatataaaaatttaagattttataagtaaatatttaaattcaaataatttaattatttttttctatgactgtttataaaatatttttgagaaattacataaa

SEQ ID NO: 125556 - DNA, 911 bp, Cannabis sativa
atatattttgtatatattatatacattcatacagtatatataatatatatttttttcgatatatatatgtatatatatttatatatattatacgttaaatatatatttttatcgcataataatatttatgataccgtcttcatatatttataatgttttatgagatatatacaagtatatatatatataaacataaaatcggtctgattgtttagttttttttttcatttttcggtgtttatttcgaattctatatatattattatattcgtatagtattatagagtgatctaagcatgtgaaaatcttttgaaaaacttaaagatggagaaaattttcagtaaaatttttttcagaccctacttaactttgtgatattaaagttcatatttttcatttcttcgtgcatgaaatttatatgaatgctttaattttggcatttagattcattagggattgatttgggcctctttggtcatcgaaattgaaagttccaatcaggtccactgtgacccgcgtgcagaaaaacgagtcaaaaataacccagttggttgaagaagacgaccccaaatgacgtgtcgtttttccatgtaaggcagccttcaatgttgaaaacgacgtgtcgttttccacaagtggaaaacgaaaaatgacgtgtcgtttttcgtcattttaagcagccagcctttattgaaaacgacgtgtcatttttttcgttatgggcagcatttagttaataaatgacgtgtcattttttccccttgtggaaaacgacatgtcatttgtcagtgtatgaggctgccctttggtctaaaaaacgacgtgtcgttttgtttgtttgactgccagtattcaaaaaaaaaaggaaaatttcaaatttttataaagttttatttatttggaatattaat

SEQ ID NO: 125557 - DNA, 1686 bp, Cannabis sativa
gaatttttaacggccaaaaaaggtcagggagcatgatttggtacatgtcaaagttcggaggaagaaaatcctaattagcttattattttattatttgtatggtactacttctaagtgtcttaccccaaagtcataaaagtgatagtacttcaacataacttgagttagaaaactaaaattttgctaatgatttttttaatcggtgcatttttcataatttttataattaaatgtgcttatatattatatcgcgattattttcatggtagcaaaaaaaaaaatctagtcgtgcaattaccagtgccaagtgtacctataaatatacctgcgcaaaatatacatgaagaaaatgtatttgtacatactatagatgcatttccaaaaagtttatatctatatttatatactattgatattttgtaggttttgaatccttttaatagtaatgataaagctcggcatgcattatgggcctaattaagtctatgaccacgacctaattagacctaattaaccttagatgtgagtttaaaatgcacttaaaagtaatgcacctgtggaattagctacgcaaaatgcagcaaaaaaaatatacatagatgcattcattacaggcattacacaaataacagttgcattacaagcctaattaggcctacgtccatggcctaattagacctaattaactttaagtgtgagtctgatatgcccctaaagataatgcacctatgtatttacttgtgcaaaatgcacctgatcaaagaaaatgtacttagacgaacatcccaaagataatttcgtgtggagaaaatataatattcgaaggaaacgaatgtccaatatgcctagaagaatacaaaaaggggtaagaaaatttctttgcagtcatatgtttaacccaggatgtatgcataatatattaaccagtaaacgtaataagtgttctaattgtagatttatatttgcttattttatataaattttaaaataaatgtaataaaatgtaatttggtttaaattaagtatagtattttttttcttttttaatagtataattatttgttatcatatatattcttcaattcataatgtattcaccttaattttattcaaatattaattatgtatagctttaaattgttttaagcagtaattacactcatttattactccattatctatatggtactactttcaattgtcttaccccaaagtcagaaaggtgatagtacccaacataacttgagttaaaattaaaattttactaataatatatttttaatacactcgactccaacaccaactacgggtccgggtccaagtctcgggtccaggtttggggtccaggtccgggtctggggttcaggtccgggttcgggtccgggtctgggtctcgggtccgagtttgtgtcctaagttcgggttcgggtctgggtctgaggtccaaattcgggtccaggtccgagtcccgagtccccatccgggtccgggtcgggttcgagttcaggtctaggtctgagtccacatccgggtccgagttcgggtcctaagtccgggtccaggtctggatctcaggttcgggttcgggtcggagattggtgttgaccccgaatcctttgtaaatattttaatacaagctaatacggatcatttgttatgtattaaataatacaacatgcattgtat

SEQ ID NO: 125558 - DNA, 1139 bp, Cannabis sativa
ttttcatttcaggctcaccaaatagtgtcaacaacaatagataaagactccatcaacattgatgcccctattattcagacttcaaataaacttgacccagtcccacatacaaatgctagaattacacattgcaaagataccttacggagaagatctccacaaatggaatgtcagatcgcatttgagaaacaggcgcttcaaagattcttcctccactccacataaagagcaattaacatcgtcaacatgaagtctcttaccaagaatagccctagtcggaagggcttttgacaggatgcaccaccaaagggtcttatgcctccccataactttactattccaaagcttattccacatggatggggcaacctcacaaggcggagctctaagtaaggcttgagtaagataaaccgttttgcaagagaatttcccgttccgccctattgtccaaacccatttatctttcccttgaccagggggtctaccctctttcagaatagctgaagtagtttcactgtcaaacatacaatacaaattctgaatgtcccactctcctgagctagtcaggaagtcttccaccttccttaggccacactcagaatgaccattagatatagggtataaggatttaccatgggtgactcacacatcctaccaaatattggtatcccttccatcagagatcactttacaagctccttctctttggaggtcactagctttgaccacattttttaaaaccaagaattagagttcttgtacttacaattaagaaactcctttcctttgaggtacttggctcatcacagcaaagagactgactttcacataaaagattccacccttacttagctaggaaggtaagattcatctccttagttatacgaaaactaagaccacctcttgacttaggaagacaaatcttatcccaagctttcaactggattcctcggttccctttctcaattccccaccagaaatcacgaaccaagccatcaattcttgcaacaagtctattagagagcttggtggtttgcatcgtatacataggcatggacagtcccacagactttagcacgccccagtttagagagggttttagccttccaacccttcaatttcgaggtaagattctcaac

SEQ ID NO: 125559 - DNA, 704 bp, Cannabis sativa
tctcgtgcggctagctaaccatttggagatatggctctgataccatgacaagaatcatagggttccatctcaaaaccaattggtgatgagtagagtagctcatgttcatatatatgactcaatacttttacatttaattcatgtgggacaatattctccaatagtgcaatttaaaaaaaaataagttttcatcaatcaaacataacattatatgagtgagacctatgtcaaaagtcaatttcaatctcctacaatacactatattttagtggccataaaccccactttatagagtattttttaaaattcctataataaaagagtcctataaatatatatgtaaacagcaatttctattagttgataattagttatggcatggatcatacaataggctcaatagaaatacatacctctcccaaggtaaaatacattaaatggtatgtctccctctcagaaaaatcaaatatcacatcagccttgataatattcctaaaaaattctttgtaagatttaattttaactccttcggatagcttctatagcttttagattaaaaaaaaaaaaattaaaaagtgtttggataaaaaataaaaatttttttaaatttaaaaatactaaagtttctcccaaaaaaatttatgagccgttatttctaaaattaaaataatttacatattgtcgaagccattggtatcaaggaa

SEQ ID NO: 125560 - DNA, 645 bp, Cannabis sativa
aaaaaatgacacgcgaataataacttaacagtcataaagttacagatataacttaaatattattactaaaaaaaattaaatttaaatatttattaaacttaaattttttattgcaaattactctatgaaattgaacacataaatataactccatgtaacaaacagtgccttataacttttgaataaaaaggtttataagtttgttagtcaaatcgattaatggattaaagagtttgtttggattttctaaacaaccccaactttagtagattaaggagtttgtttggatttctacagtcaacaattaattagaagttctatttggaactttgtttggtcatctcatgcattcagcatttttaaaaaggaagtatgaaaaatattttaatacttttattttattaaacaaatttagaaagaaaacaaatatacaatgtttatatcatataaatcaaaaatattaaattaaaaatatgttgtatatcccaatagaaacactctcttcttgacaaattcaatagtgtcacatgaatttgagaagttccttgaaatacataatttgctctatatattaaggtgccgtttggtaacacttttgttttctaattttcactacaagaaatcccctcattagcggcggggata

SEQ ID NO: 125561 - DNA, 1028 bp, Cannabis sativa
aaaaaaaaaaaaaattataaatttgccaaaattgaaaaatgaaagttaaaagtcgagcataaaagaccaatccaacgctatcattatagctaacttgagtacatatgatgtgagcagtgaatttttctacaaaataaataaaattgaattaggttactaaatattaaaatatgttaaagtgatattcacaaatatattattattattattattatttactataaaagtgtttaaattattatttttttaatgacaaaaattaatatttaaattattgtgtttgttatatttaagtatccaaattattttttgatagtgatcaaaatattataattatattacaatggtagcacttaactgtttttttttttcaatgaaagtccttgagttataagtaagaatggcgccacataataccatttctaatgcaatatctagatatatagtgtcaaatttaataagaaaaaaaaatactatatttacaatgcacaataatattttatgatacttatttgacacacttaatcacacaaattgatttttccgtagtaaaattctttaaacctttttctattttggtatttactattctattagtgagtaagtgttaaatgtcatcttgtactactgatatgtacaataacatacactgatacacatgacatatttttattggtacacatcatacattacttaaaatataaaaataatttaaaattaaaattaaatatatatttatttttcttttcttcttcttccacttccttctttcttctttcttcctgaagaccttatcacaaggactgaacatttatgtcggattcgacccggactcgatcaacctgcctgaacttgacctggccaacccagctatgtggtaaaactcgttccttatgggttggtcgggtccaacccgttcatttttatcaagtaagttccttaaggacttttgtctaattttatttaattttactatttcagtgattgtttacgtactaaactaaactccccagattttgatatctacc

SEQ ID NO: 125562 - DNA, 1557 bp, Cannabis sativa
aaactaagcggtctttacagtctgcatcatataactcctaaaaaatttcacagtcaaatgtatcagtcatacttgcagtttttggcatagtcgccaaacaatttgcaattaatgatgaatatgatgacgcagttgcctcaggcgtctcatgtggcacagtctcagatgccacaaatgatgctgacacaacatatgtcatagatgcctcaaaatgttccgataatgtcgacacaagggcagcagtatcagcaaacattacagacaataccgatacagccatagcagcatacatcgcataagatgccgacacaactagggcagcagacatctcacatgatgccaatacaacaagggtagcagacatctcaaatggtgctgacaccacatgggcagcaaacatctcaaatgatgccgacaccacatggccactagacatctcagacgatgacaagttcgcaaattttgccatactacccacaaatgtcggatattcctagagatgctagtgaagatgtactactaacttcttttagaattttattttagttttacaaattattggttaatgtttttttgatattttatgaacactcatatttaaataaacagtattgtaatatttgtgactcactctttattgtaatgtttgtgactctaaatattaaaaaatatttactttttatactcttaatttcataaattaattaaatcatttcatatattaattaattaaaaagaaatataaatatttaatataattttaaaaataaaaacaaaataaatttattttatttttaaaaaacaacattaagaatgacgagaatatcgtcattgataacataattaatgacgacattgtcgtcgtagatgggaacggataattaaaaacaataaaaaatatagtattatcaatgacgacaatgtggtcattgatatttaatattaccaacgacttaaaatgtcgtttttgataattctttatttcgacgaactttttctgatgattttttaccaacgaaatgtcgccattgataggcattactaacgaaaaagggacatttcaaaattttcctcattcatgctcatgactcttgtagtggctatattaggttttacattattctattgtcattcttgaaaatctctattcacctaatagtctaggattctaggtttaagtgataaattacttttaagagtatattgtgatggatctcattaattgtcacgaagaatataacttaattaaacgaattatatgttgaattaatttgttgcttatattaacatgtcttcatcgaagttaatacttttcttaagttaaatagattgcatgcttcgtggatctattactttgtaaaaaagattaattattgggcgtttcgccataattagttgtaatagagattgactgcgaggttgatagtacaaatcaatatatatatatatatatatatacaggaaagcacaagaagagtttatgtgtcattttataaaattttcttcctatttttcttaatttctaacacattctcttattttgtttgaaaactaaac

SEQ ID NO: 125563 - DNA, 747 bp, Cannabis sativa
tgtgttttgtaaaaattattgatcgaaccatctgttttgtaatgataaattttatatttttcaaaatagtactaaatagtactctaaactgatttttttatcaaaataaaacttaataataatcaaatatagatgtgttatgagaaaactggttacgttatacatttgttcgtgctaaaaaattatttttaagtttgtcgaaaaattaatctcagagtcatatttgtattcatttagaaaatataagatcttttttgtcatttaacaaaatataagatccaatcaataaattttacaaaatacagggtccaaaataatattaactcttaaacatatacttgtatagtacatgatagttgtaacatcctactagtttataggcacactacaatattttctaattactgagcactcatttgctaaacaaagagtttatttaaaaacgtaattaattaaaactttcttaaacaaacttaaataatttaaataaatatatacaaatacataattttgggatcccgtttaagagtttacaactactttcaaaatatttactagtgactaacaaaatgtgagcgtaaactgtcctgaaaacccaaaatactccagatttaactgtcttgatatgtacaatcttcatccaactctagtctcattctagttcaatcctagctcttacctgtacatgtaaataatatttgagtagatagactcagtaagaaaaatataaaaataaacatataacca

SEQ ID NO: 125564 - DNA, 742 bp, Cannabis sativa
cttcctacagttgtgtctcagcctgtcatcactttacctcctatcacacctgctatgtcttttgctcctgcttcccattctaaatctcatttcaatcaatccacatctaaaccaacttatatttccccatctcctgtagctccaaatacatccatcaacaaacaattacctctactcttcccaacaacaaaactaatatatctaatcctatttctagtgatgataattgtaagtcagtggataatgctcaccatatgcagactagagcaaagaagatctagaaacctaaagttctcatggcatctctcaatcctctttttgtcaagagtgtaatgcaagatgccaaatggttcaatgaaatggacaatgagtttcatgctcttactaggaataaaacttcaaaatttgttcatttgccctcaaacaaaactctaaaggcaatgttattaagtataaggacatgttagtactcaaaggtttttagcaacaaactgttgtggtaatttgcacacgtaagtgtacatattgttaacaagtaataaattcaccaggagtgaggtcgatcccacaagaattgtagttaagtactttagaattaaatctttacttctatttggctatataaaatctaagcgaaaattaaactagaaaacaggaaaaacagtgaaaaataaagagcaagtaaggaaaataacaatgattaaagttagggcttcgatttcaattgtatctattgattatg

SEQ ID NO: 125565 - DNA, 1303 bp, Cannabis sativa
atcgtaaaaatgtttaaaattccacgaaaccgtatttttgttgttttttttgttgtttttgtgcatttgtgaaattaactctttgtaatacgtatcatatatattaattacattgatattgtaacaattataattttttaaaaaatataggcaaaaatgacatctcgatcaaaagttctcaccaaagcttttatcaaatttcatcctaaattattgcaaatgcatcattaaatattattttttttatttttgatgttaattttgcctaaaaaaaaattcaaggcactatcaccaacgcatcgtcaaacgtcgtttcttgcaaaaaaaaaaaaaaaaaaaaggtaagcatcacaatgcatagattctaataaaaaatattacaaattttcaaagtacaaatctaaaaaaaaaaggtaaacaaaaaaagtgtttttaaggtattataacaaatgcattaaatatgatcaaatgcattggtttagcaacattgtttttgttgctaaataaataatgttttcatagcaacattgcaaatgcattattaagcatcacaaatgcattgattctaattaaaaatattacaaattttcaaagtacaaatccgaaaaaaaaaagcagacaaaagaaaagtgctttcgaggtactataacaaatgctttaaacattgtcaaatgcattggtttagcaacattatttttgttgctaaataaacagggccgaccctcagttgaaatgggtcataggcagaaaaaaatgttgacccttactacaaagataaatgatatttttaaaaattattaaaaaaaaatatgtatattttttaaaagatatatttttatttgggtgggtcctaggcacgagcctagtctgccgatgcttagggccgaccctgtaaataaataatgttttcatagcaacattgcaaatgcattattaaacatcacaaatgcatcgattctaatcgaaaatattacaaatttttaaagtataaatctaaaaaaaggcagacaaaagaaaagtgttttcaaggtactataacaaatgctttaaacatcgtcaaatacattattttagcaatatcatttttgttgctacataaataatgttttcatagcaacattgcaaatgcattattgattctaatcgaaatattacaaattttcaaagtacaaatctaaaaaaaaaaactttctcaaaagaaaatctaaaaaaaaagacaaaaaaatatctaaaatataatttatttttatttgataggtatatcttttaagaatatgaattgggaaaaaattaaaaaaaaaaa

SEQ ID NO: 125566 - DNA, 883 bp, Cannabis sativa
tcctggtaaaatatttctaacagtgaaatactataattgtggtgttctctgtttactttctattcaaatattcgttggccgctatcgcttatataacggtacaaagttgatcacgttcatgtgttactgaccccgagaggttcacgtgttaataagagcccttagatgttcttcatcaataagaatcccacaaggttcatgcgactattagaaaccaaagaggttcaagcgtctataagaacctcacgtggttcacataattattattatgcaatgatcttataagaaacttgagaggttaaacattattattatgcaatgatatcttataagaaacttgagaggttaaacaatcgaaaaacgtaagctcagtctactttaagttctccaagactgaacaagctatactaataaactagaggcatgtgttaatgagataaattttcactcagccgcgagaaggaattcgtcaaaagagatctcatggtttaaaatgagtcctcaaaatattaagtcaatatcacagtatcatccaaaaaaaaaaatgcgaacacacaccaaacaacaaacgatgaagcatttaagcaacataatttagatgttacattcatatactaataaatatgtcaatatgcttgcaatggtcttattatgatcatgattttataacattcattgagtaccttagtgaatccacctgtatttaaagggagactgatgagaaataaaaatacaaaataagagtactcttttaaaagtgaattaattagaaccactataattttctgagtcaattttatattatttagagcatatattgtattaggagtaaaacagagtgaaaatgaattgtgttattagataattggaatgaaacagtatt

SEQ ID NO: 125567 - DNA, 1968 bp, Cannabis sativa
gaaccaaaaacttacccactattgtaaattaatccttaggtttctaaaaaagaaagtatatgcatttggttcggatatatatttctttaaaattctagctttactccattgtatttaacttatagaggctaccctcaattttatgtttcaacctctttgattaactattgcatctgaatagacatgttaaagtatatttttatttaattttttttatcacgatgttcattataactataatattaagtttgtaaattttaaaaaactttgaatgctttatagtatcgacaacagagtttttgatattagaaattacaaatctattttcgacaaagtaagttatcgaaactttttaaatatttataaagatgatattgtaaatataacgaataccactatatgtcggcatgtattttaaaacagggagattgattaagatattgtaatagaaggttgtaattagtagatgtgttcgtagttaacatcatttagaatagtgtggaaagcagaattaaaaagattagatgatttcaatctttggaccaccagaagtgcatctgtttctattaaatctgctgccaaattgagtgaaagtagccattgtaactagaaaaactataaacctttcttctttaacttatgcctctgtctcttatatagtaactagaaaatttaggtaacttgcgtacggttattatttacttattcttgtaattttatcatttaagagtaataaatgattatttatattttatgaattgaaaatgaacctgtcaatcttagattatatatatatagattggtaagcaagcataatttatacattacactaatttctattaagaaggagagtgaggaaggtgattaagtctactaattaattgttaagaaaatgataagaagcaagagatttgaaggaaaagtggccattgtgactggttccactcagggcataggctacagcattgctcaccgccttggcttggaaggtgcctctgttgtcatctcctcccgcaaccaggtttaactatttattaatcattataatgatctattcatgccatagtaattagaattcatttcaagtatatattatatcttttgtttaattaaacacgaatatactttattaggaaaatgttgatgaagcaacccaaaagcttaaaagtcaaggaatccaagtgttggggcttgtttgtcatgtctctaatgcccaacaaaaagatctcatacacaagacactcgaggtcattttattatttaataaattaattggtgatgaattacatgatccatatagtgtttcataatgtaattagattaataatgaattgacatattttgtttatatatgtaactcaaattaaattaataataataaattattatttcatgatgcagcagaaatttggaaagatagatgtgattgtttcaagtgttgctgtcaatccaataactggcaaacgcataaccacgattatgggaacccaagagtctattcttgacaagatgtgggaagtaaatatcaaagctcccattcttcttatgaaggtacctaataaagaaataaatcaaattgcatatgaaaatattattattgttttatgcatatttattaaattttatcttatttttatttaatcatttctccaaactaaatacattcttaatttaattttataggaggctgctccgcacatgaagaaaggttcaattattttcatttcctctatatctgcctacgtacaaccgatatcaggggctatgtacggagtgactaagacaactctacttgggcttactaaggtcaatttggtagagggagaagttgaaaaatactctctttttttatacattaattaaattcaccctcaaataaaattttatttaaatatatctctttttatgagtattgtacccaaattatcttcatacaatcacataattaagatataatttcaaacataa

SEQ ID NO: 125568 - DNA, 618 bp, Cannabis sativa
ttcaaatattaaaacggtgccgttttacttttgcttcgtatattttgtcgtatatataattttataattaatatcttaataattgttccattaaattagacgattagagctaataaaatacaataagtatatatttattgcatgttttactatataaatattttatgatatcaatgttattgtataatatctatataaatttttagaatgacatttatctctctattaatatagaatctcaatattttactacttaaaatattcacctcagtaagtattttttaatttttactattagaaatactttaataagccatacggatcaatggtaagaagggtcaactctcaaaatatatgggggttatgttatgagaattgaactcatattattgtgtaatgtgtcatacatcacaaccaactaaattgtaaatttttgttgttgacagtactagagtttgacgtttagttggagataataaaatagaataaaataaaaatgaaacaatcttcattacattttttgtttggttgtatattaaaatattgaaatatcattctaatagaatagtctttctaccattttgttggaatgactattctattttgaaatggaatgaa

SEQ ID NO: 125569 - DNA, 680 bp, Cannabis sativa
tttacaatactaatttctattggaacacaatctaccaatagggatacttcaagtgactgtataactctttgatgtttgatattgctctttgataatgacaattgatcctttggtacatgccttataatgttgaagtcgggtaaaaatacaataataaatttaaaaccccaaccttggttactggttgggaggaaaaatggatggatcaataaaaagcccacaatgatttagataaaaaaaaaagacccatataaagggagaagaaatgacaagaatgaaaagataaggtaggatgctattttgggtccaattgagaaacaatttaggtatgctaacttgaagtaggacccaccgagggcaactgagacaaatactctctttgggtgaccgagtcgagactcgcccaataggggcccactaaagaaggaagaggaagagaggaaacaacctacttcaaatgactgagtgagtatgcatgggacaagttgagataagaccatctcgaattggattaggatgacaacatacctagcccagagggtaaagttcttgctaggtctgagtcaagataaatcttacatcgtgtttactctgaaaagtgatcaaccaatagcgaaatcgaccgacccgatgcttgccatgtgtgtgcacaaatttagaataagaaataatagacaatc

SEQ ID NO: 125570 - DNA, 1668 bp, Cannabis sativa
  modified_base (1516)..(1520): a, c, t, g, unknown or other
aattgagaagcatcatccgaaataagtaaagctccaaagttcaggagtaaaaattgctaactaaccaaaattttaaaactcatataaattttacttctatatactaataggaaagtacactcctctaaaagtgtgttccaacagatatctatctagtttggtaatcatgagtttttttttaatgatcgtgtatgttatagttatttaaaaattattttatatttttatttttatcattaacaaactacatcaagctaccgttttttataaactacaacttttattacaagtaataaaagtataatttaaaaatattattaattacttttaccaaatgcatacaaatttatagagaaaataattaaaaacttatatataaaataaaaaatttatgtaatataatttttttcataattataattataataaactagattataacattattgttattataatagaatcttaacatttcacagcattttaaaatttaaaatttactaaatattcaattagttcttttttttttataattttgctacaactattttttctcataacccaacacaattaggattaacaatttggattatttttgcgggccaggttaggccttcgggagcccaacaggacgactttaacccgaatgattagggcttttatcaggctcacggcccggcccagcccagcccgatacatattatttcgggtcgggtcaaagtaataccgacccggcctgattgagattcctaagcacaataatattaagttataaagaatattagacttgtagtgtatataattaatttgtgtggtgaatctcatttcacggcagaagttgtgacgcacgtgaacaatgccatggcacgtgtggtcttctcaagctcattcattattttatttttatcacaaagtatctcacttattattattattattatttatttatttacttcttaatcactctataatattcttcattatttatcactatttttttgtcctattcgcagtggagcaacttctatactgtggaccaccatatatctgatctagctatataaattgttccttacttaatcaaattatatatataagattagtaattagagaaaaaaaaaataatatttttagtagttagtatttaaaataaaaataattatacagtgtaaattttcacaggattatgaaaaatggacaatgtaattatacagatataatgtaattacataatttgataaacatgtcccattatatacaaattaaattatattataactttctaaatgtactttaaaaatactttggttgctcattgagtaactaataaattttaattttcaactttaaatatttattttttaaaagaaatagagaaactcaacaaagagaacaataattttgattcaaaataattaatattgaaggtaggtagggtcccatgaaaacaaaagtttaatcaatcatattcatatggctaagagaattacatcaatctcatatatatatatatatnnnnntaaatatatatatatatataggacccacatgtctacataaagagacacatgtttcaaatgatttgaaattttataaactcacacacagaatgtaccaaatataatattaataaaaaaaacaatataatcatgacaaataaaataaaat

SEQ ID NO: 125571 - DNA, 669 bp, Cannabis sativa
aaaagcccgttggttcccaagcccacggcaattccagcttaacacattcataattcttggcggctgtgacacagaacccgccccaataacgttttttgtcccatccgaaatgcccatattgacactattatccccattcggcccacttatttgtataccagccacccgtttcctttttgattcaagaatcattaaatctccatcaatatcttcaaaggtatcttccctcatatcatcttctctcataccatcattcacgttgctccttaatgccaactttcccaatatatcaccctgggattttccaacattagttcccaaatcaaagcctatagtttctccatccaatcccattgaatgaggaattgcttgatacttcccttgatttacggcaccagtagagctccctggcacactgtctttctcggccgaagctcctcccacaccctcaccggagtactcccctcgcaccattaatccttgtcgaagccatttggatccaattgtgtgttgtcttcttcttggcatagccttcaactctagattataaggttttttgatcatgtgtggtggggtatcaaacaactttgggcagaacttctctgaatgtccaaggattccacatataaagcaaaaagttggaagatcctcatatttgaaattagcata

SEQ ID NO: 125572 - DNA, 1359 bp, Cannabis sativa
tagttcagagggtatttttaacgaccttaaaagtccaggagacatgattttgtacatgttaaagttcaggggataaaaatcataattaacctaaattatatgatattcaatacttaattataataacgcgtaaaaaaatgttgcacactaataatactctttagcattttttttaaatatatatttttgagcatattgatttggtaagtgtcaaagttagccatgtagctgattgcatgtggttagcaatttttaacattatttattaaaggtgtttattatgttattactaatgtatttgattttgatcctctatatcttgacatctaaaatttattattacagacaaattgtctttaattgcatgagttttaaatttaaatttaattatttaattatatataataaattatttaattaaatttataaaattatattaattaaatttaatatcagaaaataaaatatgtataattaaaaaataaaataccaaataaatattattataaacacagaatactaaatttgtttttcgataaaacacaagatactaataagtatgttctctttataatcaaaatatatttgacctaatgatgaattacatcaataaatgaatgctacattttgtgaagtttggcactttaaagtaaccttcaacgattttagttctattagtttgtgtaacctcaactacaagattattgctaagttgttggctaatgggttgcgagcgactttgtctaaaatcatctctccaaaccaattggcatttgtaaaagggcaatgattacagagaactcaattattactcaagagattatgcatgagatgtaaagaaaatagggaaggatgtttttgttggaatcaaatgtgatatgtctagggtttatgatagaattgagtggaattttttgaagaaggctatgcaagcgtttgggttttgtgatagcgttataagcctcattttgaagtgtgttagctcggtgagctatcaggatttgttgaatggtggcccatcgaaatctttcaagctgtccagagggctgaggcaaagggacccctctcgccatatttgcttatcctttgttctttcatgattgctagatcttaaagaaacgcacggaagcatacaagagatcaaggtctcaagaggtgggcttccgttggattaagatccattagaggagtgaaaagagtgtgcaatttgatgcataagaatggatttgaattggatttatatatgagaaacatgatattacttacgggtgttcatcaaaccgctcaaaccgcctgcaccactaaaaaaatacaatttaaaattttttgcggtgtggtcgcggtttgaattttttctaa

SEQ ID NO: 125573 - DNA, 1095 bp, Cannabis sativa
  modified_base (1039)..(1051): a, c, t, g, unknown or other
taaataattataatatatactactatataaaaaaaaatagactaaaaaagtttatctggtgccgaaataaataggagtagattcgtacatcacttttaaaaatgtatattaaaaaatttcccaacaaataattcttaattttataaatataataatataaatatatatataaatattatttaaattataaaaaaaactaaaaaaaaaaaaaatgccgtgactacagtgcacgacatatgtcgtgcaccactgtagagaaacctataaaatgttgcatgatatgcaacctccttggatcaaatacatacaccataccatgactttgcagtctctttggagctgctcttgcaacctttatttgatttttaataagttttgtttgattgtttactacatgtgtttgtgaataaattgaatatttttttaagaataattagattttttttttatcaagaaggaaaattttcattaatcaacaaagacaaatacagacaacttaacttaggaaagccaacggccaacaacaaaatcaaaacaaaactacctattattacataacttaactagctaggtagtctttttcctgtatagttatctttttattatttagatttgttttagataaaatttttgattttttttttttttagtttattctttattaatattaattttaagaatttatcaatttttctagctataatttttaggaattaatataaatttgttaattttaaaattaatgttttctttaaaaggggcgaaacttagtgttaatcaaatttcaaaaagtaaaaatattaattttaatggtaagaaaaatgaagcttaacaaaaaaaagaaaagtaattttgtaattgttacatcttgagagaaattttaacaagttctatatttgaagggaagcgatctatatagtagtgttataagttttggggcaaatattgtttgaacaatgagggaatattattaattatatatacataggagaccagtacgtagaaccactgcatatatattaagggtaaatactatttnnnnnnnnnnnnnttgcaaaagttactaattggaccctgtgttttgttaaatgacaa

SEQ ID NO: 125574 - DNA, 1742 bp, Cannabis sativa
aacggttattgggaggaataagaagcagaattttgctagtatttgtgacaaagtacagaaacgggttcgagggtgtggaagcggagcttctttttggctggtggccgagagattctaattaaggcaattctgcaagatgttccaaactatctaataagtatgtttcagctgcctgtggcgacctgtgacaaactttgctctattattctacaatttcggtggggtacgaagaatgataagaggaaaattgcttgggagaaatgggagaatgtgtgctagcctaagcccaagggaggcttaggctttaaggatctcatgctttttaatcaggctatggttgctaaacaagtttggcggttactccaatcgccgaatttgttaccaggccgtgtcttgaagcacaagtattttccccacatgtcaatattggaggctaaagatcgccaaggttcgtctcatttgttgtctattctgatttaggggttggagttgttgcgatcggggatgaggaaagtagtgggggatggccagagtattgacgcgtttcgggatccttagattccctgacctagaacgtttcgtcctatcacgccttcccctatttgtagtgtgctggttaatgatttgattggtgtggatgggtcttgggatatccattgttgtctcattatttcttgaggttggatatagctatcattcttggcatcccgttgagtagtgaggtatgtgaagatcgctggtgttggcattatacttcaaatgggtcctatactgtaaggagtgggtatgcggttgcttttgatatggcgagtgaacagaatggaggctcttctgtgaatcaagctcattggtggaatgggatgtggaatttacaagtaccacagaaagtcaaaattttcctttggagaatgtatcatcgggctctcccgactaattcccagcttatcaaacgtaagcttcctattcagtcgatatgtcacagatgtggtgaggatgcagagactccggagcatgctttagttttttgctcttcattgcttctaatttggtctaagcttcggatttggacccttctatatcatggtcggaatgggtctttagtggagttgcttgtttatctctttgaggtaattgattagaataattttgcgttgttatccatgatatggtggtggatgtggtatggtaggaactctgttttgttcaggaaaaagcattctagattggaagtgattgttgaattagctaaggatgctttggaggagtttcagggggtgggcgtgagtggtggtagtcaggttttggggacctgtgatgctggtgtatctcggatgggtgtcggttctgttgggtttgggcagggggaggtgaggagtggtggttgtgaggctaggaggggacgttggtgcccacctatgttgggtgagtatgtgttgtcggttgatgcgacagtgactccaggtaggggatttgcggggtttggggggttatctaaggaggtgagggtgtggtttgggcggcttaggctgtgggcgctattggggactttcagttggtggtggcggagctccttgctctcagtatgggccttttgtgggctggcaggttgggatttactttaatgcgagtggagacagattcttctgttcttagttcttagattaattgtccggataatattattatgtttaaaccaattgttgatgagattatgtctcttttagctgctgttggtggtggtt

SEQ ID NO: 125575 - DNA, 2326 bp, Cannabis sativa
ttgatatttaaataatagagattacattaaagagttttatttagggcataaagcccaacaagaacccatgtagttttcgtcataacgattgtagcaataagcagccgaatgcccataacgacagcacacctgacaagttggtttggtgttgttacttctgccacctttgcctctgaatctaccagaaccccttcctcctttctgttgagactgacttccacaattccctaagccaaaatgacttgattggtcttttggtttcctggaaaaccagaaggttttgttgcagcaacgtttgcagaaggagaggagaggttaaggttctttgttgctcctgatagggttgtcaacctgttgagtttgttatcgaaacttaagagtatatcctgtaattcttgccaggatgtagaaaccttggcttcaactgggagcacaataggtaagtcctctatatcaagactagagagaatgtttgagacaagttgcttttcaagatatggttcacctgcaagggccaaaacatctgcccactgtcgtttctgtcgaaggtagtcagccatggacatggatcctttcctggttgtctgaatcttggtgcgatactcatccatcatcacgcgagagtgagctccaaacaaagtttccaaagcttgccataaactcgaagctgcatcacaacccattacttctgtagcaatggttttaatcattgacccataaagccacccaagaagaagttgatcattgacaatccaggtcttgaactctgggttaatcacaacatttccttcttctgtatggatctgtaggaaggtactcaatcggtttaaccttggtacctttcacgtatccgtcaagccgatgaccacgaacaatggcaaacaccattgttttccacaaggtataattttgtctgtcgagcttaagggcgaatggttgatttaacatacttgcaatatgggttccaccagaacttgctgaaggatttgcagactgagtaactgcacttgtagcactctgttcacctgaacgagtcgtagtctgtttagccttggagcaatgagcaaagaggaacaccacctgtgtgtatatagctctgataccaagtttgaaaaccacagaaaaactaaaaacaaaaaagacacgaaaagagaagaaaatgctcagctcaacaaacaattagctagctactatgtcatttatactaactagggttattacaaaagaatcatctagaaagagacgtaccaatcatgacctcataattgcaaagcaaaaggaataaaaataacagaattgtgtacaaacaaattctttagggatctatacaaattagttatgccacctcagcagtgaataaaaaaacatgtgaggaatttcatttcttgacaagaggtgggtggatggagaggagaggagggagagagatggtaggagacaacaaatccacttgtttggcaagagggattgggggagggaagggatagttggatggagagtaaatccttccaaatccttaatttaaaatccttccataaatgaaaggattcacaatcttcctctttaattatttaaaattataaatatagcctcaaaatatattattaaaaaattacatctaaagacaatataataattttataaataaatattctccatccttctatcattttcatccttctaaccaaacaacttaaaaggattgctactctcctctccctccctcttattctgcatcctccactaactctccatcctccctattctccatcctatctaaaaaacatccaaggctcattcttattactcctcctctttcggatcataatttccaacagtggcgtcgcgacttcaatctcgctcttggtgccaaaaataagactgtcttcatagatggcaccttaccgcaaccagatccgtctagtcctttgtttcattcatggattcgttgcaaccaaatggtaatgtcttggattattcattgtgtttctttagatattaagagcagtataatgtttcttgatactgctcatgagatgtggtctgagcttactaacagatttagtcaaggaaatggacctcgtctttttgaacttcaagaatctttaacatatttacgacaaggagacgaatctgtcactgcctatttcaccaagcttcgggctatatgggatgagatcaatgagctccgaccttgtctcccttgcacttgtcaagcttctgctgataacaccaaacttcaaaaccaagaaaaggttcttcggtttcttactggactcaacgaatcatatcaagcggttcgggatcaagtgttaatcaccgaacc

SEQ ID NO: 125576 - DNA, 2612 bp, Cannabis sativa
ggtaaaatatttccaacagtacaaactattgattcacgtattgacgagaaaccatttgccgccagagaacataatcgtaaggatgacatcgataatacatagcaaggcattatttttaatatgtgtaaaaaggtgttgacgagtcgagtagactgttagaacacttagcatataatatacattatactaactaagtgttacagcttaaaggacatggataacaaatagcgagacatccatctcgccatgggaaggcatactcctggtaccttcactaatcagctccaatcatctttcaatgggctccactgctctgtcacatcaaccctttgataaggaagctgacattcaaatgatgttgaatactgaagttcaccgtgcgattgtcagatggagcgttatgtcttcacatgcaaaaacgacatgatttacattatcaatctcggaaagacatggaaaaagctccagctcgctgtcagggttattgttgttattgagtgttcaagcacctagtgaggtaccctgacaagatacattttgcagcatgtattaatccacatcagcgttgactcattaaaagcagtttaaatcatagctgtaagatattcagataataactgcatttatttatgtggagcgtaattaaggcccacaattttggaaaaatattgttgtgggattcatatctgaatgtaattaactgccaccccatgttagtataaataggggcagaatgtacagaaaaagagacgaaaaatcctggggagaaaagaaccctagtttgcattagaaaaatctaaataagattgactcgtagactatgcagagttaactgcaaaactacataaaaacttggtgttatttttgctttattattctttcttagatttctactaaattctgtggtgattctatcactaaaataggcttattatcgttaacgaaaatctatgttaacaattacaaatataaaaaattatgttttataaaatttttattttctatatacttttaattattttacccttatattacaaatatttaccgaaatttttaaaaattgattatgtagagcttaaggaaataaaagatactaaacaataaacagacaggtttttttacgtggttcggcgttaatgacccttagtctacgagtcaatagtattagcctctttgggcaagtgtttaggtattacaagtgtttacagtaatgatttcactttcctcttgttcctcttaatgggagaaagctctctaggaattttagcagagtgtttgtagatgaaaaattattcacctctttactcaaagaaaataatagtatttaaaggcacacatggggtaaagcgcataccctttacccacctaggattttgtactccacacgctgctaaggctggtacttctaaatgacgatctgaccattggtgggtaagaaccttcttcatcgtgtcgcttacaactgcagcgagggatttcatacaaactaggacacgggtcacgcgaaggttcttcctttggaatatgctctctaattagactattggggaaaaggtataaccagaagtgcgtacgcacactaccatggcttggcatcggggacaagatctgatctggtgtcagaaaaaggtgtaaccatctatatagtaatttttatatgatgttaacgtggtcattgcctataagacagttatcgcgtcccgatttcattacttaaggaagttccatctgggagtcatctgtttcaattaccttccgggttcggaaaatgttccttgctcgcaaatgactcgttctgtcagacgtctagtacacacttctaggattaccgagatgttatctttgagataccttataagttattttgattaatcctttctactgatacactttgtcctttaatcatgccacgtgtctcatgcgcgaaaacttgaataacaataaatatatatgcatttgataaaaataatttttaatattcttgaactatattttcatcacttgtgaaaaatagtatataaaaactttaagttgatgtggtttgttactaataaaaatataaaatctttttaaaaaacaaaatgaaaaataaaaaaattaaatattatttattttaaatattttttccaacaaaataatactttttttttaatctataataaataatcaaatatatatttagtacaaaataatttattatagattcttttaatcaaaatcgttttttttttctttaaaaaaaaaaaatttgggttgtatcaactttataaattctttaataaacttttttaactgcttactaaatatttttagttacttttacaatgtacctccttaaaatggatatactgatgcatcatttatttatttcagtacccaaaagaattttttagtccaattgtttttcatattcttgaatgttatagtcttttgagatattttacaaaattttgagaaattttgaataatttataatatagaaaatagtgtttaaacagtctatgtcatacgcgtataaaataaaatagtcacgcatacaatacgcggtttaaaccttgctttcagtatattaaattttctgaattttttaaaattttgtagaatgtcttaaa

SEQ ID NO: 125577 - DNA, 913 bp, Cannabis sativa
tctctctctctctctctcttaaatgagttgagttttaacaaacttaaccgatttgccaaatagggaatgaatgtaactaaaatgacagttagacaaaactgcttggagaaaaaacaagttcaatttaaatggattatcttccacaaattccacattaatccatataaactgaaccttaacaaaactagattacacttgggggagtgatcctgttgcaatagacaggaccaatgttgagcaaattcaaacaatgttagaatttgctcattggcaacaccttggttcctgcatcagcagggttctcatcacttgggcttatggttcatattgaatgaaaactatttttatcaactctgatattgaccataaaaatcaacatagacgactcgttcacgcgagacaaacatttagcacaatgtgtctctagataaacgtcaagcggaacttccagatgagtagttaatgagcatccagatatccaactctgcatcatagtaatttattattatatcccacaatataaggattttattcctagaatcatgtataagaatcatatatttcgaatatggaaataaagtaattgtcaatcaagcatctatgtgtttttattatccacaaaggtatgacacatttttaaaattatcaacatgacgtgacatccgcgtcagcagaatactaatgcctcatgggttaggcttcactaaatgagcccgaagtcaatgtattatctttattcaccctatacatgggcaaggtttacaaactagaaccctaactttataaatataagaaaatccattcatgcaaagggagagaatctcattccttgagcgttcagtcaaattctaggatttatatacttgacaaaatacttgtgtaaatcatataggttttgttgggttttatgccc

SEQ ID NO: 125578 - DNA, 992 bp, Cannabis sativa
aattaaaaattttattttattattggtagctggaaatgtatcgtaattacttggaaatagcaacttagacgcggcaaagacttaataatcatacaaaataataaaaagacaaaattaacaactgaacccgaatgctcattaacccaataaatacattcgcacaatcatcccaattcattcaaattaactctccttattctataccactcactcataattaattatattaaaatatttgagagttcatccaccatgaatacccaaatactcttctttagtcttgctttagctttcattgtctttgctgcaggtaataattaattatatatatatgatctccatgtgtatctactaaaaacttatataatagctagtttattttttcctttcacattttatatatttatgtacgttgggcatcaattgtaaaatagttacgaattacacaataattataatatgatattttatatgtgttgatgcactataagtgtttataattatattcatacagagtgttttcttcttaatatcaaatcttacttacgagacagatatgtatggattgtttttcaagcgatgttattcattaatgaaattttaaaattttttaaaaataactataattaaatgttaattttaaaaataaagttttaataatccaatcaccgataattaaagaaaaattggaattttttacttaattttattattaataattaatatttttcactttatataaaaatacgttaatatttggtattatttttatcttcttttaactcaaattaaatttttttatctctatcgaataatcttaactatatgatataaaattgaaggattttttttaattagataataaaattaaatatcaaaactacttaattttttttaataatactcattcatagataaatccaaagataattgttaatatataaagatatataagtatagtagcaaaaaattacgtgcgaggcacgtatact

SEQ ID NO: 125579 - DNA, 1427 bp, Cannabis sativa
cttcttcttatctctgttctctatcaatatgtgtttaaaaaaaaatagttctttattataggctcttattgagtgctatttgggtgcaatcaattgttcttatagtaatacaattcctgattcatcaaaaaataaaaaataaaaaataaaaaataacggtgacatgcaattaattttctagccgaaatgccaaaaacaaaattacctttctttcaaaaaaaaaaaaaaaacaaaattatttcacaaatacgaaaaaacaaattataaaattagagtcttttatattgtacacttattaatatttttatgattttcttatcttatttataaaatatacagtttttttatatcgtacccttattaatttgttgttaattttttattatcggtatgttattttttattattgttttgctgttatttttatgtagtttttttattgttttcgttttgtttttgagcatcctatttaattgttgatcgtgttatcagaagtagtgatattactctaaattttaatcatgtaatcactataaattgtaattaataaaaaataatgaattttttcaaaaataaaatattaaaggaatacattctattaaaaaaaaattgagaatattatttttcagaataaaaaaacacatgtaaaaaaggtaaaattaaaattaataatgtaataataaaaagtcaaacacgatcaactttatataataaaatagtagtactttattattgatttgtataataaaattaaaattattgatttgtattattttattatataaagctggtcgtgtttgactttttattacattggtgtttcactctttctagcctctacatggcagacttgttttcgtaatattttttagggaaatttatactcatgctgtttttttttttttttttgttaattttgtttgggataatgggctaaatcactttaattttgagtttttaacagttaactataaaaattaaaattttggatgcataactatctaaattccggttcctttttctctgtatcttttcgtctaaaaattacagttaagtgtcacagtggactgtctacgtgtacacacttgtatacgtggcaaatttttagtggtccacgtaatattaattttaaaaaacaattataaatatttaaaaaaattaaaaaattaaaaaaactattttaaaaaaaattaaaaattttttttcttttttttctttttttttttcgttttcttcttctttcttctttcctcttctttttctacagaacccttccaggccctctttttctctcgtctcaccaccgcccgagccgaagcaccagggcggaggcgaaggctctctctttctctctcccgatcttctcctttttcttcttcttttctcatctcttctctctctctctgtctctgtctctgtctctgtct

SEQ ID NO: 125580 - DNA, 681 bp, Cannabis sativa
aaccatggctcaacaaccagaggagcacgattcccaaacgaccgtaagatcaaccgccacacctacaacactaaatgactccaccccacacccaagagacaccagagaggaagagctctattaaaatgactatgacacccaaatcaaaatccaactagagccacacccaaggccaaaagaggtcggctagccctggttgaattggaggaagataatgagttagaaagaaaccctagcaaccaaaaagagtattgttttacatacatatatactttatatatatataaatattgtatatcagttttctaatattttttcaatatttttcaatatttattatatatattaattttttttaaaaaaaaattattatattattaaataaatgtcgattaatttagatcaagtattttttgaaagtgaatcaacatcacatccacacaaataatgggtatagtgatgtgttttcccaaacctaacaaaaatatgaatatcgacacattgtggattacatcttaaattaaactaattggaccagattgaatattttacaatcccccacaaataagataagagatgtacgatattcatatttcataataattgctatacatatgtatgtgtgactttattatttatttatttatttattgtgacagataatctgtatggctttattgc

SEQ ID NO: 125581 - DNA, 2146 bp, Cannabis sativa
gtacatgtcttatttatttatttttttaattatatattgagtctttagtgacatgcattgtgtgattctaaatacttttagagttatacagtacgagtcactgtatatttatatttttaaaaaataaatagataattaaataagcttttagttacactcttaagttttagtgactcgcattatgaaacataatgtaaattttttactgtcatccaatgcgtgtcactaaatattggttaaaacatttagtgacatgcactttttgtgcgtgtcactaaattgtgtcactaaatgtataaattgtagtagtgtagcatttaacatcatatatgtgaaatggaaacaaatataataaaaaatagaaacaatataacctcaaaatcgaaactatagtttctgaaatagaaacaactaacatttaacctcatttgtgtgaaatagaaacaactagcatttaatctcaaaataaaatttgtgaaatggaaacaactaacatttgatctcacaaaatagaaaccatttaacttcggaatggaaagtatagtttgtgaaatggaaacaactagcatttaatcttgaaatggaaacaatttaatcacgaaatggaaactatagtatataaaatagaaatgactagcatttaatatcatatatgtaaaatggaacaaatataataaaaaatagaagcaactcacattaaaaatagaaataatttaacctcgaaatgaaaacaaatatcatttaaccttgtatatttgaaattgaaacaaatatcataaaaaatataaataaataaaattgaaaatggaaaaaatttaacctaaaaaataaaaacaatttaaccttgaaatgaaaactatagcttgtgaaatggaaacaacaagcatttaacctcatatatattttttttaacaaccttatatgtgttaaatagaaacaaatatcatcaaaaatagaaataactaacattaagttatatttaatttaatctcaaaaaatagaaacaatataaccttaagatggaaactataatttctgaaatggaaacaactagcattttatgtgaaaaaaaaataactagcatttaacctcaaaatatagtttgtgaaataaaaacaactaaaaaatagaaacaatttaaccatgaaatggaaactatagtttgtgaaatggaaacaactagcatctaacctcatatatgataaaaataaaaacaaaaacgattcacattgaaaatgaaaatcatttaacctcaagaaatagaaacaattaaagctcaaaatagaaactataatttgtgaaatagaaacaactagcaattaagcgcatacatatatgtaaaaagaaacaaaatattataaaacatagaaacaacttaatctcgaaatagaaacaactcacatgaaaatagaaacaatttactctcgaaatagaaacaactcacatgaaaattgaaacaatttaacttcgaaatgggagcaactataacatttaacctcatatattataaaaaatgaaaactcacattaaaaattaaaaatgagaacaataaaatcgaaagcatttaaccgcatatatatgtgtgtgaaatgaaaataaatattataaaaaatagaaacaatttaactttaaaatagaaactataatttgtgaaatggaaacaactaacacttaatctcatatatcataaaaaataaaaacaactcacattaaaaatgtgaacaatttaaactcgaaaaaaaaaactcacataaaaatggaaacaaatgaaaactaaagtttgcgaaatagaagcaatcaacatttaacctcatgtatcataaaaatagaaacaacttacattgaaaatagaaatatttaacctcaaaatatatgtgtatgtgaaatagaaacaactcatattgaaaatgaaaacaatttaatctcgaaataggaacaacccacatagaaaataaaaacaacaaaatagaaataatttaacttcgaaccagaaattataatttacaaaatagaaacaactaccatttaacctcatatatcataaaaaatagaaacaactcaccttaaaaattgaaattatttgaaatcaaaaaatagaaacaatataaccttcacattgtatatgttcctcaatgttgtatatgtt

SEQ ID NO: 125582 - DNA, 580 bp, Cannabis sativa
ggaaaaaattgctaattagcctaacaataactatagctggcggttttaagagtcggttaatacattcctaggtcagttatcaatggtcgcctattacaagacgaccctcctattcaactgaatagcgtcggtccaattcgacactttgttgtaggatgggaaaaactagctattttaatttatggtcaaacgatttttctctgcattaatttttaaatttttacaatcacaatttctataattttttttcagtattaatttttaaatttttacaatttcatatacatcgctacaataatatcctaataattttatgtttactactaaaataattaatctagtaacgtgattaagttaatacaaaaatgttccgaatattaataaactaacttgcactataaaattattcattaatagcggcggaggggtccgccgcaaataactcttaaatctgcgccaattggttattagtggcaggaatccactcccaatagcccggtgctaataattggacgttattgatagtgttaacagaaattttcgttaaccaaatttgagccttacgattatgattcaacac

SEQ ID NO: 125583 - DNA, 819 bp, Cannabis sativa
tgacttagtaaacttcttacccaatcggtggagttacttaatagattaagtagagaaataagatagattgattagggatttttttaagaatcattaattagtgtaattgtaggggttgatttcgataattgtgtcaggtatataatataaattatatatatatttgaagtcagtttctaattgaatatgaatatgagttatttatttcaaacgttattttagttagtggaaagccgaaagttgtgatagaggaaatatgacatacatctatatatatattacttatatgctttggttttattaaaaattaccatacacaagtctaaagaaggagagccaaacgaagtaacctttaatcacacttccactcatcaactatcgtacactttgaagaacataagtcgtcatacctattataagcatagtatatatatcgaggcttgctttcaggttatgaccggactaagttttgttcaacagagactaagggaactatattgcctgcttcactctaagttttaaggaaatcatagagcaatatctttaatactctctattatcaatcaggtaaggaaattaggtagttttttttatgttgaactgtgtaatttaaatcatttgtgtattaaaatattatttgtgatgtattattatgaatgtgtatatggtactgagaatgtgtactatggacacaatatgaatttgtgaatcaatgtacaatatggtgtgtgtggttgtatattttggttgtcatgatttgtatgtatggtatgttgtatgctaatgtctcaggtacaaatgaggggccatggtggggta

SEQ ID NO: 125584 - DNA, 706 bp, Cannabis sativa
tttcgttgttccaatacttacagattcttccaaaattgttggtttcagtgagtatttttactgggtattttaataccatcaagaaaaatttgaagtaaacaaattaatggaaatggtgatcgaaattcccttttaaacagttttttattgttgagctaatggaattatctagagtaacagtgcaccaattatttttgcataatattcaaactgacaaagaggacgaagtatacttctattaaactgtaacaaaattaacattaacaataaatttaacataaaattacatactcatttcttttcgatcaaaaaacaacctaaaaccttaaaactttgaccttctcctcctatcttgtgataaggctcttccttgatagaaatatgcttatctttcatatataatagctccaaaaattagcgtaatgactcttttttttttttttgggtgtggagaagagagaaaatgtttggagtgaagaaggaaagagaaaagaaaagaaggaaaattgacagggtagaagggagtatttttaggttcacatcaaagtgtgcatatattggagatggtgcaaaaaagtttgtctatttttttattttgcgtttggaaagcgacaatgtaattgaatttgtgtataattggaggtacacaatttgacatgtttgtctgactatgtaattacactgtgactgtgtaattggaagtaat

SEQ ID NO: 125585 - DNA, 855 bp, Cannabis sativa
aatttttatatttgtacttcaatgcatgcacaaggtacaaattaattaactataaaagtcatgctcattaaaaatacataaaataactaactttatttatattattttagagaattattaaaaaaaacattattggagcctagtaccctcctcagtattatacaactattattataattaattatcaggtctcatatagtttaagaaaataacttttttattttaaaaaataaaataaaatagcttttagagaatatttctagtcaatcgtgaggagctacctaaggtgttgggggcaccactagtggtcaataacaatgctcattattttaatatctaataaatttaaaaaccttttcattaatgaatggtgcaaaaagtaattaacaaatatttattgtgggctaaattttgcacatgctattttttatgctaaatttaatacaatttttagcttaggccaaatttagcacacattttacatgaccgctagagttaaattttaacaaaatattctaaaaaatacaatacactatatttataactttccactatagatgctcttaaaaaattgcaaaatgttttgtatgatcatgcaaattcaaagagcttgaaacctaaaaaggaatgtgaatttgatctatatttctacattatacaatctccatttgcacccaatgcatatatataagtacatgtgcattacacgtgcgtaatattagcctagtgttattataaaaaaattacttttatttgcaacaaaatttatgactaaaagtaaaaaaaaaatataactaattataaatcatgattcctatgttgtgactaaaagtatagtcacaaaaattacaattt

SEQ ID NO: 125586 - DNA, 818 bp, Cannabis sativa
tctctctctctctctctctatagcatctatcaacacttgagatttgccatctttgattcctactttgtaaccatagagagccatatcaaatcccacccataatgatccgagtagtgttatctctttgtatcaatacaattaaatggggagtaggtcattacccgctaattaagggggtcgaacctctataaaaatcctcgtgttcatttagtttcgagtttgtaacatgtggcaagcatcagtttaatatgaccttgttgttggttggtcaatttctaaggtcaacagtttggtactttcattgagagcgagttgatatcataactgatcaaacaccatggttaacacgaggagaagtctaattgctccatctgtatcattgggtcttcctcaagaccctctgactgcagatcatgatgtccatgttccagccgctactggaattcccatgaacaccgcagatgtggccaatcctgccaccatggcaggcacctcgaatctagtcactatagctggcgagagtgacacgaacatcctggtggatgtgaacagcagacccttgcctccaaaagaggaccctccactagtgcctcccactgaaggaaggacccttagtgaacagcccccatgaataacaaccagatctcgtctctagtactatgctggagagacaagaccaggaatcggtgagcctcatgtggacttgggagaagatctcgagttgtctagactaagagaggccatctaccaagtcggcccaactgaagaaccatgtgctgctaattacaatgtattcgctcagtaaagacgcgaattct

SEQ ID NO: 125587 - DNA, 1062 bp, Cannabis sativa
tctctctctctctctctattcctcacgtaaagggtagaataaaaaaaaaaacctggaacttcaacctaatttttagctcagaattgaaggtagatgaaatgaagaacttggaataccttgttcctcccttctcctctttgaatttggtaagaaaagcttttgaagtccatatgatttttttgatttggttctgtatagctaagtttatgttagattctattctcaagttcaattttaggctaattgtgactgagtttagtgtttgtaaagtttgagctcatggaactcaagtttgagcttcaatggtagtttctaaattttgtgcttatgggataattgagctatggtttatatttcaatatgtcatctgagttattttgtgaagtttgataggttttggagaggttttaattaggtttgtgttgcaaaaaccaagtttggtcatttctgcaaggaaaaatagttgaccatttttacagtcttctataaaaatggtgaaccattttccagggcagactccccaaaaacagtgaaccgtttggaaaaaatgttgaactgttttgggtgatttttgggagcttatgttttcgtattttattgatatttcgggtatttctacgctatttatcaataggcaattttttttttaattttgagtttaagtattggaataggattaaatgagtaatttactaatttaccattgtcatgacataaggcctgagaatcgttgagcgttgttccactaaggttggcctgcacacttgaaattggatatgaagtaagaaaagtcaagtataccacatagcatgtcaatataagcaacaataatgacattgttataagaatatttctatattgggaaatatatttctatttaaggaaataaaataaaaaaaattgaatttgtgataaatgaatatttatattcattgaatctggacaaaataaattacgtaatattctatatatttaaatattcattacctgatttgatttcctgaattaattgtcaaaatattctgacaattaatgtggcgcagatactgatggagtatctca

SEQ ID NO: 125588 - DNA, 1689 bp, Cannabis sativa
  modified_base (26)..(28): a, c, t, g, unknown or other
  modified_base (1458)..(1462): a, c, t, g, unknown or other
  modified_base (1663)..(1663): a, c, t, g, unknown or other
tacagaacctaatttggattttttannnattagttatgattttttaaatttggatgaaaatatttgattttgggaaccacacgtgtgtgcgcggggatgagtgtacgctcggacagcacgcgtctttagacaagtgcctgatcgaggatactcggacaagaccctatctgaagggctgctcacaccgagctccctcgtgcaatagaggctgcacgcaacctgttccctcacccattccccttcattcgcacgcgcaagggtatgcattgcataccctgtgcccaattttatttttgtcatatcttttgatttaaaaattatttttcattgaaacaaaattataattgtgtgcaaaggaacgacctggcttgagcttttcgttcccacaaacagtgctaaattgttgacggtgagaactcgtcaactaatctagtggctgaaaaatacaaagcaaccgaaaaattaaaagatgataaagatgaagatgaaaagatgtctgaaagttttttttctctctattacattcaaggcctgtgttacagcaagttatttttcaaccccctttcacatctgagatgggggtatttataggctctaatggcctggtgtacaaagtggtcccatggggacaaaatgtcactttcacactgcatgtcgtaggtgttggaggtggtgtggcacctcgtaccattgtctggtgtcaggtggtctctgattgcaggagagtgatcctcaatcgcaggcacgtggtccccagttgcaggcatgtggtccatgattgcaggttacatgagagtggttgtagcctgtggtccccgattgtaggttgtaggagagtggttacagtgtaccttgggtcgggtcctcaaacctctcatgtccgttgtcgtcgctactcgtatcttcttattttcagagttcttagaaggcctggtttaacactttttccttgcatgcgttgtcgatgtgtgttcacctctcaccctatatttataatcctcggaacatacttacacatcacacgcaagggctcgcatgtgagacccccatgaactcgcatgcgagacccctcatggactcgcatgcgagcccctaacattaaatacacacacaacacacccccattacacacacacacacacggcttgcatgcgagcccccaatgggcttgcatgttagccccaatacactcgcacaaacacacgtcgcacctctcccccatatacttttgcgcgcacacacacacacacacatctcaccactcccccatatactcgcacacacgtctcaccactcccccatatactcgcacacacgtctcaccactcccccatgtactcgtacagacgtctcaccactctcccatgtactcacacacacgtctcaccactcccccatgtactcttactgtaaagaccgcttagttcaaatttggaaattagcagataattaggattnnnnnatgaaaattatttatggatatttaaataattatttatgttgatttatttgaattcagaatgccaattctaattttgcatttttggtgctcggcaacatggaacgcggtgtatggcgcagtagaatcacaatttcatattttagtatagcgggacggttttgttagacattgagaatgtcgggattggtcgggaatttagantttcccaaaatacccttagtaccctt

SEQ ID NO: 125589 - DNA, 1727 bp, Cannabis sativa
tgtagagaaaccaaagcaggacaaagcagagagagagaacaagaaagagaaagagcaaaagcttgaatattattgattaaggacaaagcctttatatacagagtacagtaggataaaatgaaagaaacaacctataactaccttaacagaattaacagaaaactgattgtaacagaatttcagttaatgctgtttaaaatgagaatatcgaaaacatgaaagaatgcattgatatatagtaattttagccggtacctaaccgtaaattttctatatatttttaataagtcacaacactacataattaaaatgatatatatatatatatgagtgcactcttcacaggtattatccattcatgggtaatattataaaaatttaagtttttataattagtttttctagctaattaaaaaaatctctcatttttatataatatgagttggggttgttccatcggttaaaaaaaaaataagaaaaaaagtttttctataaaaagaaagattaagtttagcttaagtattttgtatataaatatatttttgatatagtgtaaaaactgatattttttgatatttttttttaattaagtagctaaattaagtatagaaattcaaatttctcttttattattcgtcattgaatcaaaacttaataatttaatattttaaaaattaatatttataattaaattgtttagtaaccatcaatgggtaatacccattgagaagtattccatattgtaaagaccgcttatgattaacaccttggattattaaataattaggatttatttatgagatttaattattatttataatatacatattgtggaggtttatttaaattactacatgtttattatattatttatgaaaattcctcgatttccacgattgtgctcgtgctcggtagcggtggaacgcgatgttgtgccggtagacagtcactctttcttgggaataaaaatgttttggttagcagggtatcattgttaggtattaaaaatacttgaatttgatagggtttgggaattgattaatttgccctttattggtaagcttgtatttgttagtcaaggggtatattagtcttttcttagacttttgtctcttagacttcagaaaccctaattttccccaaattgttgattttagggtatggtcatgtttttcatcgatagggttattcctagtttgatttttaagtccgtgagaattgttttggtgtgtctctcaccaaaattacaaatgatgtgatttagggccctgtgaaacgtcgagctgtaattccactcaggctgaccggcacacctgagcgcgaaaatgaggtaagatagcataagtaatatatatgtgaatgtatgcttatattaaatgtttacactactaacaccaacggttatgtgattgtaagggtgttagtacagtgtaggatatcagggtagttacagtgttaccaacatgagtaccaaggggtacgtcgagtatgtggtacaatagtaactcgtgggagtacaataatggctctaccaacacaagtacaaagttggtactttagtgcatatggtatagtggtcgtacttcccttaagaacattcttaactatttggagctcggttttggggctcaggacggcttgagcataaagccggtatatgagtattgtttatatatgttatatatgcatatcttactgagtttgttgactcattagtttgctacctt

SEQ ID NO: 125590 - DNA, 1330 bp, Cannabis sativa
tcattacccactaactaagggggacgaacctctataaatcatgtgttcatttactttattgttcttattgtgtaacacatggcaagcatcaacattgaacgtggttctgctatcggttaaccgaatttgaggtcaacagtttggtgctctcattaagagcgaattgatattatatctgatcaaacgtcatggttaacacaaggagaactctggctacaccctccgcctcattgggtctccctcaagatcctcttactgcgtattgtgatctccatccacaactagaatttccatgaacactacagatgtggtcagtcctgctatctcggtagacaccacgaatttggccactacagctggccaaagtcacacaaacatcctgttggatctgaataatcagcccttgcctctaatggaacaccctccacttgtgcctcccactgaaggaaggatccacatggaacagacccaaggcacaaaaaccggacctcgtccccggtactatgctggagagatgggaccaggaattggcgagccccatttagaattgggagaagatcacgagatagccaaacttagagaggccgactaccaagctagccaaactgaacaaccacacgctgctgattgttatgtatttgctcaacaaagacgcgaagtcgtgagatggatggatgacaaagagtaaatcctccagtctcaccaggcggagctagactgttgcaatagttaagccagcgacttgataagacatttcaatgaaaaaaactgttggaaaaggctagaatctcatcagagatcaactttatggaagactactcaacaaattggggaaggtatacagacaaactgtccaatcaggttctttaggaaccgtgaaatcccctacccaaaggaggacagaccttgccacaaaggtcttatggcaagaacagtcacatcctaacaaccaacggtctagggaggtaggccaaggatctcaggctcaacaaaagcccccattggctaacctttggctgacctgccatctagtggttcacctctggtcggccaggggagtgaactcccttcttgaggcatctgagagcgagtaacccaaaggccaatctttaactggctagggccgagaataggtggaaacacccaaaataacaatttgagaagtgagattaatcgcattaggaatctagatccacctaactccagtaacttgtgcgatctaccttctgtcaacacaccgactacaccagccaaccaagggatcacgagcggcaaggccctacccagtacagggctggccggccatggatagctgtctagcataggcttt

SEQ ID NO: 125591 - DNA, 2358 bp, Cannabis sativa
  modified_base (473)..(483): a, c, t, g, unknown or other
ggtcttttgatgaatgtttacaccatctgtctcttgtcttgattcggtgtaaagaaaaaaatttagtgctaaattgggaaaaatgtcattttatggtaaaacgtggaattgtcttaggacatgtgatttcatctgtgggaatcaaagttgacaaaactaaagttgatcttatttcaaaactcccaccacctaagactatgtaatatcctctttcttgaagggtaattaattttctctatacttttattagtttattttatttgccaatagggataatttatcattttgaatattaattagtttagtgaagtatgagattttttttctttttagtgacaatagaatttcttttactttttttttttattttgagggtgtgtataatgctagataaataattaaattattggagataatttaatatttacttatttgtgaatattattataagtgtaataataataataataatnnnnnnnnnnntaataataataataatatgtgtaaatatattatagcatattttttagtttattattattattattactaatattattattattattatcagctagtatagagtatataaagtatgtatatatattacttttttttaaaaaaattaagttgttgatctaggaatatattagggctaggactatatataagatgtttatatgatcgtttagggtttagaaacggtggtgagatactaagagagagagaggttgtcggtcgaacgaaactgagtggttagaaagtgagatttcgggtttgttgagtttgagagtttttggactgctctatattatctatttgagttttatttcatccaagaggagttttagatgcaattggaaggtctgtaaccgcaccattcgatagacaccattgtttacgtttaaaaataccgttcttgaaacagacccggatttgaacgcgtttaagttgtttcgaaaatcaaaggaggttgtgtttaagtttatgggaccccaaagatcagttttgacatgaagaatcagagcttgaaggtctgaaataaaatttgccatttatgactccattaacaacggtacaccagagttggagaagacaactccgatttgatgcattgaggttgtgatcttgggtagtgcttgattgctttgaggtcctaagcactgtggaaagcttccccaatcgaaaagacgcatcaagagcaattggggacaaagttacactttgtcggcgacggaaccgacatgaacaccggcgatcgtgttctcggtagttctgaggtgtttttctcacatatttttatagatttcaattccttattttattctaaagtgtttggtaaagtttgacacttttctaaatttatttggaattattgtgaattatttagtttatttttaagttaattatgaaaaatacttaggttactcagaaaaatctaagtttatttatatgattagttatgagatatatactgtaacaaaattgatagatttaaatttcagtcaattttgtattttttatgaattatttgtgttatttcttaattcaattataaaaaatacctagtttgctcaaaacattcaacgtaaattatttgtcgcttggtattgactataaactgtgttagaataattaaaattagtttttgattatttttatatttttcatgaatttatttatttaatacttaaaataattataaaaaatagtttagtgattctaaaatagtaaaatatatttttgtaatgttatttattatctatgatatgaaaaaaaggattatataatttaatagttgctatagtatttattataattatttatgactaattaactatttaattgggttttaaaaagaataaatagtaaaaattgtgttcaatctttggggaaccttcaatgtaatgctaaagtataattatagtgtctggaattaatttgagacaatattgagatttttgctatttttgagtaattatttaggattttatttatttttaacatataaatttttacataatcacggtagtatttcacacatatttctatgcagattggatatattttatgatctatataattggttaaagaacatgatatcttctgaatttggtaaataattacctaatggcatatttaattaataaatatataatattttagtaatttttcacgtttattttacgttaaaaatgttcatatgggtacagaaaatttgcttgtgggaatcaaaataataaattattatgaatagtgtggcattcaagtgaaattggcttatgtgttacgcatttttacgtaagtttctgtatgagtaccgagattcatacttgaatgtattttgagtgtattgtt

SEQ ID NO: 125592 - DNA, 797 bp, Cannabis sativa
atttatagaacatgtttttaaaaaacatttttacatttccaattttaaaatcagaaaattaattaaataagtgttaccaaatgccaccttagcttttgtaatttataattgagcatttaatagcaccaatggtgcctaacacatttagatatgtcgtcttgtgatttgctagcgatattcttttaaaattattacattaaattatatagaactcaatacttaattaattgaatcaattgtaagtaatatatattgacacataaaaaagtgctaggcattactgataccttttaacatttatcttcttaattgtactttttacataattttcttctatgtaaattataatcataatctcagtagtcatagataatattacattgatgccaatagtcatatggataattatatgatttaattatcaccaataaattgtattcatgtaatattaattttagtaatatcaaaagaaaaatagaaagtcaagagtccttttgtcaatttatcttggggtgtttataaaacagttgattcaattcaatccgtaggatccaatctaatcctcaaagtgcggatatccacacttgtcggattgaaaaattcaaaatccgcacttgtgcggattggattgatgtaaaagttaactgattcaattcaatccacacatatttataaaaaaatttaaaaattatataaacaaaacttgatagatcaaatgtatattacattctcatatataatttttttcctacatataatttaaaacaaaattaaatatttctttataaatagatttt

SEQ ID NO: 125593 - DNA, 841 bp, Cannabis sativa
  modified_base (648)..(661): a, c, t, g, unknown or other
ttatatcaattgtacagctaatatggctgttcatgatctgataaaattaatataaaggataaatggagattattattggttcgattgtatttttttatctataaacattataaatattattgttgtaaatgacttattcgtttaatttataataacaagtttttcctaaaaaaatgcttgttttgcaaaaagaaaatgctagataagataaagtatttgacattaatggtactatgaaagaatttagcgggtcataagccgctagattgcaaaactttcttcttcaatcaagtattgtttgtttgtttttttaacaaattgtatgtttaatggctttttttcttaaataaaaaattcacaccaaacatgtgagagcatgtatgtagtgagtttcttttatttcaaggggacgtgttatgaggtttactaggtaactattactagtcaatcatattttatttcaaggggacgtgttatgaggtttactaggtaacaaatgacttctatccttagtttgattattctgttagagatattattacaatagaagaaaatcaagatatattacaactctattgtaaaataatacaaagattaaaataaaagattgattaaatatatgttacaatatatatacactatatatannnnnnnnnnnnnnatatatatgaaaggtagaagaaaagatagattacacaatattatataacatatatataatataaaaaagaaaaagattacttactcacaactttgagtgtagaatagtggggatcaccatgacttgaacaaggtattacacatttgtctaaaagcttatttcccctatctctaagcacta

SEQ ID NO: 125594 - DNA, 664 bp, Cannabis sativa
ttgaattaattagttacttcgctttatttttatttgaaatttttggaattgcttttaattgattttgtattatttagtaaaaagttcatgagaagacgaactttagttacttatcattgtattacttgtttgtgattgtgtacacttgcccaattataaatcaatataaattttcacaacaggcatcaatatagacccttgactaccacccaaccccatagtattattactttcaacttttctcctcctcagccgaacaggtacatgcaactagagaagagtgtacaacagcttaattattaattattatcattaatatttgacatgggaattgagaagagtaaaaccaagacaaaatctcatcacctttttcttttattttcttttcttcttatactatatatatgcatatatatgttactctcaaatagatatataattgatcaaattgatcatgtactgcaattactagtcagcgttctcaagcacggttttttcgtcaaactttctttattatttatataaaaataaaggtttgctgaagaattttccttaaaagaaaataattttacacaccaattattcaaatatcattttaaattttgtgttttgtaaaagttactaattagatcctctgtaaattaaatgacaaaatagatcttgt

SEQ ID NO: 125595 - DNA, 1384 bp, Cannabis sativa
  modified_base (1332)..(1336): a, c, t, g, unknown or other
catcaaacctaccaaataagcatcgcaaatagtcctaaaacatcctagaaacaaaacccaaaactcaactaaaccctatacatcacataaagaaattttaatttctcaaacctgtaacttctagcttgaaactttaagaagtgctataccttacctcaagtcctactagggttatttttagattgaaatttgaagaaaaaggagtggtggtgttccttgtagcacgaagaggaaggaagagagagagcttagttttaagtttttacttttcaaagtaataatatatataacgtttaaattttattattaataataataaaactttataattaataaaagttatttatcagtttttagtcactaagaaatatctaatcctaggacattagaccaaatctcaaatacttctaataaccccaatacttataccattaacttatcataatattctcatcaaatctattaactaaacatgttatgacatttttgaccccccgattgagtctttaaagtcgcgaaacctaaaaaaaaaattattccacaatagctcatctgtaattaataaattacgtttatttgtccacttataccacatttaacatttatgctaaaatagattagtaggatcataatcccacttattaccgattagcctatgatatatatatatatcctaattatttatcattaggcttatcgggatattacaacttcaattttaaaattatataatgagttttctatagatttatattcaaacctattaggaaatatatcaacaattacaaatgagatatgctgataataatgactttgaatgtaatagcaactacaagtgagatgcggtgatgataatgattttgaatgtaatagcgactacaagtgagatacggtgatggtaatgactttgaatgtaatagcgactacaagtgaaatacagtgatgacattaattttaaaattatacgatgagtttttttatgaatttatatcaattgttaattatattttttgaattttaatttaatttactcaaatgatatatattttaaaaactaattgtataataatatatataataaatcaatttaaaaaatgaacatataaaaatatccaaaataaaataaaataaaataaatttagtgaatttattattcaatgttggaatttgtcattataagttcgacaaaaaatttaccactcaaaagaaaaattctcattctccaagggcttacttaactgaacaagaatcccttgaagataatgatcctcaagctcatgctaccacctctggtcatgactttggagatgatatatgtgacagtcagtagtnnnnngatccgtaaggggaaacaccgggtaagctgtgcaatcccacaccgcct

SEQ ID NO: 125596 - DNA, 617 bp, Cannabis sativa
atagagcgttctatgtaatcaagaatgcaaattttaatctatatatagtagagtctggagaaactaataagttagaaaatttacttgataaattttaagatctgcttagtaagagtttggttacagaggcccatggtcacattgtctgaggtaatatcatcttgtagactgaactaattgatttaataagtcaattagaattcaaaaatatactatatcttattttagaattttcacaaagtttggacaattttgagaagaaaggaaaaatagggatttatttgttaattagcacactttgtgagtctaattaataagtatactttgttgactacaaaaatttagactaagacttctaagccacaactgcaccttagattggcgagaatagaatagttgttaagtaattataagagagacacaataaatttatattagttcactcccatcacgacagtaatggagctacgtttattttgaattttttttggtcacgagatggtattatagaattagactaagtgtcaaagctccaatttctagagagagaagctagatagagaagctctgaccttgtaggtagttttctgaacgtgaaaaatgaactaagggagctc

SEQ ID NO: 125597 - DNA, 1279 bp, Cannabis sativa
  modified_base (1237)..(1245): a, c, t, g, unknown or other
actaaaacccgattttctagtatagtgttggctaatgacttttttttttttcggaagctaaattccttgtgaatgccacttttggagctttaggagcaattcttgctcaatatatgaatgtgctactcgatagaattttaatttttcaaatctttcactaggtctgaacacctaagttttgaagtgtataagatctgatggttattgcaagatagttgaagcggatagtgaaacctcaacactatgggaacatctaaatagtaccatattacttttgttgtgtccaagctcaaagtgggtgcaacatattagtgggatacgtcgacctaaataatagatagtgattgtatgatccaaagagaattcaaaaggattttagggagcaatatttttcttcgcctcacaagaggacaatggttagagcatgtgatggtttagataagatgatatgatagtgaattttatgtgatgtttgtgagattattttattggatagttcacgcacattttaggcatgcagtacttggtgaaattgtcactctaacccttgtaagatttactaagcctcaataaggttagtaatgtaggaaatttggcaagatgaatttagccaacgtaaagtaaaggcaaaatgaaaactaaagctatgctcttagtgttaatgatatagaggaggtgtagatcagggagttgttgatgatatggttcttatctcacaatcttaggatcatgcattatttagtatcggtacacccaatttcatttatatgagtggtgtttgggtatgttgggtttgagttgggaaacttttaattcttcttattggagtacatattgaggtggccaccatatttaggtcgatttttatcgtgttaagggacatgcgttggcaggagacttgttagtgctacctacaggatagtatgatgtgactcttgtgatggattagttctctaaatatcaattcattatagatcgtgtacgcaaagctgttactcttttaactcacaatggtgattttattgtatattgagccaatgaggttgtagtaaggcaaaaattttatcctaaaagcacgtttaggtgggggaaagaaacttagagtattatgggaatctatttgcatgcgatggtgtgtctaggactttagactagttccctgggatgtcagtggttagtggctttccgaatgtattttcggggattatgtcgagatttaggggtgaaaatcggtcgnnnnnnnnnggtttttaaaattttataaccgaccgtttagaaa

SEQ ID NO: 125598 - DNA, 3753 bp, Cannabis sativa
  modified_base (61)..(65): a, c, t, g, unknown or other
  modified_base (583)..(589): a, c, t, g, unknown or other
atatatatatataatataatatgaagaagaagatacatatatacactcactcacaaccttnnnnntagattagtggggatcaccatgactttaataaagtattatcatatttgcccaaagacttattctctaagcactaagggaacttcttaagaaataacttcagaaattatcaagccttttagggtttctagcaaagtgttttatttatagaaactaggttatcacaatatgagcaccttatagacctctttatatagtgtaggatgttactatttgaaattctaactcataatctcccctggaggttattgactcaataaatgagtataatgttaaaatattttttatatggtaacaaatcaaatattttatttgatttgatttataaaatagggtaaattgcagcataaatatctaatgtttcagattttatacacttaaatactttgtctttattttttgaggcaaaaatacccaatgttacaattctcttacatccgttactaccacttccgctaactggtaaatatggacacgtggatggcacaaatgcaatacatttatttattttattttaaannnnnnnattcttaatataaaaaactaaatggtacttgtttaaaaaaataataagaaagatgcaaaactaaattactataactgagtgaaccagtgcagtgcagtatatgtgaaaattattataagaacttttttttttttaaataagtagcatttagtttttaatattaagaatattaagttttaaaataaaaaaaaaatgtaatgcatctgtaccctccacgtgtccatatttatgagttaacgaaagtggtagtaacaggtgtaagaaaattataacattgagtatttttacctccaaaaataaagataaggtatttaagtgtataaaatctgaaatattaggtatttacgccgtaattcatcctataaaatataaataattatttactaattaattaaaatattctaattatggttagacttaattaccaaatatttcagttacctgatttaatttctagaattaattgtcaaaatattttaacattaattgtggcagagaccttgatggaaggtctcacctatataaatatagggtctcggtccccgagctcactacttattctgtgaaacacattaaatccatataaagatagtagagagagcttggaattaagcttgattacccacatcaatcagtttcatttgcagatcaaagcttgtgtggaacaaaagctcaaagaatcaatggctggaggtatctcgatccttagttttaatgcatatatatttcattaattctgtacttcatacaataatcatatatgcttcattttatacatataaatatctaacaattggtatcagagcaaattttaaatctctgatctatattttcagtttttatatatgtatatatattcatacaatcagtttaattttatttttatgttggattgtgattttctttcttttaatcttttgattcatattttgttaatttcattctatattaactttttatatgcatcaaaatgattaactttcatataaatatatatacatattcacattcatatatatatatacacccagggtcggccctaggcatagacgggctaggcccgtgcttagggcccacacctttcggggaccaaaaataaaaaataaaaaaaattattagacttttatttaagtaaaattaagtgtattgtaaataactaatattcatagcttggttggttaaggtgtagggaatattatacaatgtcatgggttcgaatcccatagcactctttttcaaaaaaaaaaaaaaattatatatattttggaggccccaaaatcaaatttgccccccataaattctgagggtcagccatgtatacacctatcatatatgtatttatatatggttatatatattttcgttatatgtatatattttttacattggattgataattttatgctatatatattgtatacgagtatatataaacatgaatatttagttttggtcccagatttgagtttttatttttcgatgtttatttcaattcctatatgcatcaatacattcatatagtataggagatctttttaagcatgaaaaactcttcagaaaaacaaagagatctcaaaaaattcggacccgaatttttttagtgatgatgaagtatttgttttatgtattttcgatgcataaaatctatatgaatctcttaatttttgcatttagattaatttggcattgatttaggttgatttggttgtcgaaattgtaaattccgatcggatcttgggtcgggtccgtcggacccacgggaaaaaaaaggggtcaaaaatgacccggctggaggtaggagatgactccatacgacgtgtcgtttttctcttgtgtgaaaaacaatatgtcgtttttcagtagcatgtttcgagtccaactccgtacgacgtgtcgttttaccaatagtaaattttcaaaaaaaaaaaaaaagaaaaaagaaaaatttataaaatttattatttagatttatttaggaattttaatttttacttatttttgttaatttagtcaattaaattacatttatttaaatttttttattttcatttaacatatattttcgtatattatatgttatttagtaatgaattattatggaaaattacaaatcatattccaatacacaaatagtttaaattatctagttcaacacataaaaatatcttatttccttatctcaaatctcgttgcttaatacttgttatctcgtcactactacctataataagacacgaatcaaggccctaacattaaaatttgtactcttacagtataacagaaagaatactatttttgaccagcaactacacgaattcagtgaaagttgccttcataaaaattataggaattttaattatctttcaatagtatgaagatcattaaaaatagattaaaaccgagggagttatcatagtttttctgaaactatttctaagaaagaatatggagtaatgaattatacgacagcgaaaatacaaacttttgacattgaaaggttcagaactagagggtaatatcttcatgaaagttttaagaaatttaattccctttccaatgactccaaatctttgaaattagaattatattcatagagatatcgcaattttgtcgaaattgttttttaaagcataacattcaagaaacgaatcacacgatacaaaagaaaactaactttttgacataatatgactccaaattaacgaaaggtttcttcatgaaacttatgaggaattgaataagctttagaaccatatatagatcattaaaaatagatgataattgagagagttattatattttaagtgaaaatatttttttttgggaatataaagaaaaattaataacaacaatagcagaaagataataatcttcgacatagaataatacgaaattggtgaatagtttcttcataaaaattatagatcatcaaatgagctttccaacaatagaaaaatcgttgaaaacggatcaatatcgagagagatatcataattttactgaaacttatttttctaaaaacgaaaaatataataagtatgaaccctagataacatttaacattattgagcaagaaaatatttcatacctcttcacaactttcaatatgatgtctcaagcatggaagccttgattagaaatccaaaactttaagaatgaaggta

SEQ ID NO: 125599 - DNA, 1569 bp, Cannabis sativa
tactttccaaactcgtatcaatttcatatcgtgtcaaaatacttaacccctaactctttaaatatcttctaacacgtaattatatatatgtttttttataaaaatagaactttattaattaaaagaaaaaacttgagattgacacatataatatagtaaaaggggaaccattaggtacatataacatatatatggttaactcttattgatcctcaaagatcttgcattagtttatcaagtaatgctagctggaatttgtgagaaaagtccaagtttttggaccatatttgaatatcataccccaacttgaattattaaataacaacacaactggacttgcaataatatacactgattataaaggttcaaatagccttaacaaaaaacaaacaaacatcctagttcaaaattacttaccatttccaatggggtctcttttaaaagctgtacaagaagtggctctggaaggaggacaagtgcctgaatattttctgtacaaagatggtcatggcggatctcgggatgtcccattcatcgatattccgattgttgatgttggtcttcttgctacttcttcccaagagcttcagaagctcaactcagctctcactaacttaggttgctttcaggtatgaaatctgacaaaccatgtttcacctatttgcaaagcatttgtgtgattttgtagattatattcttacaaagccatctcataaattatccaaagattcacaaaaattggatttttagtattgtgtcttagtgatttaccaagtgtactataaaatatgtgttaaataagcaaaattatagacttgatcaagatagtcatcttgaaccataattttgttcatttgacacaatatttgacttaatttttagtgtatttggtgacactaactacaccatttacagtctcagtcctgggtataaacaggctagacgttcatctgcttaaggcacacctagttcaggggtccaattttttttttcctttttaaacttatacattttttttactaattttgaaaaatactacattttttaaataaaggcttaaaaataaattttttctataccaccaaatttctgagccaattctgactatatgtgtacgttatagagattatttcataaatacataaaaataacaaaaatatggttgtacagaattttaaatatttttacgatttatattattttatttatagaaaatatgatcttttaatatatttttatattgttctcttattcatttgttgttgattttttttatgttatttttttattatttttatgtagttttttattgtttttatattatttttatagaatattgaaaaaaaaaatatttaaacataaaaatataaattttttacaaaaaaaaaaaaatagtattttgtatttaattattcctaagttatatatatagatatttattgagactgatatgttgagaacaaagcttatgggatttccctttaattatttatgggtagctagctactttggactttaaagtcttactttggactctaaagtcttactatgtcgaaatcaaagctcaag

SEQ ID NO: 125600 - DNA, 1228 bp, Cannabis sativa
atagggtaattaaaatacatgttccaaatggtgtaaatttttgaacaaaacataaatttatttacatataattaacaatttttataattaatttttaacttgtcaataacaaaaaagaaagattcaaaagttaattttaaaaataaagaatctaactaaataattgacagggattaaactgctcattaatccaaaaacttttcaccaacttcaagagtgtgaaagttataatgttaagaagacatatcttaaagaaggcatgttcatcaacaagataagaaggcatgttcatcaacaagatgactattcaaaaattgtaaaagactgattgaagtgatatgatgatgacaatgggtgagatacgatatttaatggtacaatgatgacaatgagcgagatacgatgagagacaacgggtgagatacggtgataacaataggtgatatatggtgttgaatgattatatttaaaaataatacgttatattatgggaaacacttaaatttttcctaaacaaacttatttacttatttttataataataatattttttaacaaagcaatttaaaattctatatgcaatatatatacattataatataaatttaaattttataatattaaataaactaaataataatcaatatattgtgaataaatatattttattatttttttaataaataaaatattattaatgatatgtaattagatgatacaattttagtattattatatatataataaaatatttttctaagtatattaaattaataaatagtttttcattatatcactaaatgaaattaaactagccgcgcgaagagcgactatattatctagttaatagtataaataaattatctatcttatattcttttaagcaattttatttttaatttaaatatctttctagaaaaacaaaataataatttaactataaattaataattttaatagtatattagatataaacgtgtaaatttatatcaattttgtgttacgtgtgttaatcctaaatcaatctaaataataattgagtcattcgggttcatatctaatttcgacttatgtttatttttcatgatccaaactagcactaatttatattaagttgatgtcgtattgttgtgtcgtgactgttagagatattattacaatggaagaaaatcaagatttattacaactctattataaaataatacaaggactaaaataagagattgat

SEQ ID NO: 125601 - DNA, 1700 bp, Cannabis sativa
aaatttgttaatttctttaatatttatatattatttaattataaagttagatatttcaaattaaagatagcattgtctttttaatttaaaatattctttttaattataaaatatttttttttataatttttaaataattatattagatggactaatataaatgtatcacgtgtataatagtatatgtaagtagttcatgttagcaattaaatggatgacaccttaaatttgctaacaatttagcagtttggagaattttaccactaaaatttgaggttaaaaagttaagtgtaagtaaaatgatagttggaattggatttagtggcaaattactcataaaaaataatacaaacataccctttcagttgtattttgttcttttttattattattattttaaatagtttgctaatatagcactaatgtagtgtgataaagagtctacatagaaaatacttgattattgtctaattaaaaattattaaaatatgtattacatgcagttgacgtgtgtatgcttagtgttaatcaacttgatttcagctaattatttttttttcttttaaaaagaagctaattcatgagctaaataagccatcgtcttgtaacagcaatttgcataaaaaataaatgtaatagaataaatgagacatattttcaatagttgttataatttcaagaaattttcgcccgttaaaatcttcaaagtgaaaattccacaaaacccataatttaaggggaaaacttactatttagttacgtggatgtatattgaaagagaaatgttaaaagacactagtggtgctaaacattctcttacgtattgttattggtgtaattaagtaagggtgctaggcaccactggtgcccaataacaacgctcatattaaaaagctcattgtgatttttattccttactcgattacttgtgtcactcatatttctattgtttcctaattcgagcaatttcgatatatttttttagtttaattgcaaaatatacttactttcaaaagaattgtagttttataaagttacatttcaaaaagttttaattgctaaggggtcatttggcatgatgatagtgtcatgtgttctctgctaagcaaatcataccgtcagaaaataacgtgctctatactacaagctagcacactcattttcagagtggtgaagtacttattctcacagccttacaggttgaatgtgagcatcttgagaatgtgaacagttaggtgatgtgtagtgtagtgtatgacttaataaattttgttattgtggatgtccatgtatcattaattgttcccctatttaattaaaacaaaaaaaaaaagagatgtttagccctaacagaaagaatggtgagaaagacaataaaagaacaaaactataggtcacggaaaaggtaattagaatttttaattctcaaactatgatatatgtatatcaaattatgttctttcaatttttaaagtcgttaaaaattacctttgaattattgaaattattagatttaaatttttttgtttcattttgataaggaaagtataatatgaatgaaagtttaagggacataatttggtacatgtcaaaattcaaaattcgagagaatgatttggtaaatatcaaaatttgggaagcataatttagtacatgacaatcacagaattagtaaaagtgaatgaaattagacaaaaatc

SEQ ID NO: 125602 - DNA, 1146 bp, Cannabis sativa
atcctagctccacaatcgttaagccttctgccctcgacgagccgtacttggaagaatatttggtaccacaagactagagggacgagactgtgcatacccaaaagacccttccagtttccctttttagtcttccgcacaaataaaggaattccaatcttcagatcacaacaaagtatcgtatcaagattaatggggaaactttctataatgaatattatgcaattaatttgaaaattaattgtccataatcactacacacggtgctgaccaaatcaatccaaattagacctgcctagtcagcagagcgtattctttatggactggacttcatgagatagcctaaggatattatttactgttaactcccaaataaagggaaaaggaaaacctaatgtaattctcaaactactataaatacccctcgaatcctatggattaaaggttgaactctcttgcaaactttactcaagaaaacttgagaacatacattctttgtattctcaaaggcattacaagctaaagaactactaaataatactgacacatggactaaggttgattaacgccccaaccacgtaaaaaattgtttctctttttactctttttcttttgattatttgttcttcagctcttatcatatatattatatttgcgaaaatctcaataaaaattttggtactttcattgagagctaaagaaagcagtgagaccacttgcagattaagttcaagtaatcatggcccttacccgaaccaagtcgggtctttattttattggccctggtgccaaagttggagactctaatgacccccaagaggtgactagttgtcagaaaggccatcgggacaaagatcagaattgagatgatcctatcattgaggacacaaaatctgtaaaaggtagctctgaggatgctaaagttaataccaaagatgtagaagaggatatgccggaagatgaccctcaggacaaattcgttgatggtgacataggagagaacaaccaacttgatgagtcatatcttgtggtcatcatggcaagacaacttcactggccaaaagcaggttaactcgacaagatcaattcactgagttactacttggcaagatgacaagaatggaggctgtaatgactgccctgactaaa

SEQ ID NO: 125603 - DNA, 621 bp, Cannabis sativa
cagtagagtatcgaaagagtatcttcaattgtaaaaaatcgaagaatagttgcttcggttcaagattatgtggtaaaatattaaaatgttatactattataaaaaaaaaaatgatattttagaaatatgtgttaatgttatacagtagtattgatgttattattagaattttgcaattaaaataaacacataatttttataaaaataagtactaatatttacggaaactccctgttatcaaaatatttatattcaggactaaaagtgcttttacaaaataaatttattttccaaaatacagtcaaaatggaacatcctgtccaccgggtcatggcaccgcgattgatatgtacattgttgtttcgacctcagactcatagcttcttaactttgaccttccatttacctgcatcatttagcacctgcgagtcacaaaaattgagcaaaaaatgtgattaaatcaaaagacaatataaaattcatttattcacatcatacgaatacatgcttaaacatttacacaattttggtacttcataaagtacccttaccactcgttaaccatgagctacatatgtcgctattgttgcccgatacaacgaacaataagtaagaaaccta

SEQ ID NO: 125604 - DNA, 1108 bp, Cannabis sativa
  modified_base (385)..(397): a, c, t, g, unknown or other
tttaaggaatatcgctaaccaatcgtgaggtgccacctatagaaagtgcggggcactaatagtccccaatagcaatgcactaagattataaacaaacgatagtaacacaatctaaccaggttcctaaggagtcagatccaccggttgcaatgacatatggcctcctcccttcccttttcagcttttctttaaggtggttcataagagcctgagaaaaagaaaatatatatatatatatatgaaatcatattataatgtcatgttaattactttcaatatcaaagtacaggaaaatattacaatgcaccctatgcatcgatgtacccttatttatttcggtatctggaaaaaaaaaattaatctaatttttttcataatcgtgtannnnnnnnnnnnntaagatatgttgcaaaattttaaaatctttgaagaaattataataaagattattcaagataaaaataatgattaacgaaccacactcccaatatttgcaaattctgtttctaaaatgagttcaacgtgagctcccactaaccgctccaccaggagatttcctgtcaatcctggatcttggtccacaaatgcctgagaaaatcaaatcaaatcaaaacaaaacaaaacaattcaatgaatcaataaacaaaagaaccaaggaattcaaaaaccgaaattattgacctcagacgtgaataatataagataagagtcgagattcagatatctcgcagcaacagcagttgagcggcaatggttgctttgaattcctccaagagttatgacacaatcagcaccttgtgctacagcatctgccagcaagaattccagcttccttgctttgttaccactcagctgcatcccagaaagatcttcacgctaaatataggcaaataatttagtcagtgtaaactaataaagtgaagaagaaatcaaagaagcacctacaacaatgcatgaaaaaaaatagtttattagaaaaatctttaataaaataataaaaatctgattagttctacaatgcaatccttgatacagccatcacagaagtcttttccacagttataataactaggctaattaggatttttgtctcctacaacttttttaa

SEQ ID NO: 125605 - DNA, 1003 bp, Cannabis sativa
aactcgcaagcgcacgaatctttattgtagtatagagattgtgaagaacgaggtcgaacctatagaaattgtgcgagatcaaagaaaatacgtacttaatctaaattattaaaactctaatctaattttgaaaatggtgagatttttagtaacaaaataaaataatatgtttaacggtaaaaataacagtacatatattttttagtaatatttggaggaattattaacggttcagaatccatttaagtgtatataaaaatatttatgtttatattgattctcataatttaatcagtaatcaaatcaattattttttaataagaaaatatattttcttcgctttaaaattataacttctaagtattaaatgttaaataatttaatgtaaatacataaactcaaagaatattaattttaataaaatgtggaaccaagcattaataatttataactatcaaaaatacatgatattaaagatgaaagaaattttttatcccgatttttgcccacctgacgtgacatgtctacatggccaatatcagtgccacatgccaatctagctcacaaacaagaaggccaagtcatctattcatcacttcaactaatggggagttcgagcacttaaacggggtgatgaatgatggaccaaccacctcaaggaggttggccggccaccccttaccggtcctatggccaacataggttgaccagcttctggacaacacaagttgtccaacctgcatcctgcaaatgcatgtctgggcagacattggcctggcaagactttgatgtacaactttatgtgtggtcagcaagctagactacaaatttggccttaacagcccacaaaagtagagggaaaatatctatttttaaggggcatcatttgtattttactaatttaatacgtaaatattttcttattttacctgaaaaaaggtttaagcgctcctatacaaatggccttaactaaaccctaaaaccctacgtcataactaagttc

SEQ ID NO: 125606 - DNA, 2220 bp, Cannabis sativa
  modified_base (137)..(142): a, c, t, g, unknown or other
tcattagcaatttaacgccataaaatctcgaaatataagtattattgaaagttttttattcttagtaacgtccaccccaatagtggcagctaagagtaagacttacagggtaggaaacaatggtggaagctcataannnnnnatgaccttgactctcgcctaaacaggacaatgctagtttctcatcttgattgaataaaggttgctagaatgtttttcattttagatgagttgtctactctattcaatgaatgatatcttttcctctcgcctaaacgggacattgtaggagtttgtgggaaaccttaaacattatttaggattgtatgtttttgtatttttacttgtcactctgacttgctaagtgctaataatttttgaatgtgtatgattttgtatttaaccacatttgatttctatttattgatatttgtagtatctaatatgactatgaacaaccccatggtgtcactgttcactaacaacgagctttctggagctaactttgtcaaatggaaaaagaacattaatattgaactcatatgtgaaagtgccctgtttgcgttcactgaagaggcacttgagttgccaggtgagaatgcgaccaaggtagtcaaggaaaagtttgagcattggcagaatgctaacaacaaagctcgatactttatgctgtctagcatggtcaacaccttgaaaacaaggtttgctaatactctcacggttgcagtaatcatgaaccaggtaactaaaatgttaaggatggggttggatcaagcttggtttgaggcgacgaagaatttttatcaatgcacaaatgaaacctcatcagaatgtgcgtgatcacctactctagatggatagttatttctaggaagcgtagaatcatggagctattataggtcaggaaactcaaatgaggttgattgatcttaaatagtttgactctagctttcctgcccttctcctcaaactatgtcatgaacaagttgacttttgacttccacgagttaatcaagaaccttcggacagttgacaatttgattggaggaccactgaaaggaggaaacaaagctcctagttctggcactactaattgtacggctaaggcagaagcatacactgcctctatttcgaaactcaaaaagaagaagtggaagaatagcgagaagcctcttaaagttgttaatacaactaataagaaaaaggctgctaatcccaatgcaaagcaaaaaggaaagtgcttctattgcaacggaaaagagctttggcaaaaaaacaaggtatttctatctatgctataaactcatgtctttaagagaattattatcctttttggttattaattctggatctactaaccttgtttattttcttcttatttcagctccaactacttaaacttggattgctatcctagcgagttgagtagaatgttggaccatagggtagagattgtccaagtgaagatgaagctcattttttttgaattaattgttttagtttatgaacaatttagtttcaataaattagtttgagattttatttcctatttcatattattgcagacaattcattatgacatttttgaaattataaataaaattttctctttaagaggttttcattatgagttgcctttatgaattggactttataccaattatcttttatgtttatcatgtttgtatgtgtttttattttatcattgatacaaaatctatggtatattgttctctgcaaagagataataccacataaacacttagaatttaaattcaatatttatgaataattgttaactcttaagaaattattaagattttgtctaatataaagatcttttgacctaatagggatggaagatgttaagtaatatgtgcagttcaacaatcttttatatctattgaactctagattatatttataactccagaggatctctacaacacttaggggtggaagaagttattgacatatgtagttcaaatacttttaattttgaactctagactatactcaatataccacggtatttttatgccacacatattttgattagatatgaatgtaatataattaccaaaccaaaactttttcttgatccagtaattgttcaaattaacttgttaatatagttgttgaccgagattttcggcaactattagaatataattatattaaagagctgtaagaaagtgagatgaagatttttacgtggtt

SEQ ID NO: 125607 - DNA, 2309 bp, Cannabis sativa
gttaataaacatacttgtgagtaggtctaagatcctggtaaaataatttccagcacttctatgggcttattttaatccttctaaagaatttgagattgcaaaagagatctctctcttgttcaatcaagttgttctaacaaaccctaagacagagtaagaacagatataaaaaatactagaatctagatgaacaactaggttctcacaaaaagaactctcttctcacaaataagaaaaatgcaaaaaaatgaaaactataagagttgattcgaatggctgctctctagttctatttgtagaacatagaaaccctagagacagtcacaaaatcgaatctacagctgtacaaaattttcctaagaaaaacttgatttgcagcatcagaaccagattctatcggagcaaatcagaccagaaaaggaaacttgccataaacaagtctgatcttgtattgggtcttgatacctgccataaacagtgtgattcttatcaagacacaatcaaacttaataaggaaaataataatagccaaagtttcctttaaaaaccaactttccataagagaatttcttctcttacaaaaagtttccatacaagaaaagtccagctgaaaatcattctttcctaagatagaaaagagtaataaagaccggataataaaggtgagaaaatcagttatgaatgcaaagaaatcttaccataaaataaaaaatattttggcatctaaattgctaaaaaaggactttacagtgtcaattaaggaggaccaattggaaataggcattctaagatcacatttgtatgtaatttctgctacgcatccatgattgatctatgtcatttagttatattgatatatgtgactattgatggatttagctgcgctaaatattgcgaaagccgctttgatcctatgttagtataatcaatagacgagattatttcgaaacacctatgattatgataacaataaagtacttataaggttacacactatcaaaaaaacatatgtagcccaagtgagagattgttggattaaaatcctcaatatgagcttagatgtattggtgtattactatttaaaatttgacccaaataaagtgatcattttagtaattttgggtcatggatattaaaatatcatgggctaaatgtgtagataccataatcgatatttctaatttattgaggggctaaattaaaaatacttaagattgataacctagctatgaggttataaattggtagtggtccccaagaaacaagaacaattgtattctcatcttcccccatcaagagagaaaactagagagaaccctaagttttgtattcttggaagattattacccaaagatttgacatcactaaattaattatctctatcaaggaactaaggtacgcttccgctattcatgttctttttcctctttgaatcatcaagggctttagatctacagttacacacttctaataatatgtaatatttgtgtataaaattaatcttgatattgcatagtttatgagtgatgaaagaattctaacagtacacatggacaatccaatataacacttaacacctaaaatggataaaaactgtaaattgctaacagtcaaaaaaaaaaaaaaagcattagtcctcaaaataactaccgccaaaataactacaccattagtcctcaaaataatttagagtttttccgccaaaataactacaccattaggcctcattgagggttttactgccaaaataactacaccattagtcctcaatttaaaaaaaaaaaaaaaaaacatttaataaacaaataacattttacaacttttttttatgttatgtgcataaatatatcgataaatatatattaaatttattttttaatataaattattacttttattaggtttcaaaaagaaaataaatctaaaaaataaatataaaataatcttcaaaaagttataattttaaaaaagttgtcaatgaagatactaaacaaaattattttcaaccaaaaaataagaaagtgagaatttacatattgaatgtgttttttctcaaaaaaaaaaaaaaataataataatgtaaagataaaaaaatattactaagctagtaactttgttttttttttgacgcgtactaagctaactattactgttatatttcctcatctttatcaccattaaatgttcctactataaatatatcctatatataaataatcctattttcaagaataaaaaagtgtattatgggcttatttggaacgccgtcttagatcatattatattgtattatattgaattagattata

SEQ ID NO: 125608 - DNA, 1635 bp, Cannabis sativa
ttttcttggttgaattcttaacctttttttttattgtgcaggacttgctgtttcttcattttgttacttgcaattctttccacctccatatgatgtagatggtatgtttggatgtgaatttaaggaaaatataagaaaaaaaattcaatttttaatggttagtatggaaagaaaaataatcaatttaacaaaaaatttcatacaagcttaaaaaaatggtttttcttttttaattttttcacactttttcctcaccaaaatccaactttcgaacaaaactttaaacttagtttggattggaccatgttaagatggaaaaagtgtgaagaaaatatttttgatgtgtaattgtttaaaattttataaaaagttttaattttgataaagttacaatttttaatttattgattcaatctaaacacatgagaaagaattgaattttttttttccctcttaaaaattgaaggtccaaacatggccttaatcaaggcttgtttgttccaatatgttaatttgtttcttacttatcaacttttctttgttgttttttcgttcgaaatgaaggttgggggcctttcgcttactttcaaatgctcgcagagtctcaaaatattgatccaccgacatctaacacagagaacgctctcaccgtgcgccaaccacaactcgaaagtatatgcatccaaccgcaaccgcaacacaacatggatggtttcgaacataataatagaagaaattgattttttaggatagaatagaattaatgactagttgtgcattcttatgatctcaagagggatgttttgattttcatcaaactctctttctttctctaaacacgttgaactttagatttcgaacatgcttcatatgtttagtgtagttcgattcatttgatttgttcggtttgtttgtggttagggtttgtagtttgttcataggcttgttcttagttctacttattttttctatacattttgttgtttgaagtttccactcttgttttccataatattagtatttttttttgttctcattttctaccattgttaatttgtttctttagattcgtgtaaattgaatttgaatgaccactgaactttctaatttgattggttttggacatgtctattatagtacaacacccctctaaatcagcataatttggttagtttatttatattttttcttgcggtttttgttgtttaagtggtatttggtaatatttttatttttaattttttaattacaaaaataaaaataaaatttttattttgaaaaacaaaaatgtgttccataaccacatttgtttatttatatattatggcatccttatttacttgttatttttctttaaaaaaaatgatatttattaggacacaaatacagctaatattgtcaagaaaatacaagccaaatggcacacaaagagaaaaaactatactcatttttttttttaaaaaaaaaaaactatcctaaaatatgagttttccattttaattaattaaaagtgtaactatctatataagaataccggccaaaacactatagcaagactatgtgatcactatttgctatataaatttgattaatctgcgatataaatatttaagtttaatttttagttgtaaataa

SEQ ID NO: 125609 - DNA, 839 bp, Cannabis sativa
aatgtgcaagcagtcgaaaattactgatctttctcaggataaaacaacccagtcaagataccattgtataagagctataattctataatataatcgtaaatataaactgaaaatgattttgtttctgtgggagaaagaatgtatttctcccgttgattctgatgtattatatagggaatgcacggaaggtagtaacgggaagaaagatgtctatgatcatgggaacgttaaaacgtaggaccgtgagaacgatgctaaaaacaaggaggagaaaacgtttttgtttaccaattaattaaataagtttaaaaactatttaaattaattaaataaaaataataaataaattttctccaaaaaaataaggttgttcccatataacaacatttcgttcaaaaaataataatattaagtatacataataattgtacatattggttttgtttgaactgctatcgagatttctaaaaccgtgaccgaaccagagaatttaaaacaatgcagatttgtcaaatcattcacaccgaattcatttgattcggtctcaaatggtttagtccggattagttggggtttggaaccaccgattgcaaattatataaatacccctaataaatataatagtatatttattgtgatataacttttacatatgaaatattgtgatccatacttgaattaactattgctaggtgagaaatttgcaacttttagcacgctattaaagcaaattttttataataagctatattttagcaatagatctccaataataaagattaggggtgtgcataaatcgatccaatccaatgagaaccgaccgatccaattacaatcga

SEQ ID NO: 125610 - DNA, 1234 bp, Cannabis sativa
  modified_base (28)..(32): a, c, t, g, unknown or other
aaactttttcaaattttttaaaattttnnnnnatgtcttaaataactataaagtacatgaccatgaaaaaaaaatttgactaaaaagttattttgggtgctaaaatagaatagggtacatcaatgtatccatagaagaaattgatatataataaattattaaaatataataaatttcttttgttgatatatatttttttaaatcacactgaatttatctaattattaaaattttatatgaggttatcgtttagtaattataaatataatataaaagagaaacaaacattttttttttttaaaaaaaaatcacactaaacataatatttattaaaaatttaataattaatatcacttcgaatgcaaaaatgaagtgaatatagttgcaaaagcaaaaaagtttccatgatcaatggagatgtgctcataaactctcatattaagttgtcatggtctagtttccaagcggataatggagtggaacaatggattttaccaaaaataaatagtataaaagtcaatattgatgcagctttatttgattcgaatcataagtatgggttgtgattggttgttagagatgaaaatgaattgcttattaaaggttttacgttgctttcacatggaacaattgagtcgaagctaactgagataatggacattcgagaagctcttagttggatcaaagattgaggctaacagaatgtttgtgtggaaacaaactgcttatgcgttgtcaaagctttacggagctctatttctataatttctttgtttggtattgtaatcaatgattctaaagctttattttctaaacttggagttatttttatttattttgttaaacgatcagcaaataaaatagctcatagttttgttagagcttttttactctatcctatttgtacattcagtttgggttgggtgttaactgatttgttaccaattttggtaacaaaaattaatgattaataaatatttattttccatttaaaaaaaatctaataattgttccttccaaaaaaatataggtaaatactattttggactatgtgttttgcaaaaagttactaattggaccatctattttgttaaatgacaaaatggaccttgtattttctaaatggtgcaaataggaccttgaaatgattttttgtcaaaataaaatttaataattaccgatctaaaggtgttatgacaaaattgtttacattttctttatctgttcgtgttgg

SEQ ID NO: 125611 - DNA, 716 bp, Cannabis sativa
  modified_base (72)..(72): a, c, t, g, unknown or other
aattatatgggactcgatacttagttggaccaatagcgatattgacacgtaggagggtgctaggcaccactngtgccctttagcatttctctatttgaaattagttaattggtcgtgtttcgtttcgtgtgcagtaagggtatttattggatctttaattatttattaatattagattttgccatttgatctaatttaattgagttgagtcattcgatctgatccgatcaaatagatatatttagatcggttcaaatcattgaatgcattaattggttttctatttgattggattagatccatccaatctattttagctactatataagttgatttcattaaaaaatatagatataaaaaaacataatttaataatccaacatacataataaattttagtttagtccaacctaattttcaagatcacataataaaattgttgaaaaataaaacttattcaatatgcattaataattttattagcttttaggaagatgataattaatattttagatttaaggttttttttaaaaaaaaaaattaagtgttaaatatatattaaattaattaatatattttttaaaataaaatatataaaattttaatttaaaattatataaatataattggaaggatcggttcggttcagttatctattagatcggatgttccatccaacaaccgatccaatccgattggattttcaaaatttacat

SEQ ID NO: 125612 - DNA, 1324 bp, Cannabis sativa
  modified_base (315)..(319): a, c, t, g, unknown or other
agagagagagagagagcttcttttcaattttttcttatttttagaaaatgggtgaaatgaaataaaagaatggttttattaaattctttttcagccaaatactaattaataaaatcagattattaagttaaattaaaaaccactaaagacaaagcataaatgggcaaaatgaccatttgccccttttcccacaaaacaacataaaagagcacttaggggtattttgggaaattataaaatcccgaccatactcgatattctcaatatctaactatatcgccccactatactaaaaatactaggatgtgattctannnnncaaacaccgcgttccaatgttgtcgggcactgaaaatgtaaaattataaaatttctatatatgacatataaaatgcattttgaattcaaataaatcaccataaattaataattcaatactaataaataattttcataattaaatcctatttatctgccaatttccaaatttatgctaagaggtctttacatgaaagcttgcagtcttacctcaggatgactctaggcactttggacaagtggatgtttttgaaaatgtgatatgttcatcttccatatcatggaatacgaaaaaggtgaaaactttttgcacgtgttgtcattttgttgactcataaattttacacatctttgcaaagtgtgtgtggcctgggatatcgcaatgacgactatttgatgaaagcgtaaatgttgaggagaatattaataatgagaaaattccttgaatagcatatggtacatttaatgttgtcctttcggttccctatccgttggattggcattatgctaacgtagataagatctgatcccttgattcaaaagcacacagatcactagcccataacctaaatacaagagggggaaaacctttcatcactttttccttctcaacattttgaattcaagttttgagagaaaatagagaaaaaccagagaactccattttcattttcagtggatgtctgatttctttgacattgtaatccaccactttttacgcattagagaacgagagtaccctaacgcacctcctttaaacccaatagtaactgacccccattcactggagcctttagatgttaaagcaaacatcaacaggatcctagacttgtcatttgcgtacttcaccgaccatcgcaacttttggttaccctcacttcctcttacaagtaagtttccttctgttggggattattttaccaggatctagatttactaccatgtatcttatttaacatcctaaatatgaatttttttaaaacaatggaatttaaacacatataaa

SEQ ID NO: 125613 - DNA, 1659 bp, Cannabis sativa
  modified_base (369)..(376): a, c, t, g, unknown or other
acaataaaaatgtaaccattgaaacctcttccatatatatatattcataaattaacaggtgccgtttggtaactctattttaattagttttttttttaaaaaaaattagaaaagtaaaaatactttttaaaaatatattctataaaaatatttttacttttcaattttttacttaaaaatcaaaatattaaaatttttgaaaacaaaaaaggtcactctcattattttttaaaacagtttttttaaacaatgttttggactccgaccagacttggacccaaacacctaaacgcggccctggtcttggtgccgaacctcgcacctgactcggacccagactcgactccggacctagacccgacttaaatnnnnnnnnaaaaataaaataaaataaattttgcagaacacttttattttctatttttttaaattgaaaagcaaaagtggttagaaaacaatttttttttttcaaaaaccaaatttttaaaaacaaaaactttattttcaattttgtgattaaaaattagaaaataaaattagttagttaagtatttaatacattatttttcacaataattagttaactcttgttttaatggtcttttaaacatattcctcgttattattttagttaaacaataaagacaaataataaaaaaaacaaaaatattaaaatgtgtctggtaatatttttcttaattacttttttattttttttttttaattagaaaaataaaaatattttaaaaacatattgtatttttccttttcaattttttaataaggaatttgtagtgaaatcctttatgttttgaactttatacacttaacctctttttttttttttttttttttggcaaaaatcctttaagtttatttttcattttatatttatataaggtgtcagggttagatattaccgttaaataccaactgtgttactactgtatcgacttcgaggctttactgtaatatatacacaggtgtactacaatggtcatcaagttgatatttaacggtaatatgtaactgttgtgtctaatttgcaaagaaagataaacttaagggaattttaccacaaaaaaaaaaaaaagataaggaggttaagtgtataaaaataaaaatataagggagtttcgccgcaaattgctcttttttaattaagaatcaaaatttttaaaaatttgaaaacaaaaaaaaaatatatcttttaaaattttttaaatatttttttctcttaattaatattttggattttgagtccaacctggactttcgaacccagactctaacttagctctagtcccggatggactacggccctggccctagaccctgacttggacccgatttaaataaaattaaaaaataaaagtaaaaataaaagttacagaacataattttatttctatttttgaaaataattataaaacaatttatttttaaaaataatattttaaaaacacaaactcaattttggaattttttaattaaaaatttaaaaaataaaagtgttaccaacgcttcttaattaataataaatcaacttatacctgtgagataaccccaagaactccaagtgagactttgtgatggtttgagaataaatttgtattggtttagatttgtatgggatggatattaggtagtgtagtatga

SEQ ID NO: 125614 - DNA, 1410 bp, Cannabis sativa
gtagaatccaagaccacgccaactaggactacctttttactggattccttgtcaacccgaggaggacctcaaaactctctctcaaaaatctatgtccgttcctgtggagacagagataaaagatcaatggagcaacacaaaaaaataaaataaaatataataatccagatcaaaccaccattcgggagggaagataattactctcaaaaaactcttgtgaggatctcctgtaacgattaactatatcttcttggtttgtattgatcgaaagctcctcagtcttggaatccttggtttccaatttaaattgagaattgaggttcttgggagcgtgcagagaaggaaaatggttagtgtattttggtgttacgaatttggacgggtaagtttctgaacttggatggaacatcttagcaagagaatgacaatccaatctcaagatgaaactcaccaaataactagaagtttgtggaatatgccaagcttaagccaccattttatactcaaagtccagtaacaagaaggccaaaggttgggaaatctaatggttgggagtaagctagaagatgaaaagatggtccataatgacccccgaaaccatacaaccaccagaatcaaaaaaggcatttttctgaaagggattatgatgaaaatgccctttgtaattattaaaaagcactttttattaaaaagaaatttttaaggggcaattgctatactggaaattttgttgccatttcagtggaggacacgtgtcaagaaaatatggatcgatgaaaccacttttaatggaacaactcattaattgcgtaagtaatagagtatacttgcaactcgcggactataaggtcttatgcgagatagagatatacaaactattgtctcgtatattaacgaggaaccatacgtcattggatgcataaagcaagacatcaacttcgttacacctgggaagacgaaagcgatgcgtatcgattgagaagacacttagcgtataatatgcgaactaagtttatcaattgggagaactaaagacctaataggcgaggcgcttatatcgttgcaggaaggcacactcctgtgactttccccaattagtttcagacatctttcagtaagacgtatagtcttgacaagtcaaaagctaacattcaaatgattgctgagatattcttggtagataagaattgtgattatcaaaatgaagcgttaagcgatgaggcatacattgtcgacctcaaaaagatagggggaaaagctccatctcgctattaaagtcattggaaccgaattcctgtcgagacatccccaaacattatgatttaagatgtgtttaaacacacgatcattttgacccagtaaaagcggataaatcacagttgtgtgatattcaatggacttaacaaaact

SEQ ID NO: 125615 - DNA, 1303 bp, Cannabis sativa
  modified_base (688)..(700): a, c, t, g, unknown or other
tgctctagcaattgccaacctgtgaccaataaaagtcgttttggtttggcgaaaatccacgtgtcacttaagacttgcaggtgacgaaatctattgtagctacacataacttttcctcagtggttatacatgtggtgtgtcttcttaatttgtagtttattctttatcaattaatgtataaagtgtgtttttttcttaatttattgtgtttgtatactattgtgtattttataaattttagacaataatagtctgtgttacatatttcatagtgtacgcatagttttcttttatccacaaatgtaataaagaatgttttacaaagtgatttattggtaacatttttattttttaaatttttaattaaaaaataaaagtaaaatttttatttttaaaatttatgtatttgaaaaataaaaatacgttctgtaaccacttttatattttaattttaaaataaaaaataaaagtgtgtgttttataatgttcattttcattttttgattttatttaaatcgggtctaagtacgggtcgaattcgattcgaattcgggtcagaagtcgggttcagtgctagggctgtggggagggatttttgggtttggctctggtcagaatctaaaatattgattaagaaaaaaaactatttaaaaaaatattgaaattgatttttttttttgtttttaannnnnnnnnnnnnaattaaaaaattgaaaaagtaaaaataattttatttctaattttaaaaataaacaaatgattaaaaaagtattatcaaagtcaaatatgttgttacggaaataattatgaattttatttacccgtatggtcaacatacttaaccacaatatagatgacaatatataatgagcaattaaatcttttgactctggactctgtgttaaaacagcaccatttaacgtgcttggcaatatctgggctctctaatatgatcagcaattagttttttacactgacttaaaagagatagtgacaaagaaacagcatggtggattcttagcttgcttcacattagagaattctacgttaagaaacggattaatgggaatgtaaagtttggtgcgtttttaattacactcgtcttatatatacaatatattctgcatataataattagatatttaattatacaaatatttctatatttgtgttatattctttttgctgtggttcgtaggaatatctctttgaattcttacagttactttgagcacactctaggttgacactgcagctacagctcaacccaactaacattgccctctttcaaaaaaaaaaaaaa

SEQ ID NO: 125616 - DNA, 1800 bp, Cannabis sativa
  modified_base (1756)..(1763): a, c, t, g, unknown or other
ctttctgtgtggcatggtggggcattttaagaaagattgccctcaggcaaagaaggaagaaccgaaagtaaaggtaaaacctgttcttgctcgggtatttgctatcacccaagttgatgctacagccagtctttctgacgtgataggtcagcttcccgtcaacaactccttatttacagtattatttgatttaggagctacacactcatatgtggctacgcgaataattatcttttgggtaggccttgtgatatcctagaaagagggattggaaccctaatgcttagcggggagttggttatctctaataggggcattaggtagatgccagttaggatcgacgatagggagttgagtgctaaccttatagaattcgaattaactgagtttgacatcatacttgggatggattttctgtccaagtattctgcttacgttgtcactctattttttttataaaaatgagtggcatagatgaccatattctagatattctatcctgtaatgatataaatcctcaatcttagaaaattttcttcatatgcttactaaagataactcaaacttagagttgaattagtactttagtggtgatccaacctagaataattactcattaaatatttggtataaatttatgtctttgactttaaattttagattccaaataaaatttaatttcagtttccagaatacattgaacactacagtacaactttcacaagttgttaatatctattttttatcaatggatccaaactgtatgttaaatgtatggattatgaattttatattctgtgaccaaaattcacttgaactattctaagaattctttattgtaactagacctaggaatcatggaaagtccacaaccgcaataatatatctatggaatttacatcttgttcatagtaattttaacatgattcttctctgtaaagagataacatgccaatatccacttggaagtgtatccatctgtatatgaacatatagatgtacatttaggggtggatatgagttatcgttaaattcttaaacgatcactctagatatttaccttatgcaaagaaatttgaaatgttcaaaaaatttcatgaatttctagcaatgttaaaaaccaataaggtaaatggttaaagatcttgtgaactaataggggtggagaaatatttggttatgaagttcaaagatcattaagttgaacttcgaattgtatcaaaacttacctccctagaaattcaaaatgcatgttgatgaaaatgataagtctatgattagttactagcagctgcctgactccttatagggaaatgccttagagatagcaaatgacattctacgcggtaccatctaagtctggtcctaagaaaacctcggaatgatggaatggtcgtaaactcaatatacaccattactagatttagggatgccctaaaaatgaacttaagaaaaactagaacggttaactaaggtatacatgtttaatatctattctaaagtgattaggggtggaccatcatatggtcattaagataagaaagtatttgtttcaaaaaatactatttttctaagaacatgaataaatctaaaaatagagtagcaaagtagaggagataccatttgagtcaaactcaaagtgttccatcatcttatactatataagatggtcccactgcctctattgtattgacacaaccaatgaggtcaatgccactaatgttcctagaaaaaaagtcacagtaccttgtcgtannnnnnnngttttaaggaactcaccctgttatgacttggtagaca

SEQ ID NO: 125617 - DNA, 592 bp, Cannabis sativa
  modified_base (547)..(566): a, c, t, g, unknown or other
agataggcgtgcatcgatgcactactcttagagagtgcattgtagaatttttctatttgttaaactgtcaatgtgcataaattattacaagaaatacatatatattttaggatagttttacaatgcgctctctaaaaaggatccactaatgcacctctatttgtttagatatctgagagaattttttagtacaatttttttcatggccatctatgttgtagctatttaagacatcttgtaaaatttgagagattcagaaaagtttaacatgtcaaaaataaggttcaaatagtttgttgcacgtgacactcttttattttatgcgtgtgtgaaattgattgtttgaatcctattttcaatgtgttaactttttaaaaaaaattcaaaattttgctaaatgttctaaataactacaacgcgtagacgactattatgaaaaaaaattagactaaaatttatttttaaatactgaaaaaataagagttcatcatagacttttttaaagggattgattatagattgtttctaggggtgttcatccgatccnnnnnnnnnnnnnnnnnnnnaacaacatccaatccgcactaagtgc

SEQ ID NO: 125618 - DNA, 1227 bp, Cannabis sativa
ttagagcacaaaacccaacaatatatactgtcaacgagaattcaaataaatacatgagcaacaatgtcatcataagtgtgtgatgtgtcctcatgtgagacactaagaaatttatcaaggcatctcactcatctctctaaaaaatgactaattgagtattttgagcacatgtcttttttaagattacttcacacaatgacttttccaactagttgtggctttcacgcttccatagagatgtgaatatttctcaaagagtgacaagaaaaatgagcaaacttctcaagtcacacaatggtacaagggtagttcttcccattacatccgtgaaaggtagccttttcaaccgggacaacacactattcatgatcaaaataggaaatccaatgataaagttatatgagatctatcaaccaaaaagaccaacaaccattgacaaacaaaccactaactcgagcacagttgtgaagatgtccagaggcaactttcacaaggtcagatggtacacataccaatagaattttttagatgagcaaaagtgtgagcatctaatgccttcgtgaacagatcagtaagttgagcacatgtggacacatgagtaatatttaaaagcttagattccaccatttgcctaataaaatgatactgtatgtcaatgtatcttgtgcgagagtgttgtactggatttttcgaaatgttaatatcacttgtgctatcacaaaacaatgccgaagagtcttgtggaaaaccataattagttaccattttgttttgccaaaggagttgagtacaataactcctagttgctatatactcaacttcagtagtgaaaagggatatggaattttatttcttactcaaccacgagacaagattagtctcgagataacagcctcctgtggtacttttacgattatccaaactcccagcccaatcaaagtcaataaaaccaacaatagacatgttagtatctcttgagtaccataagccaaattcaaaagtcctagaaaggtatttgaatatacgttttacagcaaacaaattcaaagagttggaaaattggaataggagctgttattagaaactggaaaggtaatattgtggttggcatgtctattcccattgcaggttaggaccggccctgaaatttagtgggccataggaaaaaaaaatatttttgggccctcatttagaaaaaaatgtggtattttttaaaattgataaaaa

SEQ ID NO: 125619 - DNA, 900 bp, Cannabis sativa
  modified_base (840)..(861): a, c, t, g, unknown or other
aataaaattaaaaaaatcgtaaatatatttaaaattccgtaaaactgtatatttgtaattttttattgtttttgtgtatgtgtgaaataattcctcaaatatacttatatattaggatggaagaactactaattaaagtgggtttggttttgaaatcttggtaaagcaattgagactttttaagtggtgaaactgaaatatattaaaaaacctactgttgttgcttaatacttgctcttctagcttataatattaataattaaagtgatatattggcgggaaacatgttcctaattgcaagaatagatgtgacacaggccatattatattattatagcatgaaataagaaaagaaattcaaccctaaataacataaatgcctaacccactacataatttattaaattctaaaacaaccaatggtggacccaacacccaagaaattgtttgacaagtaatcagagaccattgaaaattggcagatcagtttctcttacattagttagaattggagattcttcataaaaaaaaaaaatagaattggaaattaatgttgtatattttttttttgtcacgtggaatagagcaatgagataataatagtagtagtagccataccatttgggaattttttttctatgtttttttattgtaaattattttaaagatttataatagtggtcctaattaatatatacatttgggtattaaaggtgcaataaattctccatcttctttctttacttttggagtggcccctatgccttgtgaggacgccgtacttccagatggccccattttgatttccaaaatctcttgattaattattattattattannnnnnnnnnnnnnnnnnnnnnggtaaataccattttggatcctctattttacaaaagtta

SEQ ID NO: 125620 - DNA, 1431 bp, Cannabis sativa
cttgacgaatcatattttattgtattatttgacttaggggctacacatgcatatgtggcatcgagagtaattaataaattgggtaggccttgttattttattgagatagggttcagaaccctactatctagtggagaattggttatctccaaaacgtggataagatctatgccaattagagttgaaaatagggagttaaagtgtttccctagtggagttggaattaatagagttttatattatacatgggatggactttctgtccaagtattcaactagtattgattgcaaacaaaagatggtaacttttcaactgaagggtgaagatccatttatttatgttggatttattcaaggttctcacattccgatcactttagttttaagggctaaagatttactgcataatggatgtgtaggatttttagcggctatgattgactccagcaaacatgagacattgggtctgaggatgtcagagttgtaaaagagtttcttaatgtaatttatgaagagttaccaggattttcgccatagtgagaaatagatttcacaattgacttggcacctagggtagagcctatttcaaaggcaccttattaagtggctcctacagaacttaaggagctgaaaatgcaactttaggggatgctggatttaaggtttacctgaaccagtgtatcgccctggggacctctagttttgtttgtgaaaaataaggatggatccctttgaatgtgtattgattattgaggatggattaatgacttgttcgattaacttcagggtaaaactgtgttctccaagattgacttgcgttcaggatatcatcagttaagaatacaggaggaagacattctaaagatgacatttcagaccaggtttagccattacgagttcttggtgatgtcgttcgggttgacaaattctctagtggcttttatggatctcatgaacagagcgctcaaggatttccttgatatctgtgttagagtatttattgatgacatccttgtatactctcagacaaaagcagaacatgatcaacacattggaatggttttacagcgacttagggatcataagctgtatgcaaagttgaaaaagtgggaattctggttatcaaaagtgtcctttctaaagcatattctcagaaaagacagaattatggttgatctagggaagattgagtcggttaagaattggctgaggtagagaatagttatggaggttcaaagttttctcggattggaaaggtattatcaaaattttgtagaaggcttttctaaaattttaatgcctctgacggagttgacgaacaagaaccaacaatttgtttgatctgataaatgtgaaacgagtttttaggagttaaagtagtggttgatcacagcaccagtgttagctttgccatcagaccaagaaaagttt

SEQ ID NO: 125621 - DNA, 748 bp, Cannabis sativa
ttttaaaattatatatttttttaaatgattttgaaaaataccatattttttctaacataagggccctaaattttttttttcctgtggcccactttgtttcaggaccggccctgctcactgctcatttccccctacaataatgggtaagttttttttcaaaaaaattgttaatattttgaagagtatgtagttcatttccagtagatcggtgtggttattgtttggattggtgttatgttgctgcttttctgtaaaatggcaggatctggttttttcagtgagatatagatttttcacgctatatcaatggtttatgtcgatgttttatcgttgataagggtaccaaggttaggaaagactcttatcaataattttacgataattttaggatagtttctcgataatttccatggatgtgtgatttttttattttgtatttttttagttttttattgatggtatcttgatgggttatcgatactatctcgatagtcttgagaaatttatcactttctatccatcacaattatttatcgacagcttgtcgatgctttatcgattgttgggagaaaattattattttgtctccatcatgattatttctcgatagtttgtcaataattttttcaatttctgcctataaaatattgttctgtgtccgtcacgatggtttaacgatatgttctcggcgaaatgtatattttgctaattttgagtgtttttgatatttttttgagtaatttgcggc

SEQ ID NO: 125622 - DNA, 1624 bp, Cannabis sativa
aaaactaaattggtgacaacttgtgtctaaatactacgtttagtcacaagtaacttttttgttgtgactaaaagtcacatttagtgacaaaaaaatatattgtgcctaaaaggttctcactaaaggtggtattttttgtagtgccaattattaatgtaaattattaatgttatttcctctaagtgatgacaggttataaaagtacccttaactcatctcagatcattaagatcctaactcatatgttatctacttgcatctctgaaataaattaacatgcaacttgcattaaacatagaatataattgtcacataggctatgtaaatactctcgttttacatcaaaacctatgtttgttctattagagcattcctaatattcacttctcagatttcatattaggatcataaatcatattaaagatggccagtctaaaacatgtaattaacacaaataagaacaaatcacacaatcaaggaaaggaaactaataatcacattaactaaattgggaaaactttaactaacattcatcaatccctaaattggcagtttagttaatattcatatccataataaaactgaaattgaatttaacacaaaagaaataaaaggagaagaaagaaactgacggtggaatgaattgtcctttacttcttctagggctaaaattctgagtccctacttccttacttgaagtccctttaaatagagtcagtcaaaacttcaaaaatcgagaaaagatgaacttggcctcgagaagtacagacattctcgctcaaccatgaaatgcctcgccgcggcgagatcataacccaactttcaatactccttgccaagatctggccacggccatgaataaatgtgccgcggcgaggactgctttggccgcgggcaccactaatctcgccacggccactgggccaatcaaagatcttccattctggcacattctagctgcagccacgaataaatttgtcgtggcgaagattgcaccgaatgctattttttcaatttaacttcactcgcctcggtcctttatcacacttttgaagctccagacttttacaaccattggaagcctaaaaatacagaaaacaagcgtaattccatcctaaaaacataaaaaaaaaaactttaattaatacccaaaacctaggctaaaaatagcataacaaatttccccaaactaattctttactcgtcctcgagtaggactaactaaacaactaacacctactagataaccaagactccacataatcaatttaccaatgccacttatgaaacttcaatcaataagttaacaagaatttcaattgaataaactccaacaattaacttagatgcttccttcaaataacaatgtaacaccctcactaacttaggcatgttagcgtgatttttaaagtactgtacagctcgttgctaatcaacgaggttatcgaaaattgtgattaattaaacttttgcttatttaatcaaaatcataaagttacatgcatataaaattccgggatcccgtttacgaaaacatttacaaaagtttaactgtaaatatacaaaagtctgtcgcctagcgactatacagcaaaaaccctgatgtcccaaagatcatacgctc

SEQ ID NO: 125623 - DNA, 1259 bp, Cannabis sativa
aggatgttaatgaaacataattggtagtaaatctagatcctggtaaaatatttccaatagtatgaaggtataggcttataggttatcctatatattctaatatttgagcatttttaattttttttaatgtttcaatctttcttattttttctttatttttttaattttaaaaaatatagtatcactattttttataaatttatatgtctttttaaatatttttattattattgtagtttttcataaatttagtcttcattttttaaatagtcaaaatggggaatcaagcattttttttttacttttagatatcggtttttttgtattttcagatcatctccaatggttacaccaatttagtgtagaatctacatcaatttagtgtagaatcttttacttttagtgcaacaactctaataatttacactaaatatcactccaaatattctaccaaataaatatattttacttgaaaaatttcatattttatactatttacattaataatctaaaataattaatttgtgatataattataatatgtctactagtaagaatttaaaatcttaaaataatttaataaaataaaatatttattaaatcaattaagcattaaacatttttttttttaaaaaaaagcttaaagaaaataacacctacatagtttaattttctaaattattatagtgttcccacatatgatgatcaattaatgcatttcgaaggacatagtgagcatccatattcttgatttgtatttttcaagatgttagtgttttaattaaattaataattattattttgtgataaatttttatttgaggactaaaatgtaagaatattttttaaaataaattaaaataaagattagaatgcaaaaacaccaaattggtgttgattcaaatctaatatcattaatggtatagaattggtatacactaatttggtgcacaatttggtgtgccattaaagtgaaatgatgtgaagattctacactaatttagtaaaatggtataccattaaagatgctctcacataatacatttatgataaaaatataaaatttaaaattgttaataaaatcgttaaattctagcgccaaactatttcttattcattgccactttaaaattaacacaaaagttaatgtaacatttataatataataaatagatatagatatttaggcataatttaatatcactacaataaaaacttctacttttagtgacaagtttttagtcacaatataatttttt

SEQ ID NO: 125624 - DNA, 672 bp, Cannabis sativa
gcataagaagagatctgctgatttttgcacaagaagattaccctatattgtttttgaatgagtgtttgttgatatggtgatctttcatcgtaaattgtaggaaatagctggcagtcccgaaactgcccctacacacaacacctaacgttcagaaacaaggggcagaattgtccttttgctttggtgcggatccaaagagaatattctctctcaaaaccgaatatgccccttttgaatatcagatctatttttctaaacctaatgccttttatttccatataaaaccattcttttcttttcaaaaccctagcaaagtcactcttctctcttcaagcaaaggcagccggccctattcttcttctccttcttccttgagctttgaaaaaacgcagcagcacttccttccttcaatctttgaaacgcagcagccctatttcttcttttcttcctttttcttcttgttgcaaaacaccccagccgagccttattcttcttctccttcaagctacggttgtagctttcatggcagcccttttatcccttcaaaaaacctgcaacacaaccaccacacacccgaaaaaccagaggagaaaataaaagaaataaaaccagcagcaacttaataagatgaacacagaaattaatttcggagttccctctaaatcagaggta

SEQ ID NO: 125625 - DNA, 1856 bp, Cannabis sativa
aacatctttagcgatactgaaaacaacaacaactaccaagatttaacaactatagatacacaccatttgagacctctctttctattatgcaatctcaatgtatatattacaagcttttcaccagagatacatatataaacattgaaaacacctcactcagcaaatgattgcttcacctatagtaagctgttaattctatattaaaaaaaaaatagaataaaaataaaaatatagccaaaactatcagaaatcataaaagggataatgtaaaactacacatatatgcataccagtggagcaaactggtgtgaataacgagacgagaaaagcaacatttcttgcttcaccataatatccatttctcatgcaaaattatatctgttccatacaccaaacaggatttattatgaaaatgaagtcataacatctaactcaacttaaattaaaaagtactaatacatataccatacaaattcatacaacataatgatatttgtagcttaaacaacttagttcactcaactgatcttatccgataatgctcttgctcttgtgtttctcttcttactgttaaaacagtcactctttcaattgcacatcctcctaagtacccttacatttccttcatactttgcttccttttcttcttcactctcttttgctcctttagttataaataatttagaatcaattaaaaacaaagaaacatacaagggaataaagatttcactaacatatgctaacttagtttagacagccatcggactagttaaacaaaaaaatttaaaacaaagttattagtagttgaatcccactcaaaataaacctttttttttttttgtttcctctactaatttagtaaacccttcagaaatttatagatcatatttttcattatctttaacaaaaacccagttcaaaaaataattcaaagtacttacattattcaaaacaacaatgaactcatgatcatcgaaacacccaaaactttccaatcaatagaaatatcagagtttatatttttctcctccatttgttcagtaaaatcagtttatggaaaaatttctagattgtatacattaacaataatatatagcttcagtccatgacaaattttactcttgttttttttaaaaaaaaaaaaaatgttttagatataaatcatatgagaaggaagtaattacctacgctacacatatgatatctatccttgatttctaaacttgttgaagaggttgcatccctttgtattctgcaatataatatcaggataaacattataagcactgatttttaatttaatatgaaaataaaagaaaacattagacattgacgtttgtacctcattttcttcttcttcttctttgttgggatctggacgtaagaacaagtcttttatatgagaaatcttatcccaatcttcacctgtattccttttgcatctcttcaataacatgggacatttaaaaatatgtaacacgttcaaagtggtgaggcttcgaattccttcagggaatgatgtcagattggggcagttggataaccaaagcctcttaagtgatttgaggttgtggatccactctggaattgttgttagactatcacaccagaaaacttcaagttgttgtaagctggtaagatgttggatacccataggaagaatagtcactacatttggcaacatctttagtactagtgatcggagtgttccatttagggattgccacataaagtcataatcatcactaatcagcatgtcccctaacccctcgcattctacaatatatagactttgaagtgatgagagatgtagaataccaggacacaaatccttcaatttaggacaaccatcaata

SEQ ID NO: 125626 - DNA, 900 bp, Cannabis sativa
  modified_base (845)..(854): a, c, t, g, unknown or other
tttatttagggcatataacccaacaacgacaactataaataaactataaaacaactaaaaataattagagaaacaaccttatgacaagtataaaaccaggggcggacccgcatagaggccaggtgggacagtcaccccctgaaaaaaaaaataagaaaaaagtgtatatgcattttagctagttacaacatatatttctaaataaaagtgatgttaataaacataacataagctttggtataatggtaaagttatttcatgcaaacagatagtgaatgttgaattttactttttgaacttctaccaataagatttatatttagtgtcttgattattgaactcaatatttttattgttactcttttttttttactttatactacatttaatactaaaatacaaattcgcatcaatttttaatatattatacaatgtaaaaaaaaaaaaaaaaaaaagacgctcgaccccctcacttactaaaaaagtgtcaccccctcaacttaaattctaggtcggtataaaacaactataaaaaaaatttattacttttactcaatatatatttttgtaaataaaaaagttcaaataataaaaataatttttttttcttttttctttttgagaaaaaaataaaattttttcttagttaatgtatttttgtaattttatttttcaaatttttttattatgtaaatttttttaattaaatttcttatagtatttattacaaattattaattatcaagtgtctcatttatgttaataaaattctgagttaatatgctaccataagggtacctggttactattgttgggttttgtgccctaaataaaatctatttcannnnnnnnnnatttactaattaataaagatcggaaatcattttatgttgcatggtt

SEQ ID NO: 125627 - DNA, 2020 bp, Cannabis sativa
gagggatcagaacttctgagattgctgaaagggtcggcaaagaagcctaatcttcctccgaatttgtcacaaaagacgaattgatcggtcttcttaaagccgaaagagggaaatcatcatcatcggtaacttctatcgattttcatccaccttaccccttggaagttgtagtgaaaccttacccacgaggttatatgagtcccatattttgaaagtacaatgggaaattcaacaatgctaaagaacatatcatctaattcattgatgatttgagagtctacgcccatgatttcaaactaaggattcgagagttttcaaaatctctcactgatcgcgcttactcttggtatgcaagcttgccttcaagaagtgtaaggagttgggacgatatggtcttccaattctgcgccaaattcttcatgattgaagataaatagagtatagttgacttgtcaggagaaagacaaagctttagagaaagacttgttaattatgttcaaaagtttcgagaaaaagctcttgactgtgccgaaaccatagctgaaaaagatctagtcaaaatatgtatcaaatgtatgcttgatgaatatcgcttacatattgaaaaccatgctatatacaatttttcagagctcatcgccaaatcaagaaatattgaagctattgtctgtcggctggccaagccatctaaccaaaatgatcaaaatcggccatgaaaaagttcaaaacgtggtgttgacatagcaatggcgcaagaaaaacaaaattttgaagttcataaaaaaggtcgacggaatgataaatcggcggagtttccttataacaaagaaagactctgtagcctattggaggcatggatcagggatggaaaggtagtactagcatttgtcacaaaactacctactttagaggaaaagaaacatgaactctactgtcacttccaccgaaagattaaccacccaaccatgggatgctacactctgagtaagatttttcatgagtgattagcaaaaggggaaattatcttggatcaaaatggagtgtcgtaatctaacaaaatccttttcgggataccaaagcgacaaataatgtgttctagaatgaaagtggccacaacttctgtagaggcttttttcaaaagaattgcttctgaccattttgtgaaatattttgttgcagccaaaatccaaattcttccttgagaatgtgagtttgtagcatcttgctttttttttttttttttttgtaatagctgcaaagaaatgttatgaacttactctatcttagtaatatgttaatataatataatataatataactgtttacgaaaataggtatactacttttatgttaggctagatggaagaagctacttctcatgataagactatattcagagcctacatatcatcatcataattcctgaaatatttccttgtatttccttaacaccttcttgttcttttttctataaataagagtacttgctcggttcatttatcatactatgtgttctattatctgcttatttctcttccaaatatgtcgtcctccacatctggcaaacatattttgaaggacacaactatcattcatgttcctaccaaaaagcaatgttcgtgtttccatgatactaacacgaaaactatggaggagcttcgtgctgagctcttaaggctaatcgaggagatgtcctcatctaaagaaacagtggaatatttatgttctttacttaccctacttcagggtgatgtttcgagttggcggggtaagcttgtcaccgttgagaaatggaaagacaatcgtatttctgatgaactcaggaacatcctctctcatttgaacgaaggtcgttgagagacttggctcatcctctctttgttcttaatcacaatgttttccactataaccatagaacaaatcacgaatggtagatacctgtttgggattattattattttttgtaaagagagttttttttttttttttgttcttcctttttctgtttttttttttaatt

SEQ ID NO: 125628 - DNA, 752 bp, Cannabis sativa
ttataacaatactcttaatttaattataataaaaatgatacatatattaattaaattcgaatattgaaatttgtttgtgttaggaactcaaaagggcacatgctctctccaacttcataactacttaactgcttttatttattttaatcaatttcttggcttctttattaggcaaccaatcaacccataaacatataattaataattagttcatgctagctaatcaatcattagtgtataagtacttaatttattaggtttattttttaagaaaacgcaagtttttttttttcaaaaaaaaatattttcttttcatgctcaaaactttcttaatgttttgaatttgttttaactaatagttcattatcaagttcctcaaggggtgaagcactgtggtcccaaatggcttttaacctcaaatatttgtaaagtgatattttttttggaaaaaaatttatctcttgtaattttatttttgttgttaacaatttaaattgtttagtatatatgttatagctaagcaatcgtgttgttttgtgatcacacactacaaaaaataattacatttagtgacaactttttagtcataatataaatttttgtaactaaatgtgacttttagtcacaacaaaaaattacttgtgattaaacatagtatttagatacaagttatcactaaattaattttagccacaacaaatatattgtgactaaaaatacatttagtcacaacaaattgttattttttgtga

SEQ ID NO: 125629 - DNA, 1070 bp, Cannabis sativa
aattaagcttagggtcttatttttatcgttttggaaaatacagggtccattttatcatttaataaaatagaggatccaattggtaacttttacaaaatatagtttccaaaatagtatttaccaatttttttgaattttctaatctttgtatatgtgtgacttttgtaaaataaagatgatgagatcaatatggtggatcttcttttttggatttgagaattcaagagagagagaaccaaatggatctaagaagtgtaacttggtggtgtgattacaatagtagtgggtggtagtggtggtggtgggtggctaaattgaggattaggggcaaagaagaataagaataagaaataatgaagaaaaaggtaaaatatatttaaatatatattattaaaattttaactttaaattattttttaattttgaaataatttatttgtaatttttaaatacaatattaggtgtaccaatataaacgtgatgtgtattagagtgtacacatcagtagtctactaattgtagtaaattgatgacaccttgaatttactaaagggtcaatagtttagacaattttatcactaaattttaacttagagagttaaatgcaagtgaaatgataatttagaaaattttactgtcaaaaactctaaaaaaattaaagagtgggccataacataagtagttgtaatatataaatatattgaaatgatactatgtactatcacaagtaacactcttattgttacaatataatttcttctctcatatattttaatttaataaatgatataaaatttataaattatttacaacgtgccacatcaacatagagtaccttagaacatctaatggtagtgcttggagaaagtatatgttgatgtgaccgaatgtttgtaagaagactacaaattaatcacaacacaccatatcaacatagtgttagacaccttagaacatctccattaatggtgcttggagaatgttcctcttgaagtggcagaatgtttgaaagaagctaactattttatgtaaagatcgcttagtttaaattagaaattagcagataatta

SEQ ID NO: 125630 - DNA, 1134 bp, Cannabis sativa
aacagaatggacattttgttaattatttttaaaaagggacatttattaactttattgttagatttagggccattttgcatcttgactcatcatttttttactagcccggcccaaggccttttggagagtctggattttctaatttcaaactgccttaccccgggtgaacatgctcatttggttttagtcccaggacatgagaaaattagacaaaagctcttctctatgggtagtgcaaaagtctcgagtccggatggaatgtctgtcctttttcaagcattattagaatatttcaagagcagtattacttgttgaatattaatatgagattgttagagagacgttctgtacattaataatgtgtgagaatataatatcatatatatatatatatataaaaagaatgtatatgttattttaccaattaatatatttttatatatatttatatatttataaatataagaagaatgtataaattactttgctaaggatgtatatatacatggttggctctataggtgtgcaagctgggctactgtacagagttccaaaatacataaaggacccaatattttttttagtctcttttaaagttgttttttttttttagttttagttttttatatgaacccaacattgcaagggcctaacaatttgtcgttagttactcccatgccaaaaaaaaaaaattaaataaataaaaaataaaaaatagttcaaacctttcatattttttttcactatcatttttttttttttgaagttgtattggaatcaataataatttaataaaatagttcaaattttttaatattttgtaaaatatattacagtataataaaatatttaaaaatattatttataaattgtacttttcttttttgttaagggcttaatttttaaaattaaaacaagattttcaaaatatttaagaggaccctatatctataaaagatgaaagtttattattcaatggttacaataaaaatgtaaccatgatggttatatttttttttataacatgttatagcaggtcactgataggtaaatttctatttttagacttaaataaattattttttaattaaagtatttaataaaacctttttagaaattaatatttataatttt

SEQ ID NO: 125631 - DNA, 677 bp, Cannabis sativa
tttgattctgaattaattagggttatattcagagtttacagtatcctaacatgtctttccagtcattggtagctatttgattttggctacataaatcaaaatgttgtcagtacactttgccttgttaatagaggtttattctcagcgttccagttcttctacatcctatggtttatcagactacataactgttgattttatagtaataaatgaggtaacataatctcaaagatcttcagatgtatatacattaaatttaaaatataaattaaataaaataaataaatatctcttaaagtctattaggatatccttgattcctttttttagtaagttgtatctttcgagttgattagaaactcgcaccgtagtctttaagattgatctaccacacacaagaagtagggtaggctactagaataaaataatttgagagaaaaataattttttttttctctgttaattttgaattctatagtatggaagcattacctaatttctcaaataaatcacttatatttataggagttaatttttaattaaataaatcgtatttaattatttaaataaatatttatacttgaattcaattactaatatttgagatgagaaaatttctcaatcaattgaaagaatatctcaactaacttgaaatatctttaaccacttttcaaatt

SEQ ID NO: 125632 - DNA, 526 bp, Cannabis sativa
ttatatcattaacttagttatgatgattaagagaaattattctttttgggctagctacatatatatgtcacgaattgtcattatatatttcattgaattaaatatattcgtgatatgttttcttatcattaagaattaaggatagagacacccatcttttttttttttttttcaaattataatttgagaaggttggtatatttttaaatcatatatttatataaaagttaggtggtataagtatagctaggtagttttgatttattttctaaaagaaaaattacatcaattagtacaattttaagtatgtatttgttaggcaccgtttcttaccttgttggactgttacttttacttaacatatattatctactttcacttaaattttgagctttataattttattttgagaaattacttggatatactatttttaaatttacagtttgagtttctaaagtggttacatcgctagttgcaataagggttttcatacgattttttgttgcaatttaagttgcaacgc

SEQ ID NO: 125633 - DNA, 1925 bp, Cannabis sativa
ataattaaaaacttactaaattaattaaaaacttaagagctaagccaattttagttaaaaaaaatgtgaaaataactctaattcctagagttatcaatgtactcccaaactaagggataactacaccagatgattgtccctgagtgaagcttgctacaatttgagcagaggcttgttgattgctagccattggagctaaacagtctctctaagcaacaccacgaggagtttgttcaccagtcgacatagccgaaaagggctttgataccaagtgaagatttacacaaaataggtaataagaaaattcagctccaagatccttgacaatttcattaacttatataatgaaatacaagaatattctagaagaggtacacctcattaactgattacaatgcgttacaataaaagagaatattccctaaaaaggtaaaacaaaaaagatgcctcctataattctggaattgtaggtaatttctcaataatgacctgtcagaagctgacttggataaaagctactaaatggaattggtaacttgtcactagttaccacttcatttcttaacaaaggaaactctcatcaatggggaagcagatttgttaatgacgattccgtatgaccgactgctggatatgtatgttatttgagggatcttgggatacccattacgtgagtgtggccagcaagtggttttgaaaaaaatgtattaaagctatcactattgaggaaggtggtggcttagaagttggctcgtcaaggggaattagggtctcgtgggactaagtatgataactctttgtgttcgtttacaaagacggtggttctcgttcgtctggcatggtgttcaaatcggatgagaaacgtgccatcaatgctagattttgtgcggatcatttgggtggaaaaggaaaaggccaaatgcgtggggactttaatattaattgtataccaattatagaaaatcgaaaaagaattgagtaagttgattggaaaggattttaataaagaatttttatctattgtcaatgctttatgaaagtaactgaatcacttaaaagtgtcacaggaatgagccatgtgcaaactatgtgcatgataaaaggactctttacttttctcttccttttggttcgttgtcatcgaagggcaactctttttgcatggctccatgcaagtctttgggtgatgtatgttcttccaacatctatcttgaattagttgggttgacaatctggtaacgtggttaacacaattaaagggtcgtctttaggtaggcaagattcgtaaatgttggactgtaaaaaatttgtcaaagattgaggtgtcgtatgataaaagctcttgttctttaattagcgtatcggaacatccacgaaatgatctttgggagataaaggtgagtactatgacaaggtctaatttgttatctgtagatggaaagaatgttggtgacggtaagacccttgattgatcggtgatatacatatgaaaagcaggactgccgatcattatgaatgtgttggcttggaatgtttgtggagtgcataaagaaagaaaattctaggaattaagcactcttataaaagatcaaattctaggaattaagcactcttataaaagatcatcgtccaaatttacttttccttttagagactcttagctaccgtcatcatcttaattctcttcaggtcaagtttggttttgttggcaagctggttgttgagcgggttggacgtggtggagggatgtatctcttttgatcctctaatgctagagtggatttacttgggtttgggataaactatattgatgtcttggttactcctgtgatggggtcaaatggcgttttgtgagtctgtttggccatcctgactcaacgttatgtggtatgttttggatgtttttggtgttgggttttatgccc

SEQ ID NO: 125634 - DNA, 940 bp, Cannabis sativa
tacaatcaatattatctcaactagtgtggggataatggccctatgtaatcaagcttacaataagttgataaaaaattaaccaagtaattttcctaacttattaattcctcctaactctactatagatttggaattgaactcttagttacataaaatcaactattaccaaaaacatatgcaatttgaatcacccaatgtttcaatccaaatagtggaagatcttctatagataatctacatctaatagggacaaatttaccattcttccagtaatgtattttatccttaaaacacttagctccctatatattatattttagtaaaataatataattactgaaataaggcttcaatcatttatctctattaagccaagatcaaagaaaattaccattttacttctagaaattatagaagctatagattcaatatcgatgattagcactcctactcaataggaaaactatgttcccaatatgtaattattgggtcgatccattggtgagctttaacgaacaactccaggaacataaataagacaatttagatcaatcctaaccatatcaggagtaataaggtctattgacctaagatcaactaactaatattgtcttagatagatataatggttagtttatgatatcttttctaatgtcaatatcggtctagtctaatgtatactctatacatccaatccaagcattcattgtcaatgccttggaaaggacataacacttatccaaggtgttagtaagctctattgttgattattatgtcagtgtaaatctagtgttctaacaaactatgagacttaaaattttaagcatataatcatgattacatttaactgtgtttacaacactataatcatgaattactacatgtcttggatttcatagattttatacattaaacgtataatcatgaaagaaatcatgtg

SEQ ID NO: 125635 - DNA, 1437 bp, Cannabis sativa
  modified_base (181)..(181): a, c, t, g, unknown or other
aaaaaagagtgactaagctctaagtgtaaaaagactaaaatgcccttatttccccgcaaagtcatctcataaccctaggggtaaaatggtccaattctgtgattttgattaaccccgatattctaagatagcctacaatattgccccgtaaaataattgatacaaatttgtgtccatgtgnctaaaattgccattcgacccatttccactgttaccgggcataaaaatataaaaaatatgaagccctcttagacattaatttagcatatctagtgtatgggttatgtggagtattctcctaatcaaaggatgaaatgtcaatattttgacagaggaagacatttatttagtagctgacactagacatgacaagagcgaaatgatacaaggaagacacactgccttgacacctccacctaagaggtaaaatcaaggtattgagctcactagacattatacacgagggacgtgtcccctgatagggattcaagttatgcgaccagtaccttagggttagcacataagtcactattgctagcaacctaggctcatggtgtaatgataacaagagtgaaaagaacaaggaaaggaaacatacctcttgaggcaaacggggtcgcaaaggatggataggttgcttaaaagtgggagagacgcctgttgccaaaacaaaagtgaaagaaattgagcctcactccaatagcaatgacaaaagacatccaacataatataacttaaggataggaatgtatccattccaaaataatagaaataaaaagtataagagtgacctgaggaagaatcaagctcacgaactcttggacaagaggaaggaggcttgccactatgctaaaggaatgatgtggagttagagctcaaaaaaggggagccctctatacatagtagacacatcctcgataagcgtgatggggataataattaccttgcagcaaaataaactccccaaatcctttagtctacaaaaatacttaaaagaattctagtagaatgggggcaagtattaaccccaaaaattagtgttcttaatttttaggattatttgcataagggcaaagagacacgtgagagtgcactgagccaacctacttacccaatgcatatttcttaaaggcagtattttggatgtcaggatacgtccgtactatcctagaagttacccatgaatctgacaaagattcttgtgtgcatacatggggcacccgcgtacgagtccatgtgaaggccctaaggaaatgtgaccttaaaacatgcatgggaaacgtaggactgtgggggctcgcatgcgagccaagtgtgcatgtgtggggggagtgatgtgtgcgtgtatgagtgtgggggcttgtatgcaagccgtgtgttcatgtgggggggggggggtatcgagtgatgtgtgtgagtgtgggggctcgtatgcga

SEQ ID NO: 125636 - DNA, 1406 bp, Cannabis sativa
gtaaaataatttccaacagcatattcctagtcactttgtcaaaaacaactcaagaatggtacttcaaactcaccccaggaagattcaactcttgggccgagttctctcgagaattgtacacataattctcgtcctcgaggcttgtaccatcgcagctagaagaccttgtcaaagtcaaatagggacaaggagaaacgttgaaggattacatctagagattcatggtcaaggctacaaaagtcaaaggccttactcaaaagtcaaatgaaatgaattctccatccataaatggccctaagtgacaccatcttttaatatgcttaaaataagattaaaaagacatattgtattcgcttaatcaataatgttggtgtgtggtatcatcttttttttttattatccaaaagattctaattatcctttgattacatatcaattactcacttaggtcgaaacaattatatcaaaattaaaggaagatacttgaactcaagcacccgaaaatagataaagcgaacacacaattaaaaaaaaataactagagcttactaatcaacgctaacttatcaaaatcaactagaaaatatcaaaaaaacaaaaaaaaaaaatagaaaatcatggcccaattgaacaagaatttgaagataaaaaatctaaagataaatttggaagcaatctttctgcatcagcaacagctgagtcatacattaatggatcaagagacgagggtgagaaggagaacctcgggctagaggtttcgaggtgcaaggaagcttggtctgcgttctggatcgtctataaatggcaataatagctccaccggagctagcaacggtcgcaggtgaggaatgggttgagggaaagaatatgagagaggggagggggagcaaaccaggaatcagtgaccacggtttatggtagctggaaatggcatgggcaggagctccgatgagaagagagagaagaaaagtagcagagagaaacaaatttaaaaaattagagttggggtagaaaaaaataaaacagataaattatggtatttgaaacttataataacaaaaatatggcaaataaataccataaaagatgaaaagaattttaaaatgagtaatttacggcgtaaatatacctaagttttatgttgggtgtaacagataagtacctaagtcatattttttgcggtaaaaaaaaaataccttcccttccgtcacatttctagaactgaacttccgtagatacctcactgttaaatgccaaatcagtacttgcatatcactatctgattggtccacatgaatttttttaattttatattttaaaaaatcatttaaaattattgcaaagttaaaaaaagtaaaagaaaaaaaaaagaatcttcttcctcttccattttcttcttcgacctg

SEQ ID NO: 125637 - DNA, 1936 bp, Cannabis sativa
taattacggagattatattggaatatgtgggtatcgtagataccataatttgaataaaatatattttgggcctggcaactgtggaacttgatggggaggttagaaatttcacgacaataaaaaatgaattcaattggattttataccagactagtttagagtttcgggttgtcagattgacagattagctagaattactagaatgcccctaggcttttattttaatttaaggtattgggaggggtattatggtcatttgagtgggtgataaaagctttatctttagtgttaattaggctgaaatggattattggtaataagtttaattgtttttgtttatttttgtatttttttaatttttattagactattaggtgtaaaagaaaaataggtaagtcatatcaccttcacatttcttcttcttcttacttgaaaccctaaggagctacaaatcaaggatttctcttgcttattcttcagtccttggatcagattgaaagaggtagaagcttgtttagacattaaggtaagatcttgaaactttattcttgaattacttaggttttaagtaagaaatgttgattctctttgaggatttagagttctatgtttggattcaattgagggattgtgcttttagatctattttgaggtgtgttgaaatttgaattgaataatttctactagttgtttaatttggattgaattaaatgaaataagaggagttttcttcacttgagtatgtgatttttgaattaattaagggttgagatgttgtaattgatacttgagatgcattatatttatgatattgtactgttctggagcttttgggttgttttggtggtgtttggattgaatttggaggagtaaaactggaaattgcagccctgccagaaccagtcggcccgtgggttctggtgcagcagaaccggtcgaccggttagctgtagggggaatttttcagttttcctcagggtcgggtttacagctcggggtgatttccgtgtctgatatagattgtttagaagttgtaaaacctattttggagttaataaaagttagggtttaccagttatgggaattaggaatattcccggaatgattgatttaagttatttattgaatgttgttgtcgtgacgtaggacccggggtcatcaagctttgttttccacttaggtaggcatgcacgcttaatttctggactgaggtaagaatagtattaagcaccgtatacggttaatgttatgattattacaatctcgattatgatcaagatcccggtatgtgtttattgtgacttaatcttaatcgaggttaacagtatgtatttaataggaaatgattattatcgttgtgactcgattatgatcaagggaaataatatgaaatgattatcatcattgtgactcgattatgatcgagggaaatagtatgaaacgattgttatcgttgtgactcgattatgatcgagtaaaagaaacgatcattaccgttatgagtaattactcatgaaaccgcggataggtttcttacttatcgtttgttgtatcaaacaacgataatgacatatgtagcacgtggttaacaagtggtaagagtactttatgaagtatcgggattgtgtggttacgatgttgagatatggatcaagcgtgttaatatgtgatgagttgtaattgaatacatattgttatagtgtgactaaatgaacgttatgttgcttatgaatttagtcactttccttgtagaatctcagtgactcatgagaagtaagagtaagtattcataggaacctaagattggagtgctttatgaagcactaagaatatatagttatgtgctgattaaatattcatttagtataatgatgaagatgttgattgtaacgcccttacttacgtaaaataagatgccataaataaactggcgtta

SEQ ID NO: 125638 - DNA, 1011 bp, Cannabis sativa
  modified_base (447)..(457): a, c, t, g, unknown or other
tgactaaaaaattatttcgggtactaaaacagataagggtacatcaatatatcaattttaagggggtgcattgtagaatttcccaaaaatatatattatatctttaatttatgctagttttaaattttctcttcttttttatatttataaaaatatacatgtaaaaaaaattaaatattaagacaaaaaaaaaataaaaataaaaaattatataaaattttactaattttttttttaaaaatccatgatttagaatatatataaatatatatatataaaaagaaaattagaagttttttatctttacacttcaaaacagtcttttttttttttgtaattatatgaaattctacaaaaaaaatctctatagcaactaacaacctaaatcccaatcaaaattcgtatgaaaaccaccgtagcaatccaaattgtaaattttaaaaaaannnnnnnnnnnaatagtatatgaagtaattctccaaaaaattaaaagaaaattacctcacatatattcttttataattgtttttctatttctaggtgatttattatggatggtattatatatatatatatattttacggtaataataaatatctattttcatacggtctagtcttttgagtttttaattaaatgtaaattctccttgtttatttcatttctgcaattatacgtctcgaaattagaccagctacaatctaatgttgtcgacttgatcttcatcaacacttcgactttacttcggtgccagaatgcagccaaccatcgtccaaatatcatagacttgttgacacttccacctttgtgtggtgtcgagtacagtgcagcaaattagaattcattgatgttagaaatttattagtacttagtagaaagaccaataccaaaatacaacccaaagacaagaaatataagaataataatattgatcaaaataacattacaattcttgacaaaatatatgttgggttttatgcctaaataaaactctttacaatctgattagt

SEQ ID NO: 125639 - DNA, 1032 bp, Cannabis sativa
tacatttgcatgttgcataagagccaatcaatcatgtggtcttttaacataattccacttaatccaatgtattaaataattcttgtatataattcttgtatataatatatatgtacacgagtgagtaattattcaatagtcataattttaatgttattataatgattatatttttttacttgtaataatagaaaattaataggtaattgattgagaattaaattaattatacacttaaaataattaattaaaatatttaacaaaccttttaataataaatatttgatgttcaaaaaaaataaaataataaatatttgtaaataattttatttttgtatttaagtttctataatatttttttaacagtcaaattagttaattatagtatttataataaaattttattttttttaacaaaaattaaatttctaccttttttaaaataatttttttaaataaataataattattttttaaaaaaaaaataaatttaattaattaaaaatacaaacaaatattgttgatgcaatttttcatcaaagaagattataattcaagaataaattcaagaaaagaagaaacaaaaataataaatgaacactggatatttttatgtagtttaatttgaagttaaaatctacatactccatgagtgtatattatttctaagttttggatgtgtttataatttggcaaaatttctgtaaattagaattgtcttttcctttttcctttgagtgaacccctatttataggaataggatggtggttactcaatcttatcttagtaaaaagttacaattgatgggtagttattgcccacgtttcacatataactgaatatttgaataagtataaataacttcttcatatttaaaatataaaaaagtgatctttgaagtggtattgactttgtcagatcatgttatttaagagcaggtgcactgctgctgtgtaatacaaggcaatacattgctgcatgtgtattatgaggtgatccatcactgctgtgtattatgaggtgatccatca

SEQ ID NO: 125640 - DNA, 919 bp, Cannabis sativa
attttaaaaaatacagggtccatcttgtcatttaacaaaacacaaggtccaattggtaacttttgcaaaacagagggtccaaaatagtatttactcttatttttattctcttttcaaagtctatcattttttttttaaacattatactaattttgctcatgtgatactctccgtgtcactctcttagagtatttgattaattgataaataaaagtagtatttttgagattacccctttttgccttgtccataaagtcgctgctgacctaagtatatacgtctattaaaagcattaaaagagaaaacaaagttgaataatcataaccatacaatacaagctatatagcctaagctaagggaattgggtgaagaatcagaaaatgggggccgctgaatttcttcccaaagagtacggttatgtccctattgttcttgtttcatactgctttctcaatttctggatgggttttcaagtcggcaaagctcgaaagaagtaataaattaaccccatttctcaatttttcattttttccttttcttcaattttcatcaaattaaatggtctttttttgatgatgatacagatataaggtgccgtacccaactctctatgcctctgaatctaataacaaagaggctaatctcttcaattgtgttcaaagaggtcaccagaactctctggaattgatgcctgtgtatttcatgttaatgattttgggaggaataaagcatccttgtatctcctctgctcttggatctctctatataatcactcgttttttctacttcaaaggctatgccactggtgaccccatgaatcgcctcaagatcggcaaatatgggttcttggctctgtttggacttatggtttgcactatctcatttggggtctctcttctgctttcctaaactcattatc

SEQ ID NO: 125641 - DNA, 573 bp, Cannabis sativa
ttatattatttaataccacttatacagttaattaaatccactaaatatattataaaaccctcatagaccttcatattgagctttaattaaacgattatataccttctgaaaatactaaaatattttactttcgtgattaatacaactttaattctctttagaaaattggtaaaactactctaaccaataatctcaactcactaacaatacaaataaatgagataattatccttgcacaatttatatcccaagaaaaagaattttaaatactatttcaatctggatattacatatatagatgttgtataatatatattttatttttttttcctatatttttaaagattctattttttacaggtttttaatttctatttattaagaaaaaaaatgttattttcaccttattttcctgtagccactgccacttgatgagagctcttcattttttactaaaaggattagagcttttaattttaattaagaataattagcaattttgtctcatgaactttagataatgcttattttgccccttaaaatatacggcttgttaaaaattctccctcaact

SEQ ID NO: 125642 - DNA, 815 bp, Cannabis sativa
  modified_base (777)..(790): a, c, t, g, unknown or other
ttacacctagcttcttgtgctttcattttacatttaaagaaattataacttagctcatattttagcaaaatatacgcactagaaattggtgttagtgctttgtggaataagggcatctcctttgttgcttattctgctttattggcatggagataagcctattttgttgtaatccttgttttgttgaatgaaaaatctccattttcaataaaataaaataaaataaaaactgttaggttgcctataaataggacaatgtttaagtatagttaatgttcataaaaaatataggtataaggtaaatatgataataatcacattcatggaagttatctcattttggtcttggaattaactccggttccaactttgaatcgatggaaataactagccctccatccccctcttatctatttatgacaagactttcaagttttacccacttaatttagagaataatgcttggagagaatacttggtgaggtagaagaatgcttgaaagaagctattttgtttggttgccaaacgaaaaattgtacgtgtatcttttctaagtcattatcacttagttgatatcttagatcaattgatctcaatcttgaaatagttaagctttaacttattattaattatacaacgtaaaatcttagacttgttcgttaacagcttactagcccatacttatgttgggttttgtgtcctaaataaaattcttttttaatataatgagatttactaattaatataagatgagaaatcgcttttatgttgcatggnnnnnnnnnnnnnnttcatgattatgtttaatgtataaa

SEQ ID NO: 125643 - DNA, 973 bp, Cannabis sativa
tagggaaacaaaccatcatgcaacacccaattctactcgaatgatcgtactttatcacattttgcgcgatttgctaaggtttacaaggcatggaagttctacagaatccaacttgtaaaggtaataatatcatcaaattcaatgggcactaaaagaatcaagtacctttgagtgtgagctaattaatgttttcatgtcccactcttgttgcaggaagcatcttcaaagggtctccctgtggtacgccacctatttcttcactacccaaatgatgaacatgtgcatagcttgacttaccaccaattcttgattggcactgagattctagtggtacctgttttagacaaaggcaagaatagtgtcaaagcatattttccaattggagaaacctgttcttggcagcatatatggaatagacaaatatttacaaaacaaggttatgaagccagtgtagatgctcctattggctatcctgctgtatttgttaagtatggttcttcagtgggagaaacctttttggaaaacttaagagaactaaaaattctttaagaaatcagtcctcaaagagggcaatatatctttctggtaatagtaacataactcagatgtaaaacttaccaataaactgttgcatgaagtttcataacttcacacataagaaataagataatgttcctgaaacaaaagaagcgagctcgttttgatgatagcaaatgaagatcggccgaaatatgaattgggcattgacttgtttaagattgatacgttctcctgacaatttagtttttcaataacggatacggatagttgaagaatattcgttatttttctatttatacattttcccaaggtatgctacgtggcactagtttcggaatatgctatgggatcgataataaaaatgaatattatataataattaggctaattagtaattttttatcttgaattttgacatatactaaattgtgct

SEQ ID NO: 125644 - DNA, 896 bp, Cannabis sativa
ccttgtttctaaattcaagtgagtcggccgacttgaacggaaaaccttgtgctagatggatgccctaagtcatatttatgtaaacaggtaagtgacatgtcaaaaccctaatccgagaacccacccaaactcactactaattaacagttctgttattggtaattaattattataaaaataccctaattatcaaggaaataaccatctaaggctttgaaaataacacgaaccacaaatcaaactattcgggaaacctacccctgatacgattagccggcttgcactaggtaacccaaacaagttcaaaacttgtccaattcgtgttcaaacatcaccaaaacttccagaacacctgtaccaacctcaaataatattttcaaagcaataacagcaagaaacatacacaaaatccaaaaatgtcattaatgacccaagtttgattgttcattcaccacataacacatcaaaactagcatcaagaactcaatttcaactcaaactgaacctagaaactagactacaaataattctaaccctaacagccattgattcacaaaattgcatgctagaactaaacttaaagcttgaataactaaaagattgaagtgctagggcttacctccacctggaaacaccttaattttttgttgaattctagaaaataatgagggttagggctgatttctgccaattcttatggtggtcgagcaaaagggagagagaaagagaaatttctatagttttcttgaatttttttggattttcttcttaattaactaacccattaattccatttatgctgaaaactaataattgggcagctgtcaagctctcaaacagccacctaatcctcaagtgtgaaatactaaaaatacccctcttacttgtaacttaag

SEQ ID NO: 125645 - DNA, 2145 bp, Cannabis sativa
  modified_base (45)..(54): a, c, t, g, unknown or other
atatctataaataattttcgtaattaatcataattaactgctaannnnnnnnnnaaactaagcggtctttacagatgttatggtgaatcgtgttatcgtacgaacgttccaaactcagtacgtgtgggatgtgtgatagcattgtaattgggtgtatgggcgactagtcataatccaatttatgtttatattatgattatgtttttcttactgagtctatcgactcttggatattttttacatgtgtaagtaaagtcaaagcgaaggctgaacagtagtgagcatgagctaatgaagattgtacatatcggggcagttagacctggagtgttcgatctttgggacaacaagcttattttgatagtcgatgggtgacaacttttgtaattataatatgttgtaaatataactttaaaacgagatctcgtattatgtaaattattatatatataagattaaagtttaattatgaaaattttaattattgacgttttttcgttaaatctgttgattaaaaaagttaattaaagtcacaacctaatctaatagagcattacatgagtaaattaagttcttaataaaataaatctcaacaataacatcattaatcataactcatgatatatctttttgagcacaagttaatcatattacgaccaaagaggctcatcgcactgtaatataacatcaatcatcatttagatcaacagcttctcaatagcatccttgagttgctatagttgggatttcagttggcttccttcattggtatatgctttgttgtttgcttagattaattggcgtagtgtgataaatttttattgaataaaagtttgtgtgcttaattagctgatttttgagttgaaataattatgatttctatgttgggtttgctctatcaaatagaaaaaactagattttgatgcaattaaagtttgagtaaagtgtataattgtgaattatgatgatttacatatttccttaagccttgaaattgttttgaatactggactttgattcagtttatggtttaggttttagaaccctaaaataagatctttataattgagtttaattattgaaattacttgagctttatttttattgatgtgtttacatgtattgaattgtatattcaatatggcttagaaaccaagttttaaagtgaaattaggtaccaaaattgtaggaacatagtagcctcttttgctctagtcgctagtttgtgactatcaaatttaattcttagcaataatgatgaaaatagagactttgtttctcaatagaagatatcataatcaaaaaattgtaaatatcttgctagatttttagacagcttgagtgactttattattttagtaagaactgtatattttttttaatgctggaaaaaggagaatcgcaactcaataaataatccttaccctgctgcactggtggcatagaaaagaaagttgtttatacaactatctgaggctagtgtgagattccttttcgttgttgtcctctccaagtagttaggagcaagaatgacatgtaatgagagcctagttggaaataaaagaaaaaggatgttgtttgtattgaaacaaaattgtacattgtgtaataatttatatatagaatcgatcaagaaagggtcagaggttcaattagtgttgagcacacacaatgataaagatacctgtacagataagcagagcccgtgttaagttaaaatgtgtcataggcaaaaaaaaaataaaaaataaaaaaattaggcccatattataaaaaataaagtgaaaattacatgaaatatgagattttgtaaaaaaattacaaaaatatggtatttataggtttgccactcttctatggcatttgttcacatttaagactttctatggtatttgatatgccatattttgtaaaccaattatccaaacccatatttcatgtttttgtttctaacttaaatagttttatttttcttttagtttattttacatttacattttaggatttctttctattttaaaaatttactccaaataccaacttctttttttttttcaaacattacttttataatttgacaaagatatttttacatttatacttttcttaatttttttttcttttttactgttttttacttattaa

SEQ ID NO: 125646 - DNA, 974 bp, Cannabis sativa
taaacatttttctattagtttttaatatttgaaaaatatatttatacttaaactttttgtatatttattatttgtgtaacttttagtgttgtgattagaatggaaaaaaatttagtgccaaaattttatcatttttgtattaaatatgttaatgttgatctcatctgtcttttttgtaatatcgagtatgagacaatatttcatgtgttgcttggttgtggtttctcttgatcttgttggaatttctttgtggctagttcaaattttggtatgaatgcaagattatggcagctggttttttggcttattaattgggaatcaacatgatgttatcttagaagttgctatgataagttggagaattttgaaagcccgaaacgaggtgttttgacagaaaaaatcttgttaagcctcggatgtgattaagtcgactcgtctagctcttggtcaatggagggttgctcattctcaatcgatgggatccttatttgctactattgttactaatggcagcaaccaatggcgtaaaccagttaattttaaggttaaggtgaatgtcgatggcgctatctttaaagctcaccaaaggtttgggtttgggtgtgtggctcgtgatgcgaatgggagattacttaagtttaactcttagatgcaaatataagtttaattgagtgttatatgtgtcacacatttttttctatcacctactaattgtaccactctccaaatctatttatgttctctctctctctttctttagaatacttttacgaagaaataaaaattacattaaaaattaataatgttatcttagaaaaatgtaatatattattcaaataattcattaaaaatataatctattttttttcattcgaaaaaaaaaataatgattaattttttatcagtatgattgaataattgttttaattatttattacatcaagtaaagtactatgggccagtttggcacaact

SEQ ID NO: 125647 - DNA, 1208 bp, Cannabis sativa
taaggcccatgtttaaaaaatatcaagggaatatcttattcgagcacatgggtcgcaacactaagaattcagtgccgcagcccgcccccttaaaattctaaaagctgatatttttcatctgttttgtcttttttgggcaatgaaaagaggtggactttcatatttttcaggaagcaatcagagagtacaaaaatttgagagcagaaaggaccgagaaggcttgtttgatggagtttttaatattctcttcttttctatttttttcttttgttcttaattgatatgagtcgagttgttatgatgaacaagagtagctaaacagtttattagagtattgatggatattgtttgacatcgatttataatttttagtatgatttaattcttccccaattttctatgtattctatttctttttttttttttgaaattaaactcttattaacaacaatcagagtttaatacatcaataagaaaagagggaaaatcctcaatccaagccaattcaacatccaccctaagtgcatgcacagctaattcatgagcagccttgttggctgtacgtcgaacatgaattagggatgcctcaggaaaattggaaagcaaactagcaatatcatccaataaggaaccaagttcattacaaatggaaaaacgctttgggagagccaaaaccaaggctaagcaatctgactccaccacatgaagaggaagaccaagagtgagaccaattcaacgcaaccattaatgcaacagcttctgctaatatgactgtaaaattccctacaaaaaaataaattacaaggagagaaaataaatggtcaatcctaataaatgaaaacaacaacaaaagaagcaaaattacaaatctagtaaacaaaaaccatacatcggagagaaaagtctccctccagtcaaaccataatccaaacacagctactccacaccctcctacctaatgaatatcataatcttttaaagtcataaactataccaaataaggatctacatagacatcccagcacattcccaatagtatctcgaactattgccccaatgcctatagtattagaattaacatccagggacgcatcaacatttagtttattgttacgaaaattattaaatactatgcaagtgcacgcaatcaagtagtatactcacgcaagtgaggtcaaaccactgagaattggattaattactactaa

SEQ ID NO: 125648 - DNA, 2036 bp, Cannabis sativa
aatttcataatcgaaagtggttgctatggagagaagtattctaatggatttgagcatggcaattggactaaaagtatcctcatagtccacaccttctctttgcgtataaccctttactacaaatctagctttaaaagtttcgacttctccaccagcacttcttttcttcttgtagacccatttacatccaattgaatgataatcatcaagtacatctacatattctcatattttgtttttcttcaaggaatctatttctgaatccatgccggatgaccattatttctattccggacttgccattacttgtttataggttaatggattatcatcaataccgtcaccaacaaccatattgatttcaccatccaagccataacaagatggttttgtagaaaccctcccactacgacaaggagtcgtgatcttctgaacgggaacattagtggtattttcctcgtttgtgtcaacttgcattggttcaaatgagggagtgggatcttcttttatttaagtagaaggtgatggaacatttgttagagttaattctgaaagtatttcctcaaatactacttttctttgtgacttgaattttttaatatagtcatcttcaagaaatgtggcatttgtagaaataaacactttatcacccttgtgattataaaatagtcccaccctagtctctttaaaattcccgataaacatgcaaacttcacttcgttttgtagttttataaataatatgtagtttttattttatattttctaataattctaattataaatttataaaattttgtgttgtatttaattttattattatcttacctcattttaaattgacaaatatatatttacttattgttattattattaaattatagagttttaaatgtatcatgtcgtgattttcaggtttatcttgtgtcgtgccttttaggttaatatattcgtgcttatgtgtcgtgtcattcgtgcttatcgtattgtgtcgttcttaaccacataattttcgtgtcgtgtcgtgccaatgagtcacatcgtgccgtgtcatgtttaagtccatattttttcgtgtttggtcgtgatcgtgccacttgaactcgtattaatttcatgccgtgtcaaaaagctcgccctgtatttacagcactattcggtattatcaatcaattcattttctcttccatcctaagatactttttccaacattcaagtaaatgaagatggaatcataagtgcagagtctcctccacagactctgactaacaagcatgaaacaattcaatagaatctttgtgaccatgttgatcaacgcataattattcaagatgatgctccgatgattgtaaatgaagttggtggtccgatcaatgatgatgctgctactttgaatcttggtggtccggtcgacgatatttctgtaaatcttgttatcaagatcaggaccagtttaaaggaagatggggtaggcctctacctagggttcccacccaaccaaggccaaaaaaattactcatttcatatcatatataaaatgttaacaacactaataaattattatattatagctttggtgtggtggtaagcacttaggtagaaatgcacttgttcgttgaacaccttggttcgaacctctaacaataacatgcacctaatacaatatatatgtacaaatgcattgccactaagccaatttaatctaggtattttacaaaaatactagattttaggtaaatgtttacatttatactgccacacgacaaaatttatatttttactgcccttgcttttttttttcttttatactgtaaataccgaaaattaaaaaaataaaaaataaataaaaagcaaggcctctgtcctccacacccatggacaaaaccaccacagcaacaccagaacacttggaaaataaccattaattccgacatgatgaagcagaaatattaaaatcattaatattgaggctgtcataatttttctaatgttgtttttgggttgttccactattgtttcgtatgtttaacaaatgtt

SEQ ID NO: 125649 - DNA, 1253 bp, Cannabis sativa
ttagcacaaaaaatataataacccttaaaatttgtaatttccttattttcctccattcttattgggcttggttacaacctaacattcaagtgttgtttttgtccagcttggaatattgggcttttgagatactagtgttcctagcaggactgatgccaaactcgaaatcaaccacttctttaatagcaatatggttagctttatttttccgtacatacattaatttctcttgattaattaattcataattatttgaagaaaaataaaaaatctctgtagctcgttaattgccattgattctgttttcagtgtaaacacagaaacaattgcatacaatgttacatatggtctaagtgcttctgccaggttggtaaaccaaactatgtacactcaaataatcagccataatattaatttacacatttttttttacctaaagaatatgatgtaaattgttatgtgacacagtacgagggtatcgaatgaattaggaggaggccatccagagcaagctaagagtgcaatggtggtttccctcaagctctctgtacttcttgctacaatagttgtaatggctctaggatttgggcacaacttctgggctggtctattcactgataattctgcaataataaagtcattcgcttccatgacacccctgcttgcaatatccataatgctcgattctttgcagggtgttttatcaggttaattttgatttggacatctctttttctaatgctaaccattataaattttttaaccaattctttactctttcacatgagatgagaccccctataatagttattaggcgtaatctcacattgagaattatatgagaaacattatagcttaatgtaggcatagttccatgtggcccctccgcttttgatcttcattgattggacattttagccaaatgtgtgctagtttcgagttttaaagttttagacttctgtcaaaagatccacaattttttggatttgaccttgtagggttatttcaaaatgtcagatcctatcgtaacttgaaaatagtgtattaatagtcacacattaagaatatatgagaaacattataacttaatattgaaattgatgatgtactccatttaaaatcaattgattttaagttaaaacctcaacatcacaccagaaacacctctttcaatttgtaaaaataacatatttatatatatatatatggaagcatttgaattctattagacttaagccactaaggctagctta

SEQ ID NO: 125650 - DNA, 1218 bp, Cannabis sativa
tttcttattatacagtttcaggtttttcagtacaaattaaaagcattgaagaatatatactctatcactctctactattataaataattgtaatctttactgcatttccttcaagtagaagcaaaatggcatcctccttagttcaagagaagatcctttcatgtttaataacattaaactttacaaagttgctaaacaaaattatcaacatataacataatactaaaaagggttattttagatgagtaattggtactttatttaacaaagtaagataagaatgaatctcttctcatcaaccctgtgattcagggaaaaagggtgatcgaaacaaaagataaacttgtgaaacgtgtaaaaagatattgaagtagtaaacatagaaaatcatcactttccagatcccccatttcctttctccatatgccaaaagaaagtagaattttttttttttttttttgagggtgtattatggattcttctcctttatcttggataaagaaaggtattacattcttgcttttttttgggcttgtgtttttatttcatatgcttatattcttgtttgggtctgaccaacgatagtgtagtgtttgggagtcagtgtcaatccatcatattggagcttgacagttctacaattttcaccaaagcaaagcccccctcttctcttaatttattcctttcaaccgcagccaaatatcctttttgatcccccaacattaattctaaatttaaggggtgttcaacttagaaattattaatcgatcgtgtcttactttaaaaactataaaaattattttttgttctcatttttttaaataaaattttcaaaatagaaaattaacaaaaaaaaaatgtcaaacaacttcttaattattttttttctctttctaaaattctgatatatgtttctactttttggctatccgagaataacctagagaaggaaaatcggatactaccatcaaagtgggacaccaccaccactaccaaaaaaagtcatatatatatttagaggaggtttcaacgatgtcatcaatatttattaagattttttcgtcctaaactttaacaagtactaaatcatgtcttctaaacttttttggtcgttaaaaattctccccaaactattgagattgttgaatttaagaatttttcttcatttcatttaattttactaattcggtaattatttatgtacggaaatcatgctcc

SEQ ID NO: 125651 - DNA, 1140 bp, Cannabis sativa
atatattgagtgataatacactacaaaaaagatgagattcccatcaaaattatatattaaaaatcaacaaagaccagatgagcatgcatggtactagctatattcatttaatatcatatgtcaatttattaacaacatgtactagctctttataaaattaattttaactggtaaaaaaataattatctaccactactagctagtctactacatctacagccgtacagccagtagaaaagtttgactatatattctgtaatttatatttttagtatatttaaaaatataatattaaataaactgtagttatatatattagttaggttatgatcagtcagtgatccatgcatgcatgcatgcatatatatcgtacgtctaatgtattatcatcgatctgaaattaattattactgaactatatattactgtactatatagtataattaataatttacattaatatatatttaaagagaaatgttaaaaaaattagtatagtactgtctatcagcacgttgaacgtgtcatattcctagttaattagcattactatacaattaaatatccgatcgtataattataaaatgtcactttaattagtgctaagtattattaatacgtactttataataatgcccatatttaaatattatatatatatttatatacgcatcctttgtgtatatgtctcataacataccttttcttttccacatgaaaatcatgctaaaatattattagataattatacagctaatgatccagagagaaaagtgaaagaagatattatatatacataggacaaaacattttgatgaacctttattttaaaaacattttctatgttttttctcctgatcattaaaattaaaaacacaattttattctttaaaggttggttcagttatacaccgtattgtatattatattatattatgatatatttttaataaactcgactcccaacaccgactaccggtgtcacgacccgagccctaggcggtgacagatgtgtaatatccataacttaggtggtcaaaggtcacactttaatccttgtaggaagataaagcttataaatgatcattttatttatattataaaatactgatttaaaagtaatggattaactcctatatt

SEQ ID NO: 125652 - DNA, 822 bp, Cannabis sativa
  modified_base (56)..(59): a, c, t, g, unknown or other
gtattaaacttaaataaaaagtgatacttagtttttttacgtatttttctttatannnntaagctaatattaaaatttaggtgtgtaattggatcggatgatgattttcttaatccaattacaaattagattggatcggatgagaaaaaaaatattaaattggatcggatgtccacccctaattattctttttaagggagcccatcatattttattttttatgttgtttagacattttgttgtattggatatttttgttagaaacaccaataccactataattatgttattgggttattaaatattttctatttttttaaatatattttaattaagacgagtaataatagattatagatgcatacaagatacaacatcattacatgtaaatggtgtataatgagtgcatctatcattacccaattaaaatatagtatttgactttacatcatagttcatacaaaatggctattgactctacttggttttggtaattatctacattttatatgcatttggaatgcactgataataaagaaaagactttaaaggtgattaagggtagcctctttttcttttttttttttttttttttttgtgtgtgtgtaaggaaggctagctcaagagtgataacttaacaaaataaacaaacaaacaaacacttactttttttttttctttattatttttataggctaaatactattttggaccctatattttataaaaagtatcaatattttattttgttaaatgacaaaatagaccttgtatttttaaaaatggtaaaaatagaactctgagcttaatttttaacaattt

SEQ ID NO: 125653 - DNA, 2453 bp, Cannabis sativa
agtcgagagagacggagatggagggacggtggtggagcctcttcgtcgacaatggagggcatggcactatgagagagagcagtcgagagagacggagatggagggacggtggtggagcctcttcgtcgataatgtggggacggtgttggagcttcttcatcgacaatggaaggacgacgatggatcaccttaagagagcaagaaagacaagtaagagagctagagaaggttcaaacggaatgaagaaggaatgaacgatatctaattttttttttagagttttaagtgagagagagagaaagagagtaggcgacgatttataactgttagctatacaatagtcggaaattataaatcaccgcctatagtttagctaacgattataaattgtcaggaattccaatctcatagcaattttaaactgatgagtatacttgatgattttttaaaatttgcgggaactctcaactgtgggcattgattttaaacactcactttcttctattagcgacgatcctaaaaaaaatgatttgagcaccgatgagaatagtcctttttgtagtagtattggatgacgcagcgaccaaattttgctagtagcaaacttagcaagggtatgaaaaacaacattaattactttagaataatgagaaagactaactgaatgaaaaagaacaagattacaaccaatatctctaagaactaagcctaaagaagagttcaaagaaacataattattaactttataatcacattaaggcaatcggtctcaagctaaatattcatcctaacctagtaattgacattatgttactgcattatgcaaagcaagcttcaaaattatagttagcataaataaaaattaaattgaaaattttacattactctaagtatttgtatattagctatatttttattaatattttttattttataatatgtgtttgtatttttattttagtattatcatcatcatctagttcatcatcacttatgattcccaatgatatcaatattccaagtaaaaagtttgcttatttggccaaatatatttaaagcaaaaaggttttttcaagtgcacaattacagtatacctcgttatgtccttagagaaacaaactcacccatttatttgataatgatgatattacttagttgatatatttttaaaaaattagtgcatttgtcatctcactatatatgaggtaaatatatagggtgccaattaattatgtttgttagttcgaatataaatagttaatatgtaatgaatttaatattattttcattatgtagaggcttatacgaaaaacttatcatgttgaaaattattcgacataatttggttttgagtgaagatatgagattcaaattgagaattattattttttatttataaatcaaatattgatacatattatatatattatatgtatatgtagggtcttaggtaacctaataacaccatgtgccacttttacatcatgttgctaatcatgttgctaatgacagacttaactatgataaaagatatatccaaatgagtatcttttaaaatatgtaagtaataattaacatattattttaaatgtgatcaattttaaattatcaaaaatactaacataaagtttaaaattaatttatacttattttgcagtatgatggtaagaccgagtatacaataaatgatattaacaccgtatatgaagcatgggtcgactactataccgagtattttctagtatagtttttttaattattttttctcttttttttttagcaagtacaattttaactaaatttatagttagaactaattataattgtcatacatatatttactaacatatatagtgatatattatgaattttattagataatattttactgcaacttacgtttgtataaattgtgaatacatccatataattaatacaaccaaagtaagggaaatttaaaaaaatatatattaaaattatttcttttgccgactaaaattaattacggcggtgtgaaaaatagtgttataattgacatatcttagtagtttcaaagtgtctagaatgcgacctatcttggcagtttatcaggtgatcgccgagattgctatctatctccacggttttagaggtgtgagaaggatgggacacctatttcattagttaaatgtaaaactggcgagatttgttaccatatctcgacggttcccaaccgttaaaattggtcattactctatctcagcggtctataaccattggaatagatttatcacaggattcgtaatcgccgagataaggtaattttcttgtagcggctccatttgaatgccagcggcctcaaaaagaataagactagtaaaagtatagggtgattttacaatgcaccccttaaaatggatgtactgatgcacctttaacttgtttcggcatctagaagaattttttagtctaat

SEQ ID NO: 125654 - DNA, 894 bp, Cannabis sativa
gaaccagtgggagttagaatttgtttggttgttaattagggtttgtttcggggattggataagttgatgatcgagttttgttatcgtgacataggactcgagatcgtcgagctttattccattcaggtcggcatcacttaggcatctcaaaggactccccttggatgttttcacatttataccatgtccagttttacttcagatgtcaacctgggtgctgcaatgttaacttgggcgctgatagtcaacgagtcctgccagacagcaaaaattaaatttccttaccagaagctaattttcaccgttagattatcatcaacgatggaaaataatttatttgcattttatttcctatgtttgtgggcctctttcacctataaaagaaaagctcccttagttcattttttaatttcaaaaaatacccacaaagttaaagcttctctctctagactttggagtttttgatacctaaacacttgctagtcaccatctcgtgagaaaaaaaactcaaagtagacgtagccccattattatcacgacataggagagaactattataaattttgcgtgtcactcttattaattacttgataacttattcattctcacaaatctaacgagctgatgttaactactttttaatatcaacatcttgtttattttatcaataaacataaatagaatgcttaaattgattatattataatgtataataattattttgtaagatatattttaaaaaataaaattatcattatctatttaatattaaaaaataaaataaattattaataatatttctttaaaaaaatagtgggagcattgattcctttagggcccgtttggtacacaggattggactggactggacaagattggattatgttgaaagta

SEQ ID NO: 125655 - DNA, 576 bp, Cannabis sativa
atatatatacttttattataaaatatcatgcatggtatataaattaattagttgatcattaaattgcttttagctaattaactaatgtattttataaatattgagtgtgttttttaacttcttcagatggtaaaatatggacaattaatactagaataatataggactattatattaattgcaatatatattctaattaccataaagaatatatgttatgaatatttaagtttttagagaactctagaaacatatataactggggaagagatgtacatgtgaaaactcttgctttatgagagcattggtattagatattagtatttagtagtgcttagcatcacttagaagtgattgcttgtgattggttagcggaactctataaaaatcataagatctattaattaataaattcgatcaaaataatagaacgcacttcagaagaacagtcctccaactgaagcacacgaagagagacaagagtctcttgccaagcaatgagccaatttatttgcagatcgttttacaaaacacaaatcaataaaagataaaccaaaagcaaattttgaacatctt

SEQ ID NO: 125656 - DNA, 1442 bp, Cannabis sativa
agagagagagagagagatgaactagtggctgaaaattagggatttcaaatttaccaatttatttttgccagtgcttaagaaaaaaaaaaaaaacttttaccagtgctgttggtgaaaagcgctggtatagtataggttgttagaggaatttagtaaaaaaaaaatcattgcctacacattttataactggtaaaatattttgaataatgaaaatttatatttttgataaatttattttataaatttctacttaaattattaaaatttatatttattttaataattttaaataaatatactccaaaattattttattttattaatattacataaaaaaattagaatattatttattcctacaatactaataattatcaaatattacaaaatttaaaaaataaatcccaaaaaaaattaaaattaattatgtaaaactatgatatttttaccaacgcagtttgtgagatgcgatggtaaaagtgacttttaccaacgcataatactattacgccgacaaaagtaatttttaccaacgcaattctagcgctggtaaaaagtatcaagggggagggttttacatggcttgttatgccagcgcaaatatgagttacgctggtaaaaatatattttgccagcacaaatctgtgctagtgaaattgtgaaatttttgccaacgtaattgacgagatgcactggtaaaagtaattttttccagcgcattaacgaattgtgcgggcaaaagtgacatttcttatagtgtgcatatataaatagaggagtgctagggaaactctcttttgcactctcttttacactctctttctaattgagtcacatgtgtaactttctaaagcatgttaaaaaatagttacaattataccctcatttagtttttattaatgataattaaaattagtcatctcatttacttttttttttttataaaactaatagttaattaattaatttttactgataattaaaatgtctgattctatttacttgtttatttatttttcagataataaaaaaaacttaattaaattatattttttaattaaaattttattttttaatagataatatgtatcacaaattcacaatgaatcattcttttaatttcttttataataaatattggctatttactttataaaaaatggaaaaatattttttttcataaattttgcaccaattttttttttattatttttctttctttctttctttttttacttcgtatcattctttaaaaaaaatcgtattttttgtttttttacaattgttctcaaatttctttctaaccgaatatgtttttatatatatataggttaaatcaattaattttcttttgcccattcatgaaaagaattttttttacttaaaaaaataaaacaaaagtaaatcgatctaacatgtactattgactaagcataattata

SEQ ID NO: 125657 - DNA, 996 bp, Cannabis sativa
tggtaaaataattcccaacacaagatgcaacctggaaaaggcattgaagatcatcttgatgattttgacaaaatcattcttgatttagaaaacatcgatattagtatagaagatcaagatcaagccattatcatccttaactcacttcccatggaaagctatgaacacttcgtagacacaatgatgtatggaagggattctttgacattggaagaggtttaaagtgctcttatttcaaaagaattgaagggaaagtctgagttgaaggaagaacaatctggggaagggttgttgattgttcgaggaggaactaatcaaagggacaacctgtacattggaaatcaaaagaaaggaaaacagaaagggaaatacaagaagaaatgctacatttgtcctaagacaactcacttgaagagagactatcctgaacccaagaatttgaatctaaatcaaatgtagaatcatggcaatgctgatgtggttggtgaatgggatggcagtgatggatatgaaagtgttggtgtgatggttgtcacaattggagattcagggggagatcggatcattgattcaagttgctcatctaatgtttgtccaaataaaaaatcaattttgtgactacagaaaaattgatggaggaacagtgagattaggtaacaacaaatattgtgttattgtgggcattggatcaataaagctacaattatcaggaggaactcacagtgagttgttgcaggtgagacatgtaccaaaaataaaaaagaatctcatttcagtggccatgctacacaaagatggatgctcaatcaaggtgaaaaatggtgttctcaaggttcaaaagggttagaaaattatcatgaaaggcactataatgaattgtgttaatgataactctaggaattagaattattttcacattttttttaactaaaatttgcttagttcttaagtttttttaattaatttagtaagtttttaattatttttgaatttatt

SEQ ID NO: 125658 - DNA, 1541 bp, Cannabis sativa
  modified_base (360)..(379): a, c, t, g, unknown or other
tttaattaagcccaatatgaaggtccattagggttttataatatatttagtagatttaattaattgtataagtggtattaaataacattattatctaattaatgtgagcaaattcgtaagtttagaaactgttttactaaaacaaccatatctagagttttataactctgattgaggtgattctagtagctttggaaagataatccaaatacctataaattttgtagaaatagctatgtaataattcgtaatttttctaggtcaaaactaagccctaaaattacgagatggagaacttacaatttaaatttaaaagttatatatttttttatttaataatttatcatattattattattnnnnnnnnnnnnnnnnnnnntattattattcataaaactaaacttaatagagtcaggatagtacaggtttcattcaaccctaacattatatggttcaattattcccacctatgtgagcaagattaaccctaaaagtcttcaagttataatccaagcagcttgaagtatttgaggtaagaaactctacatttactcatttattgatcacaataggagaatattcgcagttctcattttcttattttttttagaaagaaacatgtctcagtaaaactattgtatctctttaaatactcattcgattctcgtaatcttggtgcctatagaaagcttattgaatttcccataatttttatgaagagttttacttaattagagtttatctatgtcaaaaattattatttatacgctgtttgttgtaaatcgtttttttcatattttctataaaaattgtcacagtaaaacctgaatatctctctgaatactgatttgattctagcaattttggtacgattgaaaagataatttgattttgtaaatgtgttatgttgaaaccattcaccaattatttatttttgtaagttaaaattatcattttattgatgtagtctgaaattcgtttacttcaagatttctaaaaaattgtttcggtaaaatatctatatctcctactttataattctgattttaaagatttttgtgtcattcgaaaaggaattcaattttctaaaacttttatgaagatattattctctgatttggaatattttagggtcaaaactttgtatttttgatgtctcttgtgatctgttactccatattttttctcaaaaattatttcagtaaaactatgataactctcttacttttaatctattttcaataatcggcatatcattggaaaggtaattgaattttctataattattatgaagggcaactttcattgaattcatttagttattggtcaaagataatgttctttctgttctattgaaagagttagaattttaatgttagggctttacttatgtgttaatatcgggagtagtgatgggatatcaaggtcttaatcatcaaaatttgaggtaaggaaattaagtagttttgtatgtgtttatctgcataaatttggattctttatgtattggaatatgagttatgatttgttattataagtct

SEQ ID NO: 125659 - DNA, 1951 bp, Cannabis sativa
tgcgaaagcatctgaattgagcccttgacagcctgcaccaccacaagcgaatcacatatttttatttgtggaaaatgtgttttgatattgggctttacgtttgaaaatgttatttcttaataaatataagtgtaataggttgataattttttttgtattaattgtttagatattgtttttaaaattttaaaatataatttattttgttaaagaaaaattaaatttgtttgagtaatgtttaggttaaatgtttatgttgttgttgaaaatttaaaatattttttttattatgttaaagataaatataattggttgataatgtttaggtaaattttttagatattaaatattaaattgttttaatagtttttgtaattttttttagattattctttgaatttagaataaagaagactaaaaaaagtgtaggaaaatcttttttagttaaaagttaaaaaaattagaagttttggaaattttaatagccacccaatatatagcggcggctcaataacaacagaccctttactcgtactagatttagcggccattttctgtggtgttatatttagaataattcatctcgaggaggcaataaatattctgaacctttcacaaagggatcataattttgaactctctcttggaagattatctcaaacaatcattctcctaattcgactccttgctgatttgtttgaatcaggtttcgacataattttgccaatatttcttaaagtgccattttaggatataattatatgatgttggctttttaactatacgactaggtgagtcctattcctttgtgagttatttattattttgtacactagcatgtgatcacacccattcattaatttattactcaaaaaatgagagtgaatattaatttatttaacattattctttattagcaaaaagaaaaattggagaaaataataaatttattacaaaaaaatactctaccaaacataatatagtattaatataattcaaccgaatcaatcaaatactaacttatagtcaagtacaattcaattgaatctaccatactaaatgagctacctcttaatatactttatttttttttacaacaatattattatgagtaactttaaatcatataattttttttgtcatgactttaatacatatttttattacaatattatcattattttgttacaaaaatatttaatttatttgataattatttttatatcaatttttatattattttatcatgcattggaatgtaattacaaaatatatatctatataaaatttagtatattttttaccatcaaaatggtttaacgttacgatgaagtagtgcttgtcaatttcctcttttataataaggaaaagaataaagcaaaaggaaataaaataaaataaaccaagataatattattttctcaaataaataatgcatcttttcaaaagagaatgcaaatttggataaattattacaagccaattgtaaattcacaacgaccataagaaggtgccacgtgtcagtggcagaagagacaagctctaagataattgtgaaataataatgttattataatatcataaataataaataatgacttttaaaaaaataggataattaagatttttgtatgtactaaatgatgttctctaaatttttttggccgttaaaaatttctttgaattattgaaattgttagatttaagaacttttatctaatttcattcaattttactatttaataattgtttatgtactaaattatgatcctcaaactttgatatctactaaatcatgtctctcgaactttaatatatactaaatcataccctttgtatttttattatattagatttttttttattaaaattgaataaaaatctttaaattgaataatctcaataattcaacagtatttttaacgaccttaaaaatttaagaacataattt

SEQ ID NO: 125660 - DNA, 1227 bp, Cannabis sativa
atttttttaattataattttttataattataagtgcaccctaaaaatataaatacctattgtaaaatgactaaaatatagatatcattaaatttatatttattaattaatttctttttaataaatatacactgcaccacttaaaactggttgttacttctttttgaaaaattaaaaatagtaattttgttaaaaatttcaaaccttaaaatcatcttaatgaaaattattttgagatttcttcaatagtaatcatttaatataaaaataagcttactatatataacctagatatagacgggctaggcctgcacttaggactcactcattttagaagcccaaataaaaaaatatcttttaaaaaaatatatttttttgataatttttaaaaataccatttatctttatagtaagggcttaaaatttttttttttgcctatgacctattttaactcagggccgaccctgtatatatatacatataaaatgtagctacttaacgatttttgttgatttaacagaatattttaaaaatataagaatatgcagttaaatttatcagtgcgtagagttagttttataaatatatataagtattaatatcatctatattaatttaaatatatataaatattaataaattatttgtaacactattattcttttattgttatttttaatattgggagtatgttcaattttaatattcttaaacttaatatttattttccttaaatttttcaaattttaaatatgattttttaaaaaaaaataaaaaataataagtggtctcgtttaatttataaaattttaaaaatatacataacaaaaataaaaattaaaaatataactaaatatatgtgcaatgcacgtaacaataacctagtatatatacatatgtttatatattaggttgatgttacgtgcaatacacatataattagttttctttttaattaagtttaattaggtgatgttaaatacaatatatgtttgtttaatatttttaattaaataatatatatttttttaattttttaaatgagatttgagattttaatttttgagatttttttttaactattgcggcaacattaatgtatatatgtttcctatcaataattaatattttatataatcatgatatatcaaatttgacttaccttacaaatataatttgacttaaaatactttcgattttgatattagaaaataatttatataaatt

SEQ ID NO: 125661 - DNA, 1005 bp, Cannabis sativa
tttcacttttctaaattaggtgggaacattatttttcacttttcacgtggattattttttgtttacagtatatatgagaaattataatttttggtatgttagtttacaatatagctatctaacttattttttagaaaattctaaataaataatgatgtaaaaatacaatttaaataattaattgcatgcacacctattttattttatgcgcacatactattttaaactttacttttaatactacaaattattaaattaaaaaaaaaaataagcagaatacaactttcaaaaaagaagaaataaataagcaaaatacctattataactacaatacgcaactttacacaaataaaaaaatgaaattcagtctcttaaaatacagaatataggacggtaatggaaaaagtaatgtcattttcccctaacatactattgggtccgccccttttgttgggcttggaccaataagggcttaaggcccatttgtttgattcaattaaaagaagaaaaaaaaatggcagcaagcaatggagtgtgcttcgtgagcagcaaggcagccaaaaagaaaaagaaagaaaaagagagagagaaatgagagaaagaaagctagagagagaaacgggttttgtcatttttcgttgaagatcaagtggtggattctcatccattttagctcaaattctgggtggtgaatccttgcaaggtgctcttcaaatctaccaattccgatttggcgattgtcctttctaaggtgctcttctacaatacccactttgtgagactcaagcttttcttttgtgtattcatattttgagatgatgatgatgattgtattggtgattcaagattttttaatcttgatgttgttgtgagcctctagtttttctagagaagaactttgtaatcccattgttaaactttggtgatagtaaatgatttgagcggactacggtcccgtagttttttctcgcattggggtttcacgtaaaaatcttggtgtctcac

SEQ ID NO: 125662 - DNA, 913 bp, Cannabis sativa
atgttaacataaatcacttcaaaactcttaaattgataactaatcagattagattgtaatgggttttatttaggacacaaaacccaacacaaatgtcatcataaagaaaaattcaaatccaaccctgccaaaattctgtaactaatgcaagaaagaagggcactacaaatctgaatgctatctactcagaaaccattaaaaaaaaaaaagaaggacagtaaaaaaaaaggagaagcaagattgatgtcaaatggatataattctagtgatgtgctgaatgagaaatttaatgaagattagatattggactgagggtgctctttccacatgtgtccaaataaagatttgttcagtacttttgaagaaagcttaagaaaatcaattcttttgaaaaataacaaagcttgtaaagtacaaaatattgattctgttatcatcaagatgcatggtggtattgctaggacaattataaaggttaagtttgtacctaaattaagaaggaattttctgttaattggggttcttgcttccaatggttgtactatgatgattgagagcagtcaattgattgtattcaaaagttcttttgctgtgatcaaatgtgaattcaaaaatggtctaatctgatctaactcagttatggcatcaaaggcttggccacattattgaaaaaagtattgtaaaattgctgatactagttgtttttagtggcaagctagaaatctataaaaaagtgcatctatgggaagcattggagagtgcaatttggtaaagatactcacacaagaacaacctcgctagcctattgatatgaaccacaccaacagttgtgatgaaacccgacaccaaatatggcagactctaagaattctcgaaatttgcatgtggaaccgtgacccaatgcttagttaag

SEQ ID NO: 125663 - DNA, 859 bp, Cannabis sativa
tcgaggtctaatagtcgataggttgcactaccaattttttcagcgatgaggtatggtccttcccaattgtcaccaaaaactcattgtgctgagtttcttgtgtttggaatgacctttcatagaacaaaatcgtctactcgcaaacttcgttctttgaccttggagttgaaataaagagttgttcgctgttgataggctgcattcttcaaatgagcctgattgcgcttttcctcgagaaaattgagttgtaacaattgattttctgtattaccgctaagtttaaaaacatatctatctccttagagatcctgctccaacctcgactggcaccatggcttcgcacccgtaagagagcaaaaagggggtttcaccaatcgtggatcgaggagttgtattatatgaccatagaacttaggaaagttcttctggccatgtacctttacgttcttcgagcttacccttaatggtatgcttaatgatcttattcactgcctccgtttgtccattgctttgcgaatatgcgactgctgaaaatacttttttaatccccaattcatcgcatagttggcacatttccttacagtcaaattgttttccattgttagaaattaacttataaggcatacgaaacctgcaaatgatggcgctgtatacactcgcacaatttggtagcagttatagtcgcaagaagcttggcttcaacccattttgtgaagtaatcgacagcgactacggcgtacgttactcctcctttaccttttggaaattctccaatcaaatctatgccccagaccgcaaagggctagggacttgtgataggatttaattggctaggtggtctattaacatatgtagctat

SEQ ID NO: 125664 - DNA, 978 bp, Cannabis sativa
cctcttcatagcgcaaaagcctagagagtccttcagaggatatgagaaacaaatatggagatagaggatcgccctggcgcaaaggttgaacgtgtcctactacttctccattgagtgaaaaagagaaggtgcttgtagtaatgcaattcatgataaaagtaacccattgagaagcaaaacccattttcaacattacagcttccagatacttccattccaccttatcaaaagctttactcatgtccaatttgagagcagcaaatccaacttttccttgagttttatgccgaagatgatgaacaagctcaaaagcaataagatgttatcagtgataagtctgttggataaaaaagcggattatgtttctgatatgacgaacggtagtactttttgaaatcggagaactattgtcttggatattagcttatagatgacattacacaaacttataggtctataatcactcataccaacaggattgggaacttttggaattaaagtgattatggacttattaagttgagacatgtcagtaccttcattcagaactccaagaacaatttttgtgactgaattcccaacaatgttccaataattttgatagaacatcgccgacatttcatcacttccaagactcttatctgggttcatggatttcagggcagccactacttcttccctggtgaatggacaggttagggactgattcattgctgctgttatggtggcaggaatggcatctaacacactttgaagtgcttcaggattgactccatccgaagcaaataaagagtcatagtaagaacatataactcagatcaaatctggtttgctgctgactgaaactccttgatcattaagtaaagctttgatagaattttttgccttccttgatgaagcatgagcatggaaaaattttgtattttgatctccacattgcaaccaatctactctcgacctttgatgccaatattcctc

SEQ ID NO: 125665 - DNA, 1203 bp, Cannabis sativa
aaattctttcaagctttattgtcttatgatgatagggagtatgaaatgttaccatgtaaaatagggaaatatatttacttattaataattaatgacaattatgctaagttataaattttatttcaaaatagattacatctctttgacttatttatacgataacctaacacacattttttatctataattaatgtggtcccaaataaataaattcccaacattaaattgatctcacacgtaaaattttctgtggtgtaattcaggggagatttcccaatggacaagacatagccgtaaaacggttgtcgagggattcaagccaaggagatgcagaattcaagaatgaggtaatgctagttgccaagcttcaacaccgcaatcttgttagacttctcggtttcagcttggaagcaagtgaaaggcttcttgtctatgagtttgtgcaaaacgcaagccttgatcattttatatttggtacggtgacattgctctttttaaaacagaatcttgatgaatatattttcttaattctttaactaaattaatcataaacttgcatgaatatgtatttagatccaagaaaccgagtcactttggattgggatagacgttacaaaataataggaggcgtagctcgaggacttctttaccttcatgaagattctcgtttaaaaattatccatcgagatctcaaagctagtaatatcttgctagatgaagacatgaatcctaaaattgcagactttggaatggcaagacattttgtagtggatcaaacccaaggcaagacaaaacatatagtgggaacatagtaagtacacattaatctctacaattagagaattaatagagtactatatatattatacttaatatatatactaactttgattattaatttttaatttttacagtagatacatggctccggaatatatttttcgtggacatttttcagtcaaatctgatgtattcagttttggtgttttaattttagaaatagtaagcggtcagaaaaatagttctttccgtcaaggcgagtatgtagaagaccttttaagctacgtaagtacaatttataataagagtactcaagagttgtacacaaattaatctataatatcattattaggaatataacattatttatattatttttggtgtgcagacgtggagaatatggagagaaggaaacacttcaaa

SEQ ID NO: 125666 - DNA, 965 bp, Cannabis sativa
tcaagaatcaatagctgaaggtatttcgatccttaaatatagtacatatatgttttactaattctacactttatacataatcatatatgttacagtttataaatataaatgcctaacattcaaaacttgtatgggatatggcattacatagattgttcatatatttcatattattcatataataatttctaacactacatgaattagagaggctaaacttagataatgcttgctgaactaaacatgatgtttattttttcttatatatattataataaagcactttttttcttaataaaagataaaaataacgatgcactttgatgttatttcttttaccaataaaaaaaatattaaaaaagccaaccaaaacaaagtttgtttaaattatgaattttcaccctgtaaaaacgtattagatgtggagaatccacaacatcattattttataagatactcatatatattattaataattgcatgcatttagtgtggttccattaattcaacataatactctagaatatataaaagtactgatatttttattatgaaatattttttttttataaatattcaaattaccaaattattgtcattaacgcttaattatattttctttttattacattaatttagtttctatctttttaatcatatttttatataaatgggagttcaccctattagaataaataattgagaaattctcattcagtttctctttctctcttcatcttcttatttcttcttatctattttattttataacaatttatcagcacgagtccctgttcaagcttcaaaataaatattttgttaaagcttttaaattgtttcaaggtcaccatacactaaagatatatatatatatatatatatttacatatatacttatctgactaatacaattttaaaaattcttttttctttttcttttttatctatatatctatatattatat

SEQ ID NO: 125667 - DNA, 992 bp, Cannabis sativa
ttgggatgttgaggtgatcaatgacttgtttgttgagcgtgataaaaatctaattctctctattcagcttattgattacagcccatttgataaatggtcttagaacttggagacatcgggcttttttcagttaagagtgcttatagttggaaaaagctatggaaattggaagttccacccaaagttttgcattttttgtggcgagccattactggttgcttgccaactaaagtgcaactgagcacaaagcatgtaaatgtggatctcttttgtcctttctgcaataacttttatgagaccatttcacatgtgctcatggagtgttccttctctccttcttgctggaatttagctagcccaagtgtgattcatggcttcaatcacgattttggcagttggtttttcaccattcttgatactaagccaactgatgtttcagttgaagctggaatggtgagttggaacatatggaatgctcgaaacgatgccttttggaagtgtaaaaatcggagtgctgctagtgttgttctctcggcccgatccactctgcaacagtggagtgcagctcgtgtggagaagtttgggccgctgctagtgcctagttctcatacggatcaggttttgtggaagaaactggggttaaataccatcaaagtgaatgttgatggtgctattttttgcagaggagaacaagtatggcttcggttgtgtggctcgtggggctaatggaagactaattgaggccatttcaaacagtcggttgggtgttgtggggcctgagattgctgaagttatcggggtgaaagaggctttgagttggattaagcgcaaaggatggatggaggtggagatcgagacggatgcgcttgtggtagtacaggctgtcttgggctcaatccaaatgccttcacagtttggttttgtggtacaagattgtcgtaacttaatgtcttgtattaatcatgtgtctttacattttgttaaacggtctg

SEQ ID NO: 125668 - DNA, 2151 bp, Cannabis sativa
ttcgagcaagattacagttggtcctatcagtggtgtgtggtgggcatgtaggtctgcgatcccaaatctgagtccttttggacgcttgctcgtaattcatttctttaacagttgactactccacatcaggcagaggacccataggtctgtgttcccaagtctgagtcctttcaaatgctcgattacagtttgtttccctatggggcacctcagtgcttgttgcatgctgagtggtggcacaactaccaagaatggtagtgttgcttcatgcgtttgaagacattagtaacatttattgagttctttgatgattgcttgtttgaacttatgaattactttttgttgactaagattttcaacaacctcttaatcttgttttaggaaaattaattatgagtacagaaaagtatttttgtgtggtttaagtgttaattaagcttagttcgcgagcacttttatttatgagtaatattgttattaccatagatcttttcaatttcagagttccctttttcctctatattttttgatcattttttctcttacattcctcctttatttattggcagagaaatgggatattcttgtgtgattggtacatcctccttttacctctaggctctacatggcattttctgtaagtgtaggaaataatgtttgttatgtgtgcgcgccaaagtaggagtttggtgaaacaagacttatcttctatacggcttatgggacagtaaaaagattagccgtcaattagcgttcataggaaaacacaatgtcagaacaatatggtctaaatcctaaagatatctttttttaggacaggtttactttaccgtctgcgttgaagcactcatctacagtgcttcgtcttgggagaggagtcaggcaccttggtagctcttagacgctatatgatccaagaggctctcactctcgtagaggacagagttagaacctagtttcaacaatccttttggaatcgttgtgcagtctcggatgcccccgtgcctttagaatgttttttaaaatttaacatgtaatattgatctgtcatctcttctacgtggaccccatagatatatgttctattctctacttgccacgtattttggtaaaaaaatatggacaacactttcggaataaagctcctagtaaagaactcaaacgataataaggaacttgagttgtggctcttaatgaaagcaccaaaatattaacattaaaaattggccaacattatcttgttagattggtgagaaaagtaatagatgaaagaaattaaataagagagacatatcacgatagtgatagtaatggagctacatctactttaagcttttattactcatgagaattacaagagaattgactaagggaatagctcatatttctagagagagaaactatagagatatgctctaaccttatggagacttagcataatatgaaaaaagagctagtggagctctccttttataggcaatgatgtcaattaaaataataataaaatattacaaaaaatttaaaaaaaaaataattttggtctagtctttaccattgatggtgatctaatggctaaaatgactccggatgatcattaatttttagagcctaaatcgcgtccctcgaatcttttcgggatatttgcagacaaaattgcacttcaacttagggatgaattttagacttaaaatattcataattgagatataagtgtgagacgtacgtgtttagaaagagtttgaaaagatatttcaaacacactaagaatcatgtcaatcggagtaatattaagtgagttcttgtcgttttattgaaggctatttaacaatcggtgccgaggttgacattctgatgtcaacctggacattgtatgagtaagaaaacgtgtcggaattgtatttttttgatgcctaagtgatattctaacatcactcaatcaattttttagttctagtgaaatcgttcaccagttctcggagatgttgcttttttgcaaaattgggcaaactcaaaactttctgatttgcgaaaaatttgtcgatattacactttgctgaaaaggtgaaataccaaagtttgaatttaacttgtcacaagtcgtagttctcatttactacaaaaaaaaaaaaaaaaaaatagtcacatactaga

SEQ ID NO: 125669 - DNA, 1898 bp, Cannabis sativa
tgcgagtcactaaagcatataatgttcctgacttttagtgcctcgaatattcttaatcttgccaataaggcttcgtactctgcctcgttgtttgaagtttcaaactaaaacctaagtgcataatggaatttaaagctttccagtgacatcacaattactcctgtccctgagccattctcgtttgaagccccatcaacaaacaatttccatgtttttgtttcatttcctattccagagtcttctcttgagttaactcattctattaaaaagtcagccaaagcttgccctttgattgaagtcctcgggtggtatgttacttcaaattatcctaactcaatcgaccactttattaatctccctgatgtatcaggttttgatagtacttatcgtaatggttgatttattatgaccttaataggttgtgcctaaaaatatggtcgtaatttgcaagatacatgaatcaagcagagtgtgagtttttctagaggtgggtatctcgattctgcccccatcaacctttttactaacataataaacaggtttctggttcttaacctcttctcgcactaatgtgcacttatgaaatttcttgagacagctaagtaaaggaataatgttttcccagtaattgttttagccaagactagaggtgtagaaaggtgtttctttattactttacatgcttcctcgcactcttcattccactcgtaggacattgaaaaatgggaggcatttatcagttgatttcgagatgaatctattgagtcctgccattctccctgtcaaagcttgaacttcttttggctttgttggtgagggcatcttgattaatgcttttattttctctggattagcttcaattcctcttgcattcacaatgaagcctaaaaatttccttgaaccccaaaagaatattttttagggttcaacttcatatcatactttctaagtatggcaaaacattatgtgagatcctctgtatgctcctcgctttttactgatttcaccaacatgtcatcaaagtagacctccatgtttcccccaatctggttttaaacataccatttacgagacattggtatgttgctccagcttttttcaatccaaatggcaagactaacaacacaaccccatatttgtcacgaagcttgtatgttcttggtgtaggacacgcattttaatctggttatatccagaatatgcatccataaaagtcattaattcatgcactactgttgcttctaccaattggtcaatccttggtagtggaaagcaatctttaggacatgccttattcaaatttgagaaatctttgcaagttctccatgtgtcatttggtttttgtaaaaggacttgattagagatccacgagggataaaaggcttctcgtatgaagttattagttaataatttattaacttcttctttgagtgcattttgtctctcgagattcaatggtcgtcacttctgacattttgctggataattagggtcaatattgaggtgatggcaaataacgttcaggtttatcccgaccatgtttaaatggctccaagtaaactgatcttggcttgccttcagaaaaatgattaattgctattttaattcttcccccaaacttttctcatatatacacatttaatgagattgtttgggtctaaattcacctcttctaactcttcaattggattgagctggttattatcatcatggattctaggatccaagtcttctatttccttctcaatttcttcagtcagaattaccataagctgatgactggctcttctatttttaagttccaccttgtagcattctttggccaacagtcggtcgcctctaattgtccctactccggagtgtgtaggaaatttcaaggacaagtgctttgtcaagct

SEQ ID NO: 125670 - DNA, 610 bp, Cannabis sativa
  modified_base (26)..(33): a, c, t, g, unknown or other
  modified_base (562)..(579): a, c, t, g, unknown or other
cataaatggaaaaattattttgtcannnnnnnngccaaaaaaggactttacaaattagaagttgttgtatctttcagaatttgaataccgattaattttttaatataaaatttgaaaatcaattttaaaaaaggagaagagaaaagttgactatcctttacttatcattaatcttcccttttcaaacattaaattaaaaagactcataattgctttaggatttagatacttggatcactatgaaaaggagagctcatattcaatttatcccaaattcttttctccactgtccccgcctatagcttccttgagagcttgagtaagttcatcttcattagttcatcgagtgctcttaaatttttcatgtacaaaaaaaaatcaaattttatttttattttttcaaaaaattttcttttcttccccttttgttatgtttgaattaagtatttcataactaattggaaataattatcaatttcctgctgcatgttgtagttgctggaggtagtctggcaccccgtacccttgtctactgtcattttttaagttgattttaaacttnnnnnnnnnnnnnnnnnnattaagtagttaccacttaattttgatattt

SEQ ID NO: 125671 - DNA, 1059 bp, Cannabis sativa
  modified_base (961)..(961): a, c, t, g, unknown or other
atttcgcgataaagagaaatatgaccaacaatagttctctgagaccatgttaattcaagttttggcttgcaactaattagcacaaagaaaaatgagaatggtgaaataaaataaaaaaagatgaagtgaatgaaatgtgctcaaactcttgaactgagttgagacctttatttataaaagaacattagctaaagattataagaagctactaagtaattttgttagagctgaatagcaagaaagacaattactaattgtaactaattaatcaaggtgtttaaagccagttaatgaactcaaagtttaggctattacatagtgtattctaaccatatgacacttgaaataaatcactacatgaagggcaataattatatatacttttaatttgtaaatttataaatattttgttggttgatgaattaattccaatttttcctttctctttttttcatattgaagtggtaagcgtcaattctatctttatgcttttttggagacaaaatccctttgcccatgttctaaatataaatatatgtcaacaaaaacacagtattgatataaaggtttacagcaaaaccaacaaaggttttgtttggaaatatttactttatttttcttttccttttgaaaaagaatagagggaaattaataaggaaaaataatacttgtttatattacacaatatatatatgatcatattcatatatatatatatataagtaataaaaccatatatattatgatcattcagtaatattaagaatcatataagtcctagataaaaagtaccacatatcttaattatagccaattttaattcattattaactattgtttttcctaaatttcatttatatgtacaaatatataaacaatacactaatgaactttttactaatcaatgataaaatttatttatatatgtttcatatgtatatttatatatctattctatatnaagtgtgtctatataactgaatttttggtttatgagaaattcatgagtgtgattttttatttatatttaataaaataataaaataataaaacaaatcc

SEQ ID NO: 125672 - DNA, 644 bp, Cannabis sativa
ctgacggaggccacaagaaggtttgatctttctaaccggccctccattgagacaaatgttgagggtggtagtagtgatacattaagagacccagttacggaaagtttggggtataccatagcaagaaagcacatggttgataaatctccaactcagcttatcctatgctttcatgagatcaatttttaaggcaaaataacactctttgcctttcttccgtttgaacgaatggatgatttcttgcacaatcacattgttatcttggatatttctacccggcacaaaagcagcttgagttgggcagatgagtgaaggtaaaaaagggttaattttgtttgcaatgatcttggaaataaccttgttcatcacattccacagagaaatgggtctaaagtgattggttcttttcgggttttggactttaggaataagaactatattcgtagcattaacccccttatgtattttccaggcctaaaaaagtcataaactgcatcgcaaaaatcatcgcctatagattcccaataatgcttaaagaacaggacagacatcctgtaacgccctaatgctaaggcatgctacagtgctttttcaattacagtgcaatcttcgctaatcgaagagttttcttgaaaaacgtgtca

SEQ ID NO: 125673 - DNA, 1273 bp, Cannabis sativa
gagagagaaagggattggaattttgacaaggctattttgggggtttttgaaaattggtcctattttaaaaattacctacactaagtgttctccaaattaattttgtattaaaacatgcataataattcaaatttccctttaaaactagtaaatagttgtactatgaatattaattaaataattaaatcatatcttattaaaaaaaaaaaaattaaaatctcatatttggtatgggaagaaagattgaaaaacactcaaatcaacaaaaattttcatatcaaacttaaaaaaattgatttatttttttgttctatacactttttttcttacattttctctatctttttcctttatcatcaaaactaaacttccaaacatatagccgaaagaattctaaaaaaaaaaaaaaatcatcataaaatttcttatatgtttataaaaagaaagcatgtaaagaaatatcttcaaataattttcatcaccatatttctaattaaataaaataaaaaaaaataagaaaatttaaagtagaataaaaaattagaaaattagagaattaaaaagagaatagatagatatttttttaaaaatattaattaactcatgatctctaattaaataaagtagagtaaatttttaactaagtaaagtaaaaaatataattctttgatgtaatttattaaaaatgttttgaacactacaaactaaaaaacttatataatgtaagtgacaaaggtgaaaactatattttagcttgtaaattgaaagaataaaaaactttaaagtcgttattatcattgtatctcacttatagtcgctgttatatttaaaatcgttgtcattatcaaatcttacttatagttatcactatattcaaaattgatatcatcattgtattttacttaatcactactatattcaaagtcattatcatcattgtatctcacttatagtcgtgaatacatttaaaatcgttgtcattactggtaatggccactatatctacaaccatcatcaccactgtatcaaaaattgaccaaacattatcaatatcgattaaaaaaaactttaaactttgggtacttataagttataccccaaaatttcttagaataataaaaattaaaaaataatactaaaagaaaatgtgttataaaataataaaaggtcaaattattaaaaattaaataatttctccaataagagaattgtcatatatactgcattttcactaattgattaaaataattagtatttttgtaaaaaaaaaaaa

SEQ ID NO: 125674 - DNA, 608 bp, Cannabis sativa
acatttttaatgatcaaattgtatctcagcttgagaaaagtacttcaaagggactaggaatctaagatgagtaatactacaattttaaaaatattcataataatatatatatatatatatataaaagaaaagcttgtaaagaaagaaatgaaaagttacctttgaagagatgaaaaatagtaaagcggcgtagaatggttattggtgttggccagaggagaatatgaagagagaagcactgtttttagtaaccgaacgtcaatggaaaaaatgtctaaacgtgtgttattattatttttttttaaccaaaaaacgtgtgttatttaagggatatttctaaaaggttttttcttcctataacttatttattttgattcttttttaagaaaaaaaaaaaaaaacaaacaaactttccattttatataaatatataaaaagtaaaattaactcttttatttttgagcatttgttgtcttaatgtacgtaatatattttagaggaaattctacaatgcagatgtacccttatctgttttaatgcccgaaataattttttagttaaattttttctcatggtcatgtaccttatagttatttaagacatcctgc

SEQ ID NO: 125675 - DNA, 2416 bp, Cannabis sativa
tttcttcaattatttattgtattatttgtaaataaagtagaaaatacctagcataaaactaagtatacgtgcttggcacgtagtatttttctagtatatagatatataaataaataaaagcggttctaggatattttttaaattgtcactctttttatttatgtaagaagattttttttaaaatttttacacatattttttacgtttacaataatattaataataaattttggatatatctataatacaccatcgaaagagttattttggtagatacttattttttatgacatccagaaaaaacaatttactctattttttcaatattcgtgaacattttagttatttaagactatctcttaatttttttttaaaaaaatgacaagtagtttacaatgccaaaaataaattttaaatattgcattgcatgcatgattattttttttatacacgtggtaagtaactatttgaaaaccttattttggtactataaattatttgaaaatttctaaaaatttataagtagtcataaatagctacaatgcgcaaaattatataatatatatatatatatactaaaaaactttttttaggtgttgaaacagatagtgagatctaccaaaacaccacttttaggaggtgtactacagatgttatacccatattttgaacagttaataatgggtacggctgcatgacatgtgtacaatgaagggaataaattactctgtacagattatatcaagaataactactattttaatcctataaatagcatggaagacattgtgtgttgttttacttttatctgttagtatttttttttttggttgactgataaaactggtttcagttatattcattgtttatcatttatgtattgttatgatttttcattagatcaaaactagtttcactggattcacaagttcgaattgagtttcagaggttttgagggttctataatggggattcttcattttatgatgttattgtatcatttttatattataattttttgtattgtgttttttcagtatgatgttaataaaactggttttttttttttctgctttaattgaaataattagtttcttttaatgttgatgaaaacagtttttaaaatttatatcatttttacattatattttgtttgcattgtatttttttcattatgtttatgaaactggcttttattctgcatcttttaataatgggcataacctccttaagtggctacatttttataactaaccccaaattctaaaattttggtggtaaaaccgtctaaactcatgttctgttagcagtttaacatttccattcatttttagctgttaactgccatggtggaatgtctacgtggacacagtgtacatgtgtcacaattttattggtccacgtaaataaatattaaaaaaaataattattttaaaaataaaaaataaaaaaatttctttttctttaaaaattaaaaaaaaaagaaaaaactaaaaaaaaccctaattccctacgccctcctcctcctcctcctccttcttcgtcttcttatatatttttctctgctaaaaaaaaccataacctaaacctaacacacctctccctccctcagttcattatcgcacagccacccatccaaacactacccaaaacccaatcggacccaacaataatcaaaacccaaccaaacactacccacagtaatcaaccccacaaaccagtaagcaaagcctcacctctccaatcggaccaccaatcgcaccaacaaatccctccaaacagaccccagcccaccaccatccacaactactgaaaccactaccactaatatcgaaacctatttgttagttcttaatcaaacaaaatcaaaataaaacccaaatcaaattcaattccaacaaaatcaaactaaaacccatcaaatccaacaaaagcaaacaaaaatacaaatcaaatgaaaaaaaaatactagatccaaaaaagaacaagattgtccttccttagctcagaagcctaactccagacaactatctcatcctcaagctcgtcaagattcgaagcttcatcgtcccaacctcctattatcctcgacgaccactagtaagaagaagaggagtgagagagatccagaatgggagaatcagcgtggtatgttcgagggaggtttgggaaggaggtggtggtgtcgtgcgaagagatctgggcgttggatcttgccgtttgaatctcattcacgattatgtatggtggtggtcggaatgaatggtgtgagattctcatttgaaccgctatgggtttctaatttttttcaaatgtgattatgttcatttatggtgttttagtctttaggttaaatgaatgttcatacctactgttaagtgagagagtacgaggaagagatggggttatggtggtg

SEQ ID NO: 125676 - DNA, 1930 bp, Cannabis sativa
tttatcggttgtagctttgaacatgttagtagacattgtaactttgcggcccataatgtggccaagtgggctttttcccatcagaggttcggatcagtgcctctgaactccttgcccgataatattttctgtaatgaccgacaggtctaactgtcttttttttggtaatatattgcacgcttttcttcaaaaaaaaaaaatccaattttcaggtgttctggtatggagggtttcaggtcgggtattgcgggctgggtgtagtcgggttcgggtgttattggactgagcccgaatattttatttatgggcttaaataaaatttaatttttaaaaatactattttttttttatttttacattttgttagctttttttatatttaacatacacattatataaagattgtccccacaccaattctaaaaggaccccatgcaattataataatcatataataatataataaacgataaatatgaatataatatatatatatatataatttattaaaatatgcccattctatatctcgttcaaaagaaaattagcatatataatgtaaaaatatcgattaattatgttctattatagattacaaattttgaacgattacaaattttaaaatttttcataatttattgttaattaatatatttatttttattaagatttcacacattaattattaaacagtactataggactacaagaacaaacagagcaacgccagcgaccaatgacgatactgaaacataccttgccagtcgccacctcgaaactcgatagtcacaggcggagaaagcttttttgactttgaatattagggacgaggattgccgggttgatctggccactcggatgcgaccccgctggagatgagaagcagttgccgcctctggagaagaagaagttctaaggtttttttgggtcttgtgtcttgtcttagactcttggtctggttggttcgaatagtgtatagtgacagtgaatgaatagtgaaaagtgaaaaatgtgataaaatagaaattaatatttttaaatttttaatataataaaaaaatgaatttattttaatgttttttcgggttacgggttagaacccgaccaacaaaaaaccaatttttaatacccgaatccgaaacccgtgtggggtaatttcgggttgaacccgacctgaccacacgggttttcaagtttttagtttttttggcagcgggtcgaggcgggtggtcgggtttctcgggttcgcaggtctaaatgttcagccctacctgataccatcactataagaaataaaattttattattcctgatagtgtcacgcctgaaacccttatttattgtagtgaccttattactatgaactttattttattactaatttgctcaaagtcaatatgcatttaaccttgtagagctcatattgttactaaaagtctaaaatgcaacctgttatactcgaaattcggctagcacatcagaggaggacacgtgtcaaactgtgagaatacgaaccaacaaatgtaatgatatttatatttaaaaatggaataactcatttaatgcggaactaacagagtatgtttacaacttgctgattgtaaggtcttacgcgagataaaaatatacaaactattgcctcgtgcattaacgagaaaccatacgacactagtagtgcaaggcgaggcatcaacctcgttacgcatgaagagacatagatgagacatgatgactattaagacacttagcgtataatacacattatacaaactaagtataacagttgagtaaatccaaacaactaatcgaggcattcatctcgctataagaaggcacgctcacggtaccttcactaatcagctcgagacatgtttcaatgagatccacagctctgtcgagtcagctctctcaaatagaagttgacattcaa

SEQ ID NO: 125677 - DNA, 1439 bp, Cannabis sativa
tatatgcaatagtttttagttaatgggtggcctagatttccttaaatattatattggttgatgtttttgattaatgatatatatatatatatatatatatttatcttggttggggtgtttatatataaaataactcatccaatctaattttcccaagtgtgtatatttacttgtgcgaattagattttgattgacatgcaaagtaacagattcaattcaatatacacatatttatataaattttttaaagttatatatacaattaacattttaatgtaaaaaatagtaatttaaatgtaatacatatagtaaaatatatttcaaaacttaatagatcaaatatataatccattcttatatataatttattttttgtacatacaaattaaaacaaaattaaatattttttttgacatacaatttttttttcttcttttgaatttattatttgttattttatttattttaacttgttgttggggatataaaacaataataatttttttttattattttgttgttagtcatgtgaaaaaatatatgtttagttaaatattaaaaagtaacaaattcaaaataaccaatccaatccgcacttctgcatattggattagatttgatctattgtgtggattggattagatccaaaaatatgaaatctatacttagtgtagatcggatacactattagcaaaatagtatgaattgagtaggaggaacacctcttcttccaggtctttgcttttaggttgtgttttccaagactattttctacaaaaaattgttacctagattttttgattctaaatagggttgacatgcaaaatgatcttaaatttagaaactatgttagtaaatatctctttttaaaaaaaattaagaaatgaccaaatataataaagtagctaataaaaattataaatatacatttactacatattatttttttttaaaaaaaaaataatgaaattaaaatataattttttttctccatattcttgtattgtaacaaaaacgaataaatataataaattatcagatatatacaacagtatttgatatatcgtatcattcaaaattaatatatcgtagtaataaaattatatacctcaaaaaattataataatacaaaattaatactcaaaatatatatatcatgttaacaaaattatatataccactattataaattatgtatgaatatcaaaaaaattatatataataaaataagaactaaatatcttcttaaataaatgatatactagtagacagcaaaaaactatataccatacaataaaatatatatatctacaataaataaataaataatattattaaaaaaattatatataccatattaaaaaaaaataatatatcccctttatatataataaaataaaaactaattaagcatgaatgatctaaaataaaatgatata

SEQ ID NO: 125678 - DNA, 1894 bp, Cannabis sativa
atcaaaaaaagaacatcaggacaatggcctttcaccaaaagggagagacgacggaatgtacgcgtactccccaatccacgtgcattccaacataaaatgctcatttttttgggcgggtgtgcatagcatcacctgcctgttccaaatcagtagaatttgaggaagaatcccctccctatcaccagcacaagccctcttcaactgagaccttacagaacctccaactacagcttgttgggggatgaaagaagggtatttaacccaagaagcatacgttagcccttttccacgaaccataggatcaggctgaccagaagcagtattggttcacatagcagcaatagtccaaagaggggggtgatatcaccagcagaggccaaaactacaaaggcattaggaaccacctctaagtttccaacactaatagcaaccaccagagaatcagtggagtaagaagtgaaggctgaagaacgcaaaggattatccaggaaagagttatgaccagcaggaaacatgcttgagatattagataacagcagaattagagtggtgggacgagaaatgaggggttgaactggcagtaacattcagaaaagaaaggaaattaatggtatttcccaaaaagttcctggtaggttgactaagattaacaggggcaaagtcaactaagttaatcgcaggagggtgagggtatcgaatgggcatggacttatcaacaattttttccttaccccttaagagaatggtataagggcaggggggtcagactgactttcatcacattttacaagtaaaaatgacagtatctcttggtgtggtccaattttctacagaaaaagcaaaagtcagggagcctttcatacttgaaatctatccatttgacaaactctctacccatacgaatgaacatgatgtttataccccttcggataggtaaattaacatccaaaagaattcttagcgttaagtaagggccagtgccctccttgacagtgtccttctcaacctctataaggtctcccatctcagaagcaatgaacctagccaagtcatatgatttacacataaagggtataccatagacttggatccaaaaagggacataatgcaaattttcaggggtaataggaaaggaacttttagaggcagcaaagatggtaatgctttgggcaaaatgccagggctagccttctaagattctacccttatcaccttcgcaaccaaaagtaatgagaaataaatcatctgcatgttcagtaacaaaaacaagaatctacactgtgatgaccaaatgtcaaagtattttcataagagagggacgattataatgtcgaatggtatggagcttaaggagaaggctatagtggtaggagaagaagtggaagaactagcgtcatatgtaaagatggtgttttcatcaggtgggaagactaaagcattagaaacagtattaagaaattcatccattttcaaaaaagagaaatcacaagcatacacagagaagagaactaaagagaaaataagtgggtgagaaaaataatacctcaatcgcactatataaatgtaaaattatagccctctgagaagctttctcgaacaatccctagtcacatccttagcttgcaccatggtagcatcaatgatgaggaaggacttcttagcttcgggaacccagacgtccgcccccattttactatctctaagagtggaatgatggtgggaaatttgggaagtcagaattaaaagccaagaagtcgaaaaaagaagatcagaagaaatggaaatcaaagagaaagaaagggtgagatgggaagagtctggcaattataaatgggatgggatagtttgtaataataaatctcagagcaataaatgctctcatcaatgaagaaag

SEQ ID NO: 125679 - DNA, 502 bp, Cannabis sativa
aaataagtcctatcttgttcagacggataaatagagctgaggtgtccatgatctgctgtgatttttatgataccagaattgagttcttgcggtaaaaataaaaatagtgttttccgaatatgtagaataaacataggcttggtttggttttattttagatgttttcttcttttttttcttttgatttgaggtttggttcggctggagacacaaccaaatgaactaaccccaaaattttatctatatatgccgattagttgcgcatcataattatagttaaatcatatatgaactattcatatatgaattatttagtcaactttaaatttttatttttagttttaagttttttttttaatagtaattttaattttcatttaaagtgatccattcattgatttaggtggcctttggtaatatttttttaattaattttctatttttaaaattgaaaaattgaaaatatttttcaaaagcatgttctataaaactgttttcactt

SEQ ID NO: 125680 - DNA, 3524 bp, Cannabis sativa
  modified_base (3454)..(3460): a, c, t, g, unknown or other
accgtgcaacataaaataaaatgttatttctgattatatgaatttgttaatgattatataatcatgaaataaatacattatatatgaattcgtcagtccatgaagcagctagagtagcgtacccgagtataagagccatttgtcggtaaaccaatggaggcttaaagcgggggcgttacatccattatctatgtattttgagtcaacatgcattttgaagaatgtctatggcactttcattatcatgcacgatgacaaataagcaagcaatgaggaacactagacaacatatcatgtgtatatcatatattaggacaaaaacatcattatttctttgtttaaacccaagaatcaataataaattgtttagaagacataccataacactaataatagggaataagctcttaaagataagttgatgatttaatattgttgtttcttttggttaaaacttttgaaatagcagtaaaacccccaatatttgatttatccagtgatgcactattacataggataacattgtccatcaaataactaacataaccaaatctcttccttgttaagattgagcacccatcagataaaactaaatagtcagttttagaaaaattgacaatgtaatttgcatcacaaagttggcttatgcttatcaagtttgccttgagccctttcacatacaatacttcaataagatgtgcaactccactcagcaccaagtgtcctctcccaataatctggcccttatttccatcaccaaaagtgatagctccctcctttgcttctttataattgactaacaatttcttattgctagtcatgtagagcaactactatcaaagtacgactgcccttctagaaatgcaaacagtgaaaattgagccaccaacccaacatttgattcacaatcagacctcaatctccacttactttgagagccttcgccttgagttctattgggttgttgaaagctattaggtcgactgatcatagctttcaaatagtcctgtagcttatagcatatgggtcaaatatgacccctcctgttacagaagttacactctaggatgaatctctccatcaaagattattctttggagaaattcttcttccttcaaacttcaccttggtaggtccaaatggaatatggaattttctagtgggatccaaggactcagatgtctagggaagtgatgatttcctgttagcctttttatccaggttgatcactggtgcagtgaactcttctacccttaagttatctccttgcttatacaacatcttatattcaatagaggttcaatcaccataaggttttttaagttgaagagtttgattgatagcagtcgttgctagagggatgaactctaaagcctatttaactcttacgagtttagctgaaagcttatagatctcattgtccttcccattaagaagtttgttgagattcataacagtgtcctccagcttgacttttcagactctatctcgtccttggcactatttagatctctaatttgcttaattatatattcccactgatcaaacatctcttcatatgcattttttcttccaatactgttagtgttaacgcagatttttgttaactaaaaatataagcctttttgtaataaatatttcacaaaattaattatagtattaaatgaacactagaaagtttttaacgtggttttaaagttaacacttcatagttcacgagtccatcttattagggataatatttggaatacagagtacaataatattagtagtaataatatcttgctttttctctctgtaaattggtcgtccattttaccctggatcctgcccctatttagatgtgtatagggtgatggttattaccttgggatctattcattcataaatgttaatgaatagtggatatttttcacattttattattgtacatattggataattctaaattaccgtttaactgctcttttatcattatccttaaacggttatgcagactaccagatgttcctcgctaagtatgagttgtctttctttactatctttgtaaaaaaaattctaagtatagagatacaatacttctcgcgattctcttttaccattttggaaggtattagtgaggtggttacttcaacgtataaagaacgagatgaataaatgtaatttttctttctacatacaaatatgtgaatcaattagctgaaagctcattacggacgagtatgtgggttaataagttgcaagctcttattcctgagtttgtggtctaatgagttgcaagccctttctgtactcgtcttgagcaatttttattatgtattctgttcattttgagatggaattattgtctcgccaatcttactcgttaatagttattattcttatctcacatttgtttaagtggcaacgagttttaatatttctatcaaccgtaattcctaagacaagttatttaatatgcatttaataatgcaatgcttaagttgattaatatagacaagttatttaataagcatttaataatgcaatgcttaagttgattaatattctttctctggtacatctgtcagcttctggttgttagccgaaattagggtataataattatccctaaaaagttcttattaattaaaaaaggactttttaattgtctttgagggtattattgtattttttccttttaaaatttgcatgttttaattttggtggttcaaaactttgaggcaaattatttcttcatttaatgctccaattgttcttttctcgtacagttaccatctgtttgatcaattttattttgatcaaacggttatcatcttttaggtataaatttcaaaccttttattattttttccatttagcccaagaaaccttcaagcttcaaaaatttctcaaccaatatcttctataaacttgcatgacctctatgtctttcatatttttattcgagtttcatccgattgcatccctcaacttcagaatcatcaagacccaaattttttttttacatcaaaatttccaccccgaagctcttcaatacacagaatctctcatcaaaccatttagtgacattctctcttgttgctttttctttcgtgctttcaatcttagtttcttggtatatgttttgttttgttttttttttttgcattattttattgtttaggtgcactgtataagaatgtttgagtaatttagggctagaaaattaaaggttatgtgattcgtagattttgggttttgtttgtgctttgtttttctaggaattaaggcactattatctgtaatcatgtcccaatttaatcttgaatttataatcctataatctttaaaatcagactgtcctctatttcgtgccataaaatttaaacccatactcaaaaaacctcaaaccatacttgaaatcaatgatgcaaaaattgaaaaccaccttattgttgggttttgtgccctnnnnnnnactcatttcaatataatcagattgacttattaataaagatcagaaataaaattttatgttgcat

SEQ ID NO: 125681 - DNA, 2050 bp, Cannabis sativa
  modified_base (1264)..(1264): a, c, t, g, unknown or other
atcttgtccagtccagtccaatcattttcagtccaatccagtccaatcctgcgtaccaaacgggcccttagtggatcattaatcctaactctttggataatggagagtttaagttttaataaataccagaaaaaatcaactaatgtaatgcaatagcgagtaagaatcttaacatcaatattatcataataaatatataaaccagtgaaatattgttgcttgttttagattaattttttttgtttgtttctgtataagatgaagccaattgtatgactattatgtactgttaaaaaatactaggaaattatacaaaacaaagtaacttctctttcttacagggaaatgactttgcagtgactttcttttgtgcactctacaatgacttttttccctttcttatagggaagagcttttccaaattgttgacaaaacagtatcagatattttgggcaaatgatatgtgcagtcaaatggtaagggtttggcgatgtttatatttacaaattgagggttcttattcagtaccaccattgtcatttaatgcaagactcttgctatactattaggcatctatatatagaagaacaaaaagggaatcttgttgataataatattaaattgctttgaaaatttgttttgcaaatgtaactttttcattagagtcaatttatatatgtgtttctcttcaggcctggtgacactattctaattgcagttggtgggatgcatctggcttcaaatattcaaattaagaaaccactttgtttggtaaatctcaattcatataacttgcttgagccttttttattttacttgtttaaataagtaaagataaatcatttggaagctttatgaaaagtatgtaaatattagtattgttatttgttattacttttgttgattcgaattctttacagattggtggaggtgagcttcctgatgaaactaccctcatgtgttcttgaggttcagtaaggtttgattaatttagattatgttttattccttttgattgatatatgttcattgagtcttagcgctatgtatcgatagggatgtgatttttgtctaagttgataaattagtgaagaaattgataagttttatttagccacacgaaatgcttttgcgcaggcttcttattgctcagaaaaaaaagaaagaagttgaaactaataatggaatgaaattaaagaaatgaatcacaactatatcttatctaaactccctttagaaaatccatatcatatatatatatatntatatatgtatatatataaatgtaaatatactgattttctctgttttgtgttgagtagctcactgaaatccactttcagactcattcgaaactcattccgagactcctttatttttggcatgttcatacattctatttatttgtatttttttttctattttatgtggagtataagagaagataatcatcaatttggtgattcaaagctcaaaaattttatacttttggtgttgggattataaatattttgtaattggatttctctatagtcaaaaatctatgttcttgttgtttgttatgctaaatgaatatgataattatatagcaacatttaatcactatataaattgtatatatgataagattttcacaatttagtgatgtaatgatcataacttttttgagttttgttttgagattgtagaaatttagtgtcaccagctagctatatgtatgcatataattgaactatttatagtcaaaaaccaatatttggtttttagttatgcctaatgaataattgagaaaatagatatggcagaatttcattacttttatttgagtagcaagactattattgttgtagaaattagagcaccaaacatttaatcaaaatactgaattcttaaatgattgtacttttacatgaattgatctctttcatgttagggagtattttacttttttgttctcaaacattaactaataatatttttcttcaattgtattattttaaaataaaataaaaaacacttagcataaaactaagtatacgtgcctcgcacg

SEQ ID NO: 125682 - DNA, 1368 bp, Cannabis sativa
aaaccccaaaaaactgtaaaccgtttagcgctttggttaattagattttttagattttagagcttagtttttccagttttatcaatatttagggaatttacatgctatttagcgataaggaaatattttgttttggtataagtccctgaaaattgattttacggggtcattcactagtttagataatttgtgacatagggctattaatcgtcaagtagcattttcaactcaggttgaccaacacacctgaatttagaattaaggtaagactagtacaaatatatacatgcatacatgttagttgatcggttaaagtaccaaagttgtttgctagagtaccaattatatcggctagagtaccaagcatatcggctacagtaccaagaatattggctagagtacaaggaaagcattgtgcttaggtgtatgagcaccttgttgcagtcaagaatcatgattatgtttatgcttttcttactgactttgtcgacttacaaatattttttacatgtgtagataagggcaaggaaaaaggtgagtagctgtgagtttgggctggatgaagattgtacatatagagatgattaagcatatagtgttcagactatcgggacagttgacccttattttgtaaatagatgtaactttaaaaaatgggatcatgtagtatgtatttgtatatatttatttacgttaaatttattgacaaatgtcttaattattgacatattttaaataaactctttgattagcaaagaattgcaaagtaattaagaaagcaccatagtgtgcctaaacatgtaaggtgttacatgagcttgactgctcttgccccccagcattaatctcttagtaacttgggtgtaaaacttttaagtgtgtatgttgaagttatttgttgtgagagagatagaccactattaaggtgtagttggttatttcttgtgtgcttggtgctcaagcatgagttcactttattatcatatgtgagatgaatcaatgtcaaagagtagtgcggaaaaatcccccagatcttctttataggggcaaaatcacaggttgttgaagaacctggtttggtgatttcaactcatagaaccttattcaaggattaagaaaaaacttcaagggaggaaaaaggaaaaacaaaaattggactaaacctgtgttaagtacaacgtcccatacttaggaggagtttaaccattgaaagaataccacaattggggtagcatccaactcaaagagggttttcttcaatcaattagaaaatctcttctcgatacagtgtctagctttgtaatatctcagaaaataatagtatttaataagacatattttattcaatatgtaattattttggtaatg

SEQ ID NO: 125683 - DNA, 574 bp, Cannabis sativa
aaaaatggagcaaatattgatgcaacttcgcattgcgtcaacaacatagtaacttattacaatgtaaagtaaaacttaaagtgcatggcaagaaagcttacaagtctagctaaattgggaccttgtaaattttgtgataggcgctgcatcattaacaatgcctggattaaaaatcaaagaattagttagctcagaaattagagagcagaggaacagatagaaagactaaaaaattctatttttgattaaaagagaaacaacataaccaaaagacatactgatctaaatcttgtgggatccatttgtctcagtctctgcaagtgaccagcttcattagggtcttccaagacattggcaatgaattcatacactggagcaaaacttggattatctgcaattataagattcagttagttaccgagttctgaaactgacaataaacgaatgaacgaaaacatgaaaatacccgtaataaaaatgaggagaattaccccatatactgtttttttaacttttttttcaaatttattgtttggatttctaaagtggttgcagcgctaattgcaataggagt

SEQ ID NO: 125684 - DNA, 1416 bp, Cannabis sativa
gagagagagagagagatgatttcgaaaatttaaagagaaaaaaaaatctttgtattttctcaactgtatttctcgaatttgttgttcagttagttgttattctatattactaatatatcatatatatatgtagtattttataattagatatttaatcccataaaataaaaaatatattatatttaaatttgaaaaataaattcaaatgtaataccataaactaaatatccaaattcaattaattctttactattttatattatctttaattataaatatcttatcaaataaatatttaattcaaataattaagagacaatttttattttattttgatttatttaattaataaaacaatcaatggatttaattccttaatactcaggattcagacagatctaccaaagaacctaatgaacacaaaattaatttttcttcgtgttcattaggtttaatggattttaacgagtgaatgaaagaacctaatgaacataaacatgagttcatgaatactcaggattcagacagatctaccaatgatcatcattatgatatgaataagtattttatggtaaacaacattgtaatgaaagaagttattacatatcagtccagtcatgcataatcaaattatgcacaacacatttactacatgtacctatctacaatgtgatccaaatcaaaatcacacacacacgcgcgcgcgcacacacacacacacacacacgcgcgcgcgcacacacacacacacacacacacacacactagagtatagtgtatagtaaaccgtacttaatagtttcatattaaagatccatttattttaatacactaccaacttgttttattcatattctataatcttaattctcttgcacgaccttacaagattatataatctccacatcaataacaaaaatttagatatttattaattgtacttttattattaatgtattcaattattttataattatattttatatattctataatataatgtccattaattatttgtttttaaggcataaatcctaacatgtcgacctttggggcagctaggacccacgctcgagaccctagcccaaaaagctcccctaatgagatctttaaaaatattatatttgtatttttactattatttattaaaaaatacaattattttcttaaagaaaagacctaatttatttttttacaatactatattcaatatttttcaagaaaaaagatccaattatattcaaaaatactcaaaaataataaaagtttacgtttttaagaaatactattcttttttcttacagtaccccattatttttagatcagcttgaaaaagacgttgtttacacgttttcatattgcaaaaatataagggtaaataacggcaaaacccccaatattttcgttttggtttca

SEQ ID NO: 125685 - DNA, 1311 bp, Cannabis sativa
caaacttgggaactaggttatcggttgctgcccagaaatttgggtatccacatggagtttgggttgcttgtttatagccagtttcgggtacctcaatttttatgttttcttaatatttaaggtattgccatcttatttatcgataggaagattttagattatgaattaaagacttaaaaagtgttttagcaagacacttattagtttaccgttaatgtgaattaggcctctaatcgtcgagcgattttttcattcaagatcgatgaccgacacacttaattttgaaattcaagtaagattagtattcagaggcacatatggacatattttaaatatacatgctttatgataacatttacctagtatagtagaaatagcagtatatatgtacatatagttgcatttagatattgatatctagtgatactagagggtatcgaatagtatatattgctaactagattaacatatataaaaaaacagtttcttgtacatagatttgcattggaatatcgacaaataaatattaggcaatatggatagtacaaattaatgctaccaacactagtacgactagagttctgtgtgcagtttggtattatagttaattgtacttatttaagaatgttcgagacccaattattcctgttggatgcgtgtagcagtaattgggtgtattgagacctaattaaaggtcagatatatgttatatatttatgctttttttactgagtctatcaactcacatttatgtttctatgtgtggttaaagggaaggctaaaattgagcatcagtgagtgatgagcttggtgaagattgtacatatctatacgattatacatgaagggttgcgatcttcatcgagacaacacatgcttagttttggttgtcgctaggcgatactttttatattatgtatttatgtatgtttagaaaatagatttcgaaatcccgaattgtgaatattttgtaattatgatatatgtttagtaaaattttatttattatgaaaattttattaaacgtgtttctatgttaaaatcctttattagcaaatgttaacacaccaattaagaaatcactgttacgtgccttagttaatagggcgttacaactattcatctctattttttaaaactttcattaatttttgacaatagattcatagcatataatatcataatttgtcaagattgtaggattttttcttggtgaaattccaagattgccctacaccaactcaagtaataggttaaaaacgaaagggacaaaatagtcccaaaaattcaattaaaccaattgattcaaac

SEQ ID NO: 125686 - DNA, 661 bp, Cannabis sativa
aaactaagagaaagggaaactaagaaaaagggaatgttgattacattaatggaaataaataaaagatttggacatccacataattaatactatttataacaattttgatatttttgtgtcttaggttatttatatgctttctcttaacaatgagcaatcttaaccacttgaggctaactcaagtggccataggtaggtgtgtgtgtgttggaagtcttgggttcgagtctcagctaaaacatgattgtaatatataaacgcttaaattaaaaaaaataaataaataacaatgagcaatccataattaaatggctttttcccatgtattttgtaaaatagatttaaaaaaataaaattatatagtacacttttataatgtagtgttgtggtgataattcttgttgttttgttcatcattcggctaataaagtgatccatttactatttattatatattaatcattcaaaaaaccttgtaataaaaaatccatttacatataattccaagagcttttgttataaactacaataagttggcttaagaacttttcataattaatgattttaggattcgtttggtacgtcgtattgtaatgtattgtattgtgttagattgtattgtattgtattagtattatttaatagggatattggcggctaa

SEQ ID NO: 125687 - DNA, 503 bp, Cannabis sativa
ttattattattattacttcacatgcacaaacacaccgactaattgttttttgtattttaatgccgtaccaaaagctatatagcttttactatatatctcatcttttcatcaaactcttttgactaaagaaaaaattaatttctaactaacttacgttccttacttcgatatgcatatatatagtaatatattatgccacgtacgcacgtacgtactttctattattatttcatattatatatgaattggctcttggctttctcttatggtcttttatttgaatttgtttgaggctcaaaatgtattatatatatacttgttagtttgtagtactttgaaagatagtgatcgatcaattaatgtatttgatcattttcgcatttgtttgttttgtaaaatatctataggtgaataattaagtaaaacttaaaagagattaagtgcattaatcatatgtatattaggagtttttttttttttttttttttttattttaaaactta

SEQ ID NO: 125688 - DNA, 642 bp, Cannabis sativa
  modified_base (117)..(123): a, c, t, g, unknown or other
gtttatattaccacaatcttgactttacatcctaacaacaaccttgagtctgaaatctattacatatatggcatacatatcattaccctttttcttaaaaaaaaaaaaaataataannnnnnnaaaataaaataaaataaaatgaaactttcattaaggccaaaatgacaatcaaaagtctagagacatacacaaataaaatccgataacatcaaccaccaaacttttgtttcatcaagagggtcgtcttaaggtgatgagaggcctagggcgaaatttgaaatgaggcattttctttttataaaaattaaaaataaattttaattaaattttgacacaatcaattttaattgttttatctctatgtaataaataattttttgtaacgtaataagctaactcgatcaagtaatatttaattacaaagaacatctctattgaattgctatatattttagccataggcggctcttatagagtgcaagctgggctattgcacagtgccccaaaaaataaagggctccaaaaaaataaagggcataatatatattttttttaatactcttcaattttttttaatgaacccaactttttaaaggattaacaacttatcattgatcatttctatgtcaattcccaaaa

SEQ ID NO: 125689 - DNA, 1878 bp, Cannabis sativa
agagaaagggagacagaaaaaaaagttactcaaaaagttttgcgatactttcctttaattttgagactgaagaggttatacagttcaagacactcggcagaggacaggcgatggcactactctaagagatctaaaaagggtggcatgcttaggcaccctgcagatgcacaagagtggaagtagttttacagacgccaatggagggtcttccctaggaggcaagctagagctgattgttcagatccaataggatgtttatgtcgacctggccagctgtagtggccagattcatggtgcttgctgagatggaaggattgaccacatctgaagtgtttgtggaaattccagttgtgactggaacatgaacatcaagatctatagtcaaggggtcttgagggagacccgatgaggtagaggctgtagccaaagttctcttcctattaaccatatcatttgatcagattacttgagtttgacttgttctcaatagaagcaccaaactgttgacctcagatttggccaaccaataatggagtcgaatgtaatactgatgcttaccacatgtcacacaattagaactataaagtaaataaacacagaattttatataggttctgttcccttagttagcggttaatgacctactccctttttagttatattgatacagagagataatgctacttagattactatggtgatgggaaggttacaatgtaggaatcagagttgaaaattctcaagtatgagtacaacaagtgggtgtgagagagagagagagggaggtgagttatgagacttagagcttcagacttaatggcttagggttttagtgtttaagtaaggctctttacatagtagagcttacacccttcaaattccttaaaaataggtaaaataaactataattacatattaaaatagtaaaatataaatgattgaaatgccccttaaaaatagttattttttctcaatttttgtgggctattaaagccaaatttacagtctggcttgctatccacgtgtgaagctgtgcaccaatgcatttgcaggatgcatgttggccgcccatgagacgtctagaacctgactggcctatgctggccatagggccagccaagggtggctggttcatcatttcgttatcccacttgagtgtttggactcctcattggttgtagtgctgagtagatgactaggccttcttgttgacgagctatcctaccacgtggcacaaatgttggccacgtagacatgccacgtcaggtaagcaaaaattgggataacaataatatttatcaaattaaaattgaaaaccattaaaggaagaaattaaagaagaaaagaagaaacactcttgaaaaagcttccaatcttcataatccctaccctcccaatgcttttttgagctttttagagatagaaaacttataaaaatcacacttaaagatatttatatagtaattctatagttgctaggataaaaaacagctttgcccctttaaaactgaattctcctgacctatatgggcattatcacagtggcccttcatttgggcaccacgactctaattcaagctgtgtacaaaatttttattttgaaatccaatcgggaaaattgatggtattttagccataactctctcaatatatctcagaataaaaaaattcaagatgttgtggatacctagaaagatgtagaacttgtattcacaatgtttttaaataaatttaataaatcattgtcaaaaattagcttgaaattttagacttaattttttatcactgttaggatatttttagcctattatttatgttatttttaaagttaattttcttctttattatcattttttagaatagaattatgcttatttt

SEQ ID NO: 125690 - DNA, 1277 bp, Cannabis sativa
tatttttggtgacatttaaaaaatgttattaaattctaagttttgaaattgtaatacatttagttacatttttatgctaaatgtcattaaaatattatttttgtaacattttttttagcaaatgtcagcatatcaaatgtcacttatatataattttgtaacataaataattattattctattattttataagacaatacacactttaattattttagtgctaaaaatatggtattgttacagttatacttgtttttaatatttatgtgaaataagtaatttaaatcttatttttaaaaatataaactattctaatttttttagaaaaaaaaatagttacataatattttaaatgagcatatatacaatataaaataaaatttataataaaatcataactatataaatataatggagacgcgagtgtacctatttttggaccctatatatatcaccctgtatatatatactaaaacctaattatatatattggaaaattatgtggtgcacctatatagaccctaattatatatatgaaattttgttggtacacttaaaaataaaaaattgcattaatattttaattagtgataattttttttttctttaatagtataaatatataaagttaaattatatttttggtataagaatggatacaaaatttatcaaaagattgtataacattataaatgtgcatcttcagttacactctcttcattttcttaaaaataatttgttaatatagtttatgattaagaatttataattgtcttacaaatatttacttaattagctaaattagtcgaaattttataaatatgttttttttgtaaaaacttttaaatagtaccaaatcagttctacattattagaaaactatataaaacataatgaaatacaattaataaagctattagaaatatctactataatttgaatagtttttcaaaaaaaaaaagaaaaataaatttgaagaacaaaactccacaaagttattcataaaaagaaaaaaaatgtgtattatactttataattatgttataaataatttaatcttaagtttgtattatcttattttaaataatattacaagacactttttttttccaaatatatataaatataaaaatatatttgtatgcattatgatttgatatataaaaatagagctttttaaattgtaatttcttttaatattatgtgtacctaaagtgatggggtatttgtcattttttatggcgtgcttgcttaggatgtcttcctactaaggttca

SEQ ID NO: 125691 - DNA, 1292 bp, Cannabis sativa
ttttgaagtgtaaaaatgaaataaccttttatatatatatatataattcacttatttgagaaaaatataaatttttattaataagtaaattggacaaaattcattagataaacatatatctcataaagcagaatcaacaataatagatttacgaaaccatttaaaataaaaataaagaaaactctaacaacctcaactaaagattcaataaacctctaataattaagtatcaaaaagatatgaagaaaactaagtttttaaaccaaatgaacatatgacataatcaccaactatgacgccccatccaaaaaaattgaataccacaaaatacaggaccaatagacagatctagttgagaaatagaaagatatcactcttgttgaggcgaattgatccaatcaatgaaacatcgacgcaccaataaagagaaaactctactacattcaccaaaatcatattaatctctactaatctagcagagcagtgacgaaacaccattattataataatttaacaaagataaattagcattaaaagaaaaaccaaaacaattgaatcaattaaaactaagcacaaggggcacaacaaaaacaaaccaagcatcaaacttctgtcgaacatcacaaaactcctaaggaacccctgaaccgatagtcaccacacccttgaacagagaataccaagaaggaattatgccacagaaccataaagcccgacctacgactagacaccaagctcgtgcccaaagcccaacattggactcggactctctagatccccaaactagctgaaccccaagctagatcccaaaaactagctcaacccacaaccatcgaaccacctccatgaaaatagttttgtcaatcgtgtcatgagaagctagacattccctttagaaaaatcaagcccgtagcgatcataacccgaagtgagaagtgggaaacccatcatttcaggtccataggataaagatgattctaaaccattgtaaatttgggcaaggaagacaggacaactttcaaaagggtggcctatgattccacattcaaaacaacaattcgggagacgctcataacgaaatttcacccaaaattcctccttgagttagggctgtttaaataaatttacaaactgcccaactcaaataaaccgtccaaactaaactgaataaattgacaaaaaatacaacccgagtaactttacaaagaattcaaaccgcctaatgaatatactgggcgggatgagatgaatattattctaacccgcccaaataatccgaataaactgattta

SEQ ID NO: 125692 - DNA, 1372 bp, Cannabis sativa
gggcataaaacccaacaaaagccattgggaattactctcaaaacaacaactttgtgttcaaaaggagggggtcgaagaaatagtggttttaatcagcaacaacatgggttctatcagtagagaaatcagaaccaaacgcagaatcaacagcaatcacaacaacaaggctctagtgggggttctagtcttcaaacagatttattactacagtttatgagggagattagatcatccattaaagccttagagaatcagatggggcagttggcaactcaaatagcaacccgtcctcagggaaacttgcctagcacaatagaggtcaacccaaaaaaaaactgctaggcaattaccctgagaagcgggaagaagtatgaagggcctaatgggggacaaccagtggaagaagaggttcaggatcaaccggttactttgtaatctcatttgatatataatagaaagactcaaccagtttcattgttgagtcacattcattcattcgttcaccttctctatttttctctcaagagttcagtttgtctaatgtggacggaaattcagaggacacaatttgatacatgttaaaatttagggatacaattaagtacatgttgattattaaagttagagaacacgatttgggtatatggacaatcgtcacattctaattccatgaacgaaattggatgaaaatctttaaatccaacaattttaatagtttaattttaacgaattgaaaagtttaggtgacacaactttagtatatttttggagataaaaaatcctaaattttaccttatgattcattcatgctatattggtttggcacaaccatgtttgaaactagtcatcttcaataaactatgtcattgacttagaaaaagaaaaaggaaaaaccttatgaaaaacaaaccatacgagtttcattaaattaatgttataataaaatagtatattgttgtgtcacatgaaaatgattacttgttttaataattcaatacataatattttttttttaaaagcaattcaatacattacaaattctttgttaaacaagaagcattataaattgtcccccaaaaaaagatgaaaataaaaaataaaacttcaattcaactagtttgagagtgtccttaaaaaaaaaaaaactagtttgagagtggggtccaaatctatatgtaacaaaaaaaggctaactttaaacctctctccatgcagcccatgaggatttttctattttatttttatatatatattttgataagtctactttatacatcttacaattttttattgttagataaattaacaattaacccaagatctatttgtatataacatagaacacaataataagatataataattaggtatg

SEQ ID NO: 125693 - DNA, 746 bp, Cannabis sativa
tatcaagtttatcaaatatccaagcccccaactatatttttagtttacaaaaaaataaaaacccaacataaataataatgataaaaaactatcctgtataccaaatcaacgaccacaatcaacacgattgccataattttagccatgagagaataataataataattttacataatttcattcaaattttctaaaatctaaaataaatgtattagtggttgaattaaagatacatctgactcaaaaatttaatcagttattatatatatcaatgagaaaattgagaatggatttttattgattttccgtattaataaaattgagagatgtggaatttatattattttagtgtatatataattttgagaataatatatattatatactatagtattggtccataattggggattttaacttagtgagctaattattacaatgatataatgtggacttataaattttggaaggtgatgcatttcatcatatattgacttttgatttatattattatgaagagaaattaatgctaatattttgtgatgtgtaataatttaatattaaatttcacttattttattttaaaaatattattaaaaatcgctaattataagagaattctttgaagtaatgctttattattaatcattttcactaaatagaaactacacttcaaactagttattactgccacaatcttaaattttatgtctctagaggcttatatatttatatataaaatatac

SEQ ID NO: 125694 - DNA, 757 bp, Cannabis sativa
tttaccatatcatcatatcttttatgatatgggaaaatgttagtattctttataagtatatattgtaaagtctcatgtaaaaaaagaatacatatgtagtaaagattaaaaatcatgtgatttttgctatgtgtgtgtattattaggaatgtattttattttgcattgcactaattattaaaaacataactaaatcatactaagtattaaatttaatctgctctgcttttaaattttaatctaaattttccaaaataataatctaaatatatattaaaacatgtatttaattccttttcaagaaaacatgcatttaatgatgtaattatttcatattttttatttttgaaaaaaaaaagtgtatttattaaaatatgagatttattatttattacacccaaaaatgaaaaaaagaaataacaataaaacattaactgaaagaaacctaaaagaataagacccatttaacacactttttggaaaaattaaaagttgctttttgaaaaaactgtgataaaaaatatttagtaaacaattcaaaaacaacttattgaaaatttatagaaaaactatagttaaagttggtgcatgccaactttttgaaaatattttttagattaaaatataataaatttatttgtataaaaattatattttcttatttattatatattaaaaaaaggttaaatagcggtataagtacccaaagttttaagtttgtaagtggcataatctcaatgtttatttttagcggcat

SEQ ID NO: 125695 - DNA, 1787 bp, Cannabis sativa
  modified_base (1220)..(1225): a, c, t, g, unknown or other
  modified_base (1316)..(1319): a, c, t, g, unknown or other
gtaaaaagtgaaataggttgaaggatttttttagaaaaaaaatggctacacttattatcgattgactagcttgagacctcatacttagttcatctaattgtaaaacactataattgtaattaactattttcttaaaaccccataattattagttactaattcatattaatcaaataccatttgacatgtcacactataattgatgaaatatatataacatgaaattctacatattttaattgaaaataaataatatagaatttcaatcaagatataatacaaaaaaggtagagaaaaaatatgagaaatatatagagcattaaattatcaaagagagaaaattctcaatatagtattatattatattatacatatatgtgaagtaaaaacatgaaagtgctattttaatttacaataagctcttctttcattctatattaatttttttcctttcttttaaattgttattttattagctcattcttttcaagcaaatagtatgcatatatatatatgcatgcatgttatatatgtatacaataagaatattttgcttttactccatttctatcttgatttataacaagaaaatttcgtgtagactagactatatcctatatattccaaataataaacttttttttttttttaatttgtacattacttgataaattcaattattaaacccacctaacccaaagagtgatgatattttcaatctgccacttgccaatatgactccccctgaaaactacttcatacttgaaaataaaaaaacttataaattatatgtataatacaataaatgtggacaaaatatattggattagagaaaatattgatgactatatgtcacatcaaatataataatgtgttgttaatgtattagttttaaaaaatatgtttcattttaattatattgagtgttatatataatttctttttttaaataaaccgtacgttttaattgtaagatgtatatggttaggatttttttaggttttttttaatcatatattttaagagaaattttatttccatctcaaaaatttttaaatacacttcattttaatgatttttattttatataaaatttatatatttgattatactaagttttttttttttttttaacttttttcttccaattcacattcttaaaaaatatacttctaaaataaaaataaattatatcttaaatattatgacaaaaaaattannnnnnaaaattatatgaaatttttttagaaaaaaataaaaatatagctagaaaaaattataaaaataaaatcaaaataaatattaaaattaacatnnnntaatgtgaggaaaaaattttaagagaaattatttaagtatattttttattttaataatgaggtgtatttatcattttatagggtgcaaataaaactctcatattttaaaatagaaaagaattttaaaatcatgtatattaagattataagattttatcattttttgagtacatatttattcttataaatatttattatgtatactatacattatcaaaaacatatttattatattatatatgaaggaatgataaaaatgaggcttttaatataggagatcgatcatgtgctatggctcaagttgttatatgcttgagttgaccctgtatatatggtttcatcttaaaattaattagctatgagagaagcagcttatgcattttatatatggcgttatatatttctacatgtgacagtcagtagtcccgtgatccgtaaggagaaataccgggtaagctgtgcaatccc

SEQ ID NO: 125696 - DNA, 1371 bp, Cannabis sativa
tgctaacagaatagtggttttgggggtttacccgcagaaatttgggttgtgggggtttagtgaaactaaaaccaaagtattgggggttttgccgccatttacccgaaagacatataacgcatagccgaaataaggccgcaacgtatatccagaagtcccatgtagttacccgtttcctaccaaatcacacacgattaggagttatcttcccagaattttggacaaagatcatatcttcctaaataaggaaacaaaataattggcagtcaagtaattaatacgtcattaattacccatgaagataggacacaattttcacaactagtatcgtgaggtggcatccacatcaacatacataaggcatctcatgggctgggcttcaccatataagcccaaagtcaatgtattatttgtaaattctccattagagctgggtaaaggataactagtatgacatttatgcactataagcttttaacaaaccctacatgaaaagagttagaaattcttggctcacttgcccatgcaaaaatagagtgttcatacttcaattcattgtaatccttcaagcttttctaacctctgacaataatattgactcgtggactatggttcgttaatgtcctaaccatgtaaaatctttgagtgttcgtattctattttctttgaatgatatttctttgagtcatatatttaaattattggtttctaaaatctcagtaacaattatatttactttaaaatagttttattatgatatagtattaaggattgtttattgttattgttgctacattgatattttttggtgttttgattttttttttactagtgtagctctatttagttataatctctcaattaaaatacaatttacttgatctctcaaatatattttctcaaataaaaattttactgtatcaataaaagttaatacttgttaaaataatttgcgtaggtaaatgtgtgccaattacttatatgtacatttatgtggcgggttctttttagataagttgtacttatcatataagtatgtgctaattttttttttttgtggataaatattaaaatgtatcaatggtgattagtatcttccaacatgttaaaatttactactacaaaatgagttttttccaacgattgataagatggtcaattacaaaaatcattggaataggtaagtggaggttttttcaatcggtttgacactgattaaaagaatggcttttttcatacatgtacaataaaaataacataattacaaaaaatgagcaaaaaaaatattttaaaaacttatacattttgaaaatttattatatgaaatcatacattttaatcattaaataataaaatatgtttattaaaact

SEQ ID NO: 125697 - DNA, 670 bp, Cannabis sativa
tattttgttatgacttatatatacacaattatattttactaaccaaatataatagtagtacaaatattactttaatataataaatcatttgcataattatacctttagttatagacatctaaataaaaataaagaattaaacttcaaataaaactaatatttacgtgctgaggcacgtaacttcaaactagtatatatatatatatatatatataaacattaaaaaaaaatactaaggttgtacaaaattttaaatatttttactaattttaagattttatttatataaaatacgttgttttgatatttttttttatgttgtactcttactattttggtagtgattttttgttagttgtatattatttatttatgttattttcttatttacaccaaatattaatttttctccaaattttacatatatatttcgacaataaattttttatatttacacttttcctatttaattttttttttcttttttactatttttacttatgaaagcttcaaaaaaaaaaaaaattctttctcctttatatctttttttaagtcaattttggctaactttttttttttaaaatcagttgctacatttctctctctctctctctcctgtttttttttcttataaatatatatgtactagcaaaaagttacgtgcgaggca

SEQ ID NO: 125698 - DNA, 1321 bp, Cannabis sativa
  modified_base (43)..(45): a, c, t, g, unknown or other
  modified_base (86)..(118): a, c, t, g, unknown or other
ttaatagaatttatacatttaacataatcatgaaataaatcannngaaccatgcaacatagaatgatttatgatctttattaattnnnnnnnnnnnnnnnnnnnnnnnnnnnnnnnnntagggcacaaaacccaacaccaggctgctggttgccagagtctggctgctcccgccaccagatctgtgtggcaagacttatccacctttaggaaggggaggtctgacctggttcttacagaacttggttggactgtttgtctgtaaaccatccctgatctgttgactagtctcccttagagaggatctctgatcagatcctgacctctcccgttagttctttcattggagaggatctctgttgtggcagtctagctccacctgatgagatcgaaggatgtactcctggtcatccatccatctcagaaatttgtatctctattgtgcaaattcattgcagccaacaacgcattgttcttcagtttggccaacttagtagacagcctctctaagtttggccaatttgaaatcttctcccaaatccaagtgaggttcgccaatgggtggctcgccaatttctgaccctatttccctagcatagtatcggggaccaaagtcaattgtggtgcccaggggtggctccatgttggccatatcctcagtacaaggtgccaatggcagatctaccctgggcagcagaggctggtcattgggatcatctgggttggtagtgtcaacttgaccagttgtattggtcaagtttgttttgcttgtcggtttggtagggttggccacatctgtcaaattttcggagattctagtggtggctgaaacacgaacattaggtttgcagtcatagggtcttgagggagacccgatgaggaggagttgtatccgaagttctccttgttacaataattgtgatagatcagatcaattgataacgatctcaatgaaagcaccaaattattgacctgagatttgtccaaccgacagcggagttttgtttataactgatatcaccacgtgtaaacaataagaacaagttgataaagagacacactaattttatagagttttggcctccttggttagcatgtaatgacctactccctttttggttgtattgataccagagattatactactcagatcacaagttttgtggattctaaagtggctctcttaagattccaataatgagaatcaagaggcaaatgttaagtaagagagatgagagagacttagtctcttctacaatgtctgggcatgtagaagagagagagagatatacatatatatatgtatagagagagagagagag

SEQ ID NO: 125699 - DNA, 1151 bp, Cannabis sativa
gaagttagaagagaagagaaaagagaagggtataatgtgtatgaatataaagtgtgcctattttttttaattttagtaagcttgtgttcaattatttaatatacaccaaatgtatgcatataaattcaaatttcccatagcgaaaaacactatgtttggataaaactttgtattgtattaattattacgaccataaattttagagtaaatattattttggaccatgtgttttgcaaaaattaccgattggaccctctattttattaaataacaaaatagatcctatatttctaatatggtaaaaataggacattgagctcaattttgataatttttttaatataaccaacttgaagacaatttgtagcacgaacagataaaaaaaaatgtacaagtgttgtcataacatctcgtaatcgaattattattgagttttattttgataaaaattcagttcatggtcatatttgtactatttgagaaaataaaaggtttattttgtcatttaacaaaacaaatggtcaagttggtaatttttagaaaatacagggtccaaaatgatatttatcatattttttaatacaatgtgaatcatattatttaatacataacaaatgacatgtattaacttgtattataatatttagaaactgtttagggttggggactcagaccctggcttcgaacttggaccagaccccaaatctcgaacacagacccaaacccagaccctatacccggacctcaaatcctaattcagaccaaaacccagttccaaacctggacccggacctgaacttggtctcagacttagaccctgaccccaaccttggtctctagactaggggtgagcataaaatctaaaaaaccaaaaaagtcgttcaaactgacctaccgaacaccgttggaatcgaaatcgaagaaactgaaaactaaaaaaaccgctaatggttaaaaccgccattgaacggttggtttttttttttgtaataaactgaccgaaaaaatcaaaaccgaccgtgatacatatatattaagttattaagctcttcttttgcatgtattatagttactaataatatataaaaataatatattattttttttattaatattaaagttaaaagaataagataattagtttttgaaca

SEQ ID NO: 125700 - DNA, 533 bp, Cannabis sativa
atcatcattctaattgttagattacaagtcttcatataaaacctgtagagactcatccattagatcaagactcaagaccaaagacattctaactcagattacaaatttaaagactctaacaaaccacctgaacctttataactttctacttcaagtaaaaggctcatctctatatataataaaaaaaattcagtagctcaatacctagaaatgttagagacattactactaaaaaggctttttgtttcgatttttaagtgacatttaaaaatttgcgtctgttagtttaatcgatgatgtagccgaagatgtaaatactgttatttttgcttaactttgtaatcgaagccaaaagttttttgattcatttgataatcgacgccaaaagtaatgcacattttgcgatggttattaattgaagcatacaactttttgtcatttaataactgacacaaactacatattaaaaaaatataaagatggttaaagaatatttaagacggttcgacgcactaccccaaacttgtcatccc

SEQ ID NO: 125701 - DNA, 2946 bp, Cannabis sativa
  modified_base (2900)..(2921): a, c, t, g, unknown or other
atcatctccctctttttctagttgtaacttttctaatgttagcaggaattgtaattttgttgcccataatgtggctgggcgtttacccaccaactgtacggttctattttgttatcccctgttccggaggaactactgtgtaatgaccgtgaggtctaacaactcttgttttattgaatgaaaacgcttatttaaaaaaaataagcttttaattggttaaataaattttgtgcttggtattactaatgaaagtttatttaatatacttaaaaaaaattgcaattttaaaaaaaatactcttttaaatatattatacaataccatcctattaatttctcactttatccaaataaacccttactatttattttttttcaaaacctaaaagaacctaaaaaaaaatctaatctctctctctctctacatcaccatcagtcgcccccataccttctagcccacttcgcccacctgagcgaagaacgaccaccctccgaccccactccacccacccgcgcgaagaactaaggacccatttgtgcgaaggtcctgtctgtcgaagattctctctccttctccttcgaagatccttctccgtccttcgctgatccttctccgtccttcactgatccttctccttgtacgaaggactcatccacccgcgcgaaggacccatctgtgcccgttcctcaaccatcagagtctgtcttctgtccgattcacctcccatcttgttggatctgcctcattctttaaaagaaaggtattgttcaaaaaaagaaagttttttgttggttaattttttgtagttgatttagagtgattatatattgtttgtgttaaaatacacttagttttgatgatttttttttttttttaatttttagtcgattttatatggtgtttatggtattttctgatctagtgtggtggtggttgaggaaaatgaaaatggtgtatgttctcgattatttgtcaaaaaaatctcgataggttatcgataagatttagcttttggtgatggtcgttgaagatagctattgtcaataggttatcgatatgttgtagacaggttctctatcgatatgttggtgatggtgttaattctcgcttgaatatcgattaattatcgacaggttgtcgataagagtgatagtcattaagtttagctattatcgaaatattctcgacagttgaatcattgcaaagaaaatataattttgttttttattgattctcacttaaatatcgattaattattgacgagttgtcaataggctttcgatatgattgagaattttttttcgctaagttggttatcattgctggattatcgatggattatcgacagaatatcaatatgttcttgacaagttatagtttttaacttattttgcacaaagttagaatttttaatattatttataaattatcgacaggattgtcgatatgaataaatgctcatcaactaaagcaattttatttttgatcttgttgtttttataggtatgcttaatatttggtgattcaagaacccaaatcaacttaattggattatgtaggtattattctataattttaatttatttaatatataatcaatattaaaagagtttgaatatcttagatattcatctgtattgaagtaagttttgcgattacttatactgcggttggatgggtggaacaatatgtctgttacatgagtttgaatatcttaaatattcatccatatcgaaataggttttgtgattatttacactgtggtcagatggatgattatttttttattgttatgtattgtttctttttttatatagtaattcaaaatttttgggagcattaaattatagttgtgatgctgccgaaatttcggtaggagaacaactataatttttttgtcatgttggttattgttgcttgattatcgacatattctcgataggattaattaattttttagttttcatgtttggtgattgttaagtgattatcaatgggttctcagtagattctcgataggatttagtgtttttttttatcatgtttgctcttacgtgtttttttttattattgtattctttatcttttaaagatggctccagagcttattgttcccacttcagcccacttttaaggccttgtgacatatagagagagtggaatattcacttcagtcgttcaaaagtttaaaaacatgaatgattaattgatatgatgaatcgaacccctttcggccaattttgaaaggctaaaactttcgctttctcttcaattttggtgcaccaattaattatgtacaaaatgaaggttcaagttgagaaggcggagtggcggatgaagtatatggttttacattggcagaaacgaggcaagatttggcgtggctgagttcgctctcataaccaagttgaatttcgtgcaaggtccatccattgaggagaaggatgctcacttgggaaatgaccgattgttgaacctttatttcaataaatttgggaacgtgagattgccgaggatgtttacaagctagggttctgcttgttcatggagggagtcctcataggtcgtgagaggaatacaaatattacgagtggtatactaagttttattgaggatattaacttcttttttcaaatttcttgaggtgtgcttcttttagtcgacttatgtattctgttcagaaagacatgatgaaaatgaaggctacgttaaataagaatgaagtcactaaatcaacggggtacacaatttatggctacgcaccaacattacaatattggacctacgaggcaattttaaaaattcacttttaatcattggatacaagtacccagaatgcttagctgaagcagtaaagaaattaatggaagttattgctggaatttattttaccaggatcnnnnnnnnnnnnnnnnnnnnnnttattaacatcctaaataagaactt

SEQ ID NO: 125702 - DNA, 818 bp, Cannabis sativa
tttttcaacttattcgtaaaataattactttgaatttatggtattaaaatatatagaaaatagtggagcacttacaacaattgaagtaaaatagatatagttaaaatatagctacaaacaccaaaaacatacctccatctgataaggtaaaatgcataataaatttaggtaagcaaaaatagcaagctacatataagttataacttataaccatagtgaaactttacattattacatatcttgtgaaaatattatattattatagtatctttttaaaagattatatgttccaatatattatctctttcattctgtcaatgtatatatactttttaatattttttatttcaaatcatattttttgaattgttttaagtcgttaaaaattcttcaagaattctacttaattttattcaagtttactaatatgatgattgtccttgtactaaattgtggcttttaaactttgatatgtactaaatcgtgctctttaaattttaacatgtactaaatcgtgattcctgaaaaaaattttgaatccaacaatcttgatagttttaaaaaaaaaaattaacggcctaaaaaattcaaaagatatgtgtacgttttttttttctttctatatcatcatgtatgtatttatatatattaatattttaataatttaattatatatcttatctatatatatataaaagaagtatagaaggatgacgtagcactctaaaatcattttaatctcactatcttttctctctttaattctctctttttcttaatttttttatttaattaataaatattaattattaattaat

SEQ ID NO: 125703 - DNA, 782 bp, Cannabis sativa
aggaaaaggtatggaacaaggcattggacaatgagatagatgcactagaagctaataacacttggattgttgttcctctcccaccaggaaaacatgtcataagcaataaatgggtgtacaaaatcaaatacaacccatatagttctgttgagcgttgcaaagcaagattagtagccaaaggctacactcaacaacaaggggtcgattactttgaaacatatgcccctgtggctaaatttaatactctcaaactcttgtttgctcttgctgccattaaaaattggcaccttcaccatatggacatcaacagtgcttttctccatggtgatctccatgaagatgtctacatgaagcttcctcaaggatacacacctgaagcaccaattccaaaaaatgcagtgtgtaaactacagaaaatcctttatggcctaaagcaggcctcaaggcagtggtatgctaaccttagcaccactttactccaacaacaattcacccactctaaaaatgatcactctatgttgatgacatcattattgcaaccaacaaccttgaagaattgcaacactttacatcaacacttgattcccatttcaaacccaaggaccttagaagtttacacttcttcccaggccttgaaattgctagaaataacaaaggcatctctgtcactcatatgccttttactttgaaattactgttaggctatttttagcctacgttttgggtcactttttatagttattttccttctttgttattctttttggaatagaattatgctt

SEQ ID NO: 125704 - DNA, 709 bp, Cannabis sativa
tatgccactaaaaaaaatcattgggtttatgccgcttacaaactcaaaactttgggtatttatgccgctatttacccttatttatattgcaactcttaacttaaaagacttgattttcatgtaaacaaaaaaatattataactcatttggatctttacatttatataaaagcatatttaagagtaataactccacgagctattttttgtattgataatgagtagctacttaatgaatattggtgaaaaaattgtgatgaagaagtattgctgattaatttttgttgtgactaaaaaagtattagtgacaaattttagttgtgactaaagaaatattagtgacaacaaaagttgtcacaaaataaataaattgtggctaaaggattgttgtgactaattgtaaatttgtaatgacatcttaacaattattagtcatgaagattagttgtgactaaaagtgacttttagtgaacgcttattgttattgtggctaaaactttatcacaaaaaaaaaattgtgactaaaacttttaatcacaacttttttcatttttagtcacaattattgttgtgactaaaagtccaattttttgtagtgatttattggtctcggttggtttgggttgtacataaaatataatataaagggtaaatagcagcataagtacccaaaattttaaatttgtaagcgacataaacccaatgtttat

SEQ ID NO: 125705 - DNA, 502 bp, Cannabis sativa
tcctcaacgacttatttgatgagcatgatcgtgatttgatactcaacattccaactaatcttactcaaacatgtgatcactttgtttggtcttgtgagatttcgggtttgtatagtgtcaaaagtgcttataatctcattcagaagcaacgcggggagtgggatgattcagaaagttttttgttttagaagaaaatttggagtttaaaagttcctccaaaagttaagaatttactctagagggcgggtatggcttgtcttccaacattgacacaactgaagactaagcacttggatgtctcctctctttgtcccctctgtcatagttcggatgagactattgtgcactgcctgattacttgtcagatagttcaactggtatggaacagagtgggaattggaacaagttgctcaacaggtacatcttttctcaattggtgtatggattgttttaaggtgttggatatcgagcagaaatgcttgttggtcactctttgttgggc

SEQ ID NO: 125706 - DNA, 1153 bp, Cannabis sativa
  modified_base (1103)..(1105): a, c, t, g, unknown or other
agtgcaaaatttgggataacaatccttttaaataaatatggcatctgtgaactgatctagggttgtaactgtttgagccttagagatttattgtaactaattttgttactgtctgtatcttgattcttatagagaatgtctttcttactgtctttatgacttgtgtttcttttctgttgtatgttgtaatttgttaagggtagatctataatttcataccaaggatttgcttctgaaacttatgttatattaggggatctaattttaatatctacgattaacactctcactcaattatttgaccaagttcccaaaataaaagtattagctagtgtatagggtaagcttgtaacgaaaaaatcaaattactcaaaatagtagaattagcttaaagcttaatcatctcaggtttcagatcaaattaatctatgataaactaagtgatattaccttagaatagttatagcagtaagattatgataactattctatttgtcaatatcggtctcgttctgatgtaatccctatacatccagttacaattttattttgtcaatatccttgaaaagaaactcatgaactcaggttgcattattgtaaggttcggttttagattaaggttggtgtttgagctaaggttggagtcgaatgtatgaatctcctaagttggggttaggcttagggttaagggtcgagttatgaggttggtgttcgtgtctggggttagagtcagggtcggggtcaaggtacatggttggaatcctaaattaggattaagtttgaggctagggttcgaagttgtggttgaggtcgaggttgggtaagggtttgcgtatggtctaggtgtgaggttgtgtttagatctaggattaggattgggtttagggttggagcaaggacgatgtatgagatcgaattccaaggaagcggtcaaggttatgttcagggtctaagtattggtctaagttcgagtttttttgggtcttgaagtcagggtttggagttcgagtctaggtgtgggtgtcagggtgtaactatcagggtgtcttgttaggttaattttagtatattttttatgtagttttaatcgtgtttggagcatnnntacgcttgttatcttttatttttccagatttaaaatagaagaagatta

SEQ ID NO: 125707 - DNA, 1546 bp, Cannabis sativa
aaaataataatgtatatcttaatatttttctaatactatatacagctattcatattagtatttttcaatacatgtaaaaaataataaaactcatatttattaagctttactgtccatttattttagcatcctctagggaaaatcaaattaaaattttccaattcattattaatgtcccctatctccgacggaattctcacattgataatttatacaatcaagctatattattttatatatctatttatagtaaaaaaatcatacttataatcaatataatctaattaaaattaactaatataatcacaatcaaattcgacttaattctttcttatttattatctatatagatgggttggaataccaacatcataaccaatactaaaaccttataattattttagcaattcaatttactaaaaaactattcatatttgtatctatctgtacaatgaaaaactaataaattcaatactcattaacctttactacctattttttcagtaattcccaataatagaataaaataaaaaatatcatcaattcactattaatatccccacctcccattgattaagaaatctccacatttataatttttacaccaaaataatattatgttatatatagtgaaactcatatttattgtcaatatagattcctataaatggaattaaaaagaactaattaatataatcagaattcaatttgagtattatgacttaatatttccttatttactgtttatatagatagattggaacaccaacaccataactaatagtaaggccattccaatttgagtattatgacttaatgtttccttatttactgtttataactgaagccaaaaaaccaatcagcgtcgcttcacacctgaagcaaaaaaattagtatttacgtctacggttatatcgtcggttacactaattaccaaagcaaattttttatatgtcacttaaaaattgaagcaaaaagttttttttgtagtagtgaaaattgattatcaacctaagaagttaattttgattgttagataatcatctatggttaaaattatcctatttagatttttgttttcatatgttgaattatgatttcctattcttatgagcctctttaacctataaaaggagagttcccttagttctttttcacattcaaaaaactactcacaaggtctgagaatctctctatagtttctctctctaaaaactagagcttgaaacacttagcctatttctataattgtcatctcgtgagaaattaaaactcaaggtagacgtagctcaattactgtcaagatacagagagtgaactactataaatttattgtttctcttttataaatacttaacaaatatttcaatcttgctaatctagcgagcaggtgtagcttagaagtctcagtccagatttttgagtcaataatacttggtggtggtggtggagaagggtttgagagagatggcagaagaaggttgaagagctgagagtaaaaataggaaaaatgggtcggtgggggtatttatagacttattagtgg

SEQ ID NO: 125708 - DNA, 965 bp, Cannabis sativa
  modified_base (61)..(63): a, c, t, g, unknown or other
  modified_base (913)..(935): a, c, t, g, unknown or other
atctcaaaaccaattggcaataagtggagtagcccatgttcttatatatggctcaattctnnnccatttattctatgtgggacaatgcccacaacacaatgtaagtaatagtatgcaaaaaatcctcttataaacaagtattcctattcttccacaaactgcatatacaagatgccaaaactgcataaaaaaatcttcattctatggctaggactcttgatgaatagccatctcttccaagcttcatatatagttcaaatgccaagcttttactcccaattaatcaaaaatcttagccacaaccattttagagacaatacaattaaaaaataagtattagtggctctccttattaatgttacaaattgggcagttcaacatgtttagctctatatggaatcttaaatattgatccttagtcaataaatgagcattaacaatttgccataaaaaaaaacctgtgtttaggaagactgggcctactccaaactgcaaggttgtaggtgactactccttatttcaaaagacaattatacaacaatgaagctcaaaatttacccgtctttccaactacaatcatgtcagttttgctaaatttaactcttaaatgacatagtttgtgtcaataccaactggtgtcattaataagagtgtagtcccaaaagttagcaccctttaagtacaacacatttacccacttgacctagagaaggtcatgttttttcatgacagctcaaacatacttcgagagacttgccctgttccaatcagccccattttgaaatccaagccctccatgggactttggtaaacacactttatcccaagaagccatatgcaacttacttctattgcctttaacaccccaaaggatgttggaatatattttaccaggacctagatttactaacannnnnnnnnnnnnnnnnnnnnnnatgaatttctaaaacaataaaaaataaact

SEQ ID NO: 125709 - DNA, 655 bp, Cannabis sativa
tttagtcacaatataggaataatagtttataattagtcacaattttttcacttttaatcacaaattttattgtgactaaaagtaaaaaattttgtagtgacacttataaatatgtatagtaaaattttgaaattaatacactaataatttagttaatattttaaagtaatatgtaactgacactttaaatttacaaatgaaaaataaataaaacatataagaagtttaagtgcaaattccactaattaatatgaagttggatgaccaaccatcaagttttgttttgtttttgtttttgtattttcaattgcgtgaacattaaccaacttggtatatgtgtgatacaatgagtggtgatgagccggcttacaattgctacccaattgctacccatatatatatataaatatatatataatatcatacttgactttgaaaaatagcacatacacatatacatgacacatataagagatgtatgatcattatgataattttttatatacgagatatcatcatatttgatgataattatatttagagaagttaatgctacaatttcattttcattttattataaaattaaacaatgtaaatttccctataatatgtgttggaaatattatgcatgtattcgtttttttttttttttttt

SEQ ID NO: 125710 - DNA, 797 bp, Cannabis sativa
  modified_base (756)..(764): a, c, t, g, unknown or other
aatcatgaaataaatcatatgaatcatgcaacataaaatgattctgatcttttattaattagtaaatatgattatattgaaataatttttatctagggcacacaacccaacaactaaccgaatggaagtcaaagcaatcgatcaaaacaccacgtggatggtacctatgatcaaatatctaactaccagagagctaccttactatgccataaaagtattataatcatttttcttgagctaatagtaggcacagtgatgctcttggtgcggctctgatccaactttcaattgctccaagttggtcttggtcccctatggacagccaaaagttgattatgaacgctatccggatgggaaacccaaaaatgggaacggtgtggtgcttggtgatcatgaggggatgaatcttctctctaccatatagcattctatctctttgatttcacctacgatagtcgaagcaatgtatatccttaatccttcaggaactgagatttttcaaaataatagagggattcgtaactatttaacaattatttttaatgattgatatcgacaagtgaattgcaacacaccattgcagggcttcaagaatagatttagcttcgacaatcgttggagaaattctttaattttgtggtgaaatcaatctagctgtccttgactattgctaatggcagcacccacgctaattggcatatgattaagagttgtatctgtatttaacttgtaatatctgttggaaatattttaccnnnnnnnnnatttactaacaattatgtttcattaacatccta

SEQ ID NO: 125711 - DNA, 1337 bp, Cannabis sativa
  modified_base (1296)..(1307): a, c, t, g, unknown or other
ttgagtatgaagcgattcattggttttactcaccggatctcatagcctctagttttaaagtagtgtctcctactacctccttcagtttgagtggcaggtccctttccccttacagggtctcagggcctagtgtcatgagattgtcgagaagcacttggtggaggagtctgttggttctcttagtgtcgcaaggtcgttcaacatcaggtggaagacccattggttggtgcccacaagctttagtcctttcgggctcttgctcgaaggtactctccttctgggagttctccacgcctagtgttttcttagtgcatgctcggttacgaggtgtggtagtggcattctgagcattaagggtttcaacttgagcactagtttccacgtgaccagttgatcgatgaggagtctctctcaccaactcaaaaagacccctacagggagtagttccatgatttgagtgataaggttctctaatccattgagacatgttagctctatgatgttctttctcaacgcgttggctttcaatgttcctccagttttccacgaaccaatattgaaattgttcatcttgattatcaatagagtcttgtaggtgttgttgcaagttagccacagtctggctgagctgggtgacctgaggattggcctcgtcaaggtcatcaattccactgaggctcctcaggtgagacctggacattggtgccaatctcaggagcatttggtggccttggaacaagagctgaggagccggtttcgaggcctgctcctggcacctgtagtgcaagagtagtctcagtgccaactccatcaactagcatgcacccaattgattggccagttgttgggattcctctatcaacacttgtagaatgtgttacaaccatctgggcagtacgtttcttgagttgtagctctcgattaaagcaccaaaatattgattcacaaatctagtctagacttctaagccacatttgctcgctagattgccaagaataaaaaagtacttaagtaattataagtgttatccaattttttgcactatgacgtggcagcacatgctagtgacacgtggacctgattccccatatctgcccgagagagatgctccgagcagggcacaacatacacatgcacgaatgatgtctttccagctgagcagtggataattcgagcagcgcatcaacacttagcaattcaaaaatttgcattgtgaagcacaagagtaatctctatcgatctgggatcgtgtcacaaagatatagcaagctgtccaaatcccacaatctgtgtatnnnnnnnnnnnntatatgttcttaccaattatagacattgta

SEQ ID NO: 125712 - DNA, 759 bp, Cannabis sativa
tattttttattataaaaatacacatgattttaagtgtccatattcattgttcgaactagaaatatttaggaatatttatggtaatactactcaaattttaatttttcttacaactttctaaattttagttgtatttggattttttttttttcaagaaattatgtaattttattgatagtaatctgcaataattaggatatctactccattgaaatataattagaatttaaaaaaataaaataactaatttgtgacctgattctcgaatctttttttttaaaaaataaaataaaataaagtcatatgaaaaaaattgtagcagcttttctttcaaatgggtaaaaacttacttatttatttggtatcttgtattttattaaaatacaaacttagtaccttatgtttataataataatcacttggtaccctttatttacaaataatacacacttgataccctctttttaaatttagtagatataaatttatagtatgactaaattaccccttattttaatatttttattttgatttaaattattttaaaatattatctgattatattaaaataaaaaatcaaaaataaaattctataggattcaacttttacaacaacaacaatttacatttttttcaactacaaatacaacactctcccactaaacttagagattctcaacacttctcttttttttttcataacttaataacaaaatatataagtaataataataataaaaaagaagcgtgacttttatc

SEQ ID NO: 125713 - DNA, 1723 bp, Cannabis sativa
  modified_base (444)..(449): a, c, t, g, unknown or other
  modified_base (1690)..(1693): a, c, t, g, unknown or other
agtattttcattaatagaacccattttgatgatatgattattattaatactattgatcaaaagaaaaactcacacaaatatttctatgcttataacttacaacttcttagctagtttatatagcactttgtgtggatttaattttattataaaattatcaaaattgaataaaaaaatgagaattaatttgaataaaagactttctcccatctctaagaagttttatttgtatttaaggaaaatgacaactatatagaggtgcttcatgttagtgtcaacccctatattatatttctcgatcttcagacttattccaaattaaaaaataatatttagatatatattgtcactaattttattgagaaatattaaaggacatcagtggtgcctagcaccctcctatgtatctattggttcaactaagtatcgggtctcatataattnnnnnnaataacttttagggagtatcgttaaccaatcgcaacgcgacatgtcgtgaaagtgttaggcaccagtgatgcctaatagcaatgctcaactttattttagtgactcacacaataaatgttgtacttaaaagcaaatttagtgataacaaactattatttttgtgattaacattttagccatgagttttttaataataatataggaataataatttatgtttacttgtaatttttttacttttagttataaattttgttgtaattaaaaatattattttttgtattattatatattaatatataaatattattcatataaaatatttcttgaccacttgcactaattacatatttttctttttccatagattctgatcttcaaaatcttggtgaactatgcatccaaataaatatttaattgagataattatataaaatattattttttgtaaattttttatagttttacgttcaaatatttttttttatatttttacggtgctctataaaacaatacgaaaacaacaaaaaattacatcaaaataacatcaaaacaacaacaaaaaataacattcaaataacaacaaattaacaatagtacaacataaaaatatattaaaagaccgtattttctgtaaataaaataataaaaattgtaaaaaatatttaaaactccgtacaaccgtatttttataatttttttattatttttgtgtatctgtgaaataattcctatttaattttcatattattatttttattattttaaagcaagtgcattagccggcattggttacataaaaaattgataataatttaatgatgtgataaatgaggtagctgagaaatatctcatttaataattttcataatggttctttgcaacgttatcattattttaattgaatgtgtaatcaattgtgttccatgtggagatgtacatttattatagaataattaaaattaaataaaaaaatttaactgacaactaagagctgtacattatgttaaaattgtactatgatcagatagattatgatcagatagattaataaaaaaacaaaaaaaaaaaaaaaaactttataaaattaagtaagatataatatatggttctaataatagtgtgtttaacttataagattagacaataagaaaaaggaatagacttaggtggcgtttggtaacacttttttaattagttttttgtttttaaaagtgaaaaagtgaaaatatttttcaannnnatgttctataaaactgttttcacttttcaa

SEQ ID NO: 125714 - DNA, 634 bp, Cannabis sativa
ggggtttcatcttcaaaacctcgtgttttctaagtattaatcaagatctttgtgagtttaaagaaaaggtaaaccctagaacccttgactatgtgtttttagagttttgagtttgtttgagtatgcggatttgaaaattaggggctgttaggatttgatttgtgtttgcttcgaattgtgagctttatttatattgattctaagctctgaatattatttttgatgtatggtaatataattgagcaagcttgacctttgaaactcaagtttaagtctttaatggcatgtttggtttctgtgtgtttttttttgggattttcttgttggaatatattgtgtatctcctatttaggtactgtgaaaagtttggaggtaattggacaagttttgagcaaattggagattttttagggaagactggtagaaaccggttaaccgatttaccaatacctataaaaccggttaactggttttggcaagttccccaaaaaaactagttttctcaattttcgtccattacagtgcctttgatgggtgtttccctatttcctaagttaatgtaatccctagagagtataacagagccttgagttgtagactcaggtttcccgaattagggttttagacatgtgat

SEQ ID NO: 125715 - DNA, 695 bp, Cannabis sativa
ttgtaaggtgtatttaattataatcaatatatccaccttattgatagctcatacactgtctgaataaaatcgtagctcaattgaaaattttcctaaaataattattcaatcagtctagaaattttttgttctgcacccacagaatcgcgagcagtaagtgcgactttccttttatagaaaagaaaattcttgttttggttttcttcacaaaaaatctgatcaaatattttagaaaatttcacaaaggattagatatagacaactagaattagatagaaattggttgagtcatcaaagttaccctttataccttactttctataaatagaaaagctagtcatattttctaccttatataattcaacaaaatttagaaaacaaactaaacagctcagtcgaaaataagtaattaaattataaatatttttgttaattaaaaaataccaaaaataaaattaacaccacaaataccaattttgtagtcacttggtatgtgccagtcaaagtgtgtgaccaatgttatatagacaatttttttggtggtgataagtaaatgatgaatgcttaaaactctcttactttaccatttttaagttagttattagcctactcacaaagcaaataaacaaaaagctcattcacatataaaataaaagaatgctagggcttatttttggtacgttgtgttgtgttgt

SEQ ID NO: 125716 - DNA, 1270 bp, Cannabis sativa
  modified_base (40)..(40): a, c, t, g, unknown or other
attaaattagtgtttaacataaataattttatattattcnagtatttttattttactattttaattatttatctaataaaaaatatgccaaactattttattatatatttatgatatatacttgattatataagatatattattttatttaattttataatttaattattttttacatttgtttttttttgttgttgtgaattattcatttattattatatattttaattttaatttaagtttttttttttaaaaaaaataaataaaatagtccattctattcttaaaccaaatacaaaattactttcagcataatctaatattattgagtctaatccactctaggtcaatcatgcgtaccaaacagaccttacaagtattaataatagaaaaagtgattttaacatttatgatttgtttagagtttgagacggtatttaagaagaatatcactgtattgtacagcaaatacaataataaataattaattaataaataaaaaaaagttgtaagttaatggggcccatacgaagtttcttggaaaattcctattattataattattattttttaaattaatttaaataaaaaaaaaagctgtatgcctcgttgtttttgaagaacaaaaaaaaaaaagagaagagatcatccaattcattttcgccgtgagtttctccttttattactctttaaacaatcaatttttattatttatttaattaaaaaacacttattattaatttatttttaatatttagtaatatgaaggagaacgagaagttgtactgctactactaccattgattttcaaatctcgttttccagaataaactatttttagaaacaatcgaaaacggtatttacccctatactctctcttctctcctcgcttcctccgccttaaagttttgaaaaattggttttgaatactattttgattctttgtttattttcttcgggtgtaggtgattacagggtgtgagtgagagagcggaggtggtggtggggcccccgtacaaggcagggtgttgccatctctcttgcgacaatattattctacttcgccacaaatactccttattctacatccattttctctattcttttctatttttgtatatataaagagagaaagagagagagagagagaggaatttgctggtcgagaaatgacatcgaagggttcgacttctcctgtcaatggaatgttaccgccgggagatacaccgccggacttggaggcggcgacggcaacggccaccgcggataa

SEQ ID NO: 125717 - DNA, 891 bp, Cannabis sativa
  modified_base (824)..(826): a, c, t, g, unknown or other
atattctgttaaaccaagaatgttaaaccaagaaatgacgttaaataaagatataatgtagtatatattattataatatttttataatcaattttattttacttcttatattatttttataataaaattataatacattttaatattcttctattctaataaaatctctaacatatatcatcattaacttttatcacgcataaaataattgagaatcaaaatccagataaattttcaaattatcgatcgattcccaaaaatcttcaaatattcttttactattttgttttaaaattaccaaccaatcatcaattaaaaatttatttcaagtttagaaaaacataagttatgaatctcaaacaaataagcaaaatgagttaattgcggcatatataacttttgatagtattttctagcaattaattctctattttttttttatagtaaaatccctcaagttctgtatatataacactataaaaaaattctataacgcacacccacatctctatctgttttagtatttgaaataattttttagtcaaattttttttcatggtcatgtaaattatacttatttaacatattctgcaaaattttaagaaattcggaatgaaaaaaattagactaaaaaaaatttctggataccgaaacaaatagaaggtgcatgagtacatctattttaaggggtgcattgtagaatcacccaacactatattatttacaattaagtattaagttggttgtccatatctatatatatgatattgtctacatgaatacagtgtacacataacactatagggaaattctataatgcaccnnnttaaaagggatacaccgatacatctctatcggttttagtatccgaaataattttttagttaaatt

SEQ ID NO: 125718 - DNA, 3396 bp, Cannabis sativa
  modified_base (1706)..(1718): a, c, t, g, unknown or other
tagcaaggcatccatctcgctataggaaggcatactcatggtacctttactaatcagctctagacatctttcaatgagatccactgctccatcgagtcaactctcagataaaagctcacattcaaatgatgttgactactgaagttcaccttgtcatcaagaactgcgattgacaaatggagcgttatgtcttcaatcgcagaaacgacgagatttatattatcaacctcgaaaagacatgggaaaagctccagctcgctgccaggattattgttgctattcaagttcccagcaaaattccccagcgagatacactttgcagcatatctaaatccacgtcaccattggcccagtaaaagcggataaatcacagttgtatgatttttaaataataaccgcatttattaatgtgatgcgtaattaaggcccacgatttcagggaaatatgattgtaaaatttaaatctgattgtaattaactgccaccctgtattactataaataggggtagaatgtcttgaaaaagggacaaaaaatcattgagagaaaagagccctagtttgtatcagaatagtctgaataagattgactcgtggactatgcagaattttaactgtaaaaccacgtaaaaagctttgtgttatattttcttcttttattttctattatttctatgcaaaacttatcacaaaataggcttattatcgttaacaaaaatatgtgttaacagtttggtgctttcattaagagcctacgtgaaaaaagctcagaaaaaaccctcctaaccaaaagaaaaatctttctccatggcatgataacggagaaaatgttaatactcatcctgaagagactactcaccatcctaaaaaagagccaatgggctcacggaggcctcccaattcacgatctacatggtccatacgttcaagaaggacccaacgtgaaggtggccagacccaaaaacagggaatgacgtaccaaacacaagcgttggtggtgctcaacccatggatgacggtgcttatgatcccacgagatacgtaccgattgtcgagttagaaaatcgtcatctcaggtgccgcctggaggaagcaaactgacaaaatgttgagttggaacgggaggcagccgcagccagggcggcacaggaaaacaacgcgcaaaactaacctggtcctggagtgaggagaccatgaggtagacctcgcggctcacgaaccaggaggcaagagacggctcaggaggaccctcaaaacgcttaggaagaataacctgaggaaactgagggtccctttgaaaatgaacaaccaaatgatcaaccggaaccttctcacaaaaatgagaacagaaggcgacccgggactagggaacaggaaatccctcatgagaatgagggaaatcctgggactcaagacaggtgggttgccaccgaggcatcgttagcgtcccggaccgggacccggacccgaactgggacccagacccggaccaggacctggacccgaacttggaccccggaccccggacacggacccagacccagacccaaatcccaaaccgagactcggactcggacctgggacccagacgtggatgcggacgcgaacttgagacccgaactcgggacccggacctgaagttggtgttggggtcaagtgtattaaaagtatattataactttatacaatctattaatacaagtcaatnnnnnnnnnnnnnttgtattaaataatactaatacaacacaatctaacataattcaatacggcgtaccaaacaagcctttagtgttttaattattgaacctaacattttattgttaaattttttattaactttatattacatttaatattaaaatacaaatttatatcaatttttaatatgttatatacatgtagaaaaaaaaaaaaaaaacaacttcctcacttacaaaaaaaaaaaatatcgcccccttgtgatttaaattttgagtctggcacgttggtacacaaactaagtattggcacctagattttaaatgtttgtgctagcatcaatgtgagatttgtcttgcaatagtaggaacttatcaactgtgtaagtatcttgactaaagaatcttgaaacaataatgcatatgcactcataaatgtgtgagaatgatttggcgagagatattccagagagacagaaggatcaccatggcttggagaactcaaaatgcgtaagtgttttgctacctaaaaagtgaacatgatactatatacaaatcacacactataatatatcaactttaattgatattttcaagcattattaatgaagaatgctcaacactacatgagttacgttagtgcataatgaaatccagatattttaattttgataaataatattaaaaacaattaagtagtacattatcaaactcaaaagggatgtagatacaaggttaattcaaatatgaaaggctcttttagtctttgtattattgtccaatgtattagaaattctttatctatacccctaacgccccaatattcaattacttgtataaacagaaatacaaatgaatcagcacataatactacaagaaggcagtagggcttgatattgtttgtaatcttttttattgtaactgaactaaatgcattacaattttttattattattattatatttttttaaggaaaaaaacacacattttaactgtatcacaatcaattgcacatttttgttcaaaaaagtcattgcccatttcaaatagagaaaattaaatcctatacctcttttaagttagtgtctctcatttatacttgctggtttaaattctttcaattataccctctttttcaatttctattcccattatacccttttcctttcaccatctgtatttatcctctaacccgatattttctctgaaagctttgcagccatttccatctatctgaggctccatgaggttcaactctatcttttgttgttcgcatccctttccccaccagttaaagttgttgagcttcatagctttacagccatgatatttatatattctttcttccattataaattgatttccctcattccaaagtatatacactccattgacttttgaaagtatactaaaattgataatattcacactttatccccttccccaagatttggcggagaagacagttttttgagttgggttgctatggtagagaattaggattctttgcattaaggaccaatatgctagcatgaaaaatcgtgtttttgcaaatgtcaattatatataagaaaatataaaactgtatgcgtatgcaaaagcataaagtaattctgttactgcagaaaccagttttgcagtgacaaaacagaacaggcagaatataaaatatttgcagaaaaataaataacttgacacaag

SEQ ID NO: 125719 - DNA, 632 bp, Cannabis sativa
aaataaaaaaaatcgtaaaaaatatttaaaattccgtaaaacattatttttgtaatttttttgttgtgtttgtgtatttgtaaaataatcccgaaaaaaaggtctaattttttggctcaatgccctcatgtcacacatatctattgttactagtaatgagcgttgctatttggcactagtggtacccaacaccttttataggtgacgcctaacagtttgttagcgatatttcctaaaagctattttcttaaattatatagaacgagatacttaattacagcaataatagtataacaccaaggaaaatattaggtagtggccttttaacaattctctactagtaatacatgtgcacatacattttacctcaaagtactacacacatttatgtggtaaatttatcccatcaattatataggggctcactcaattaattaaggaaattatattgtatacctattttattttatttattttaatattaacctttattttcatatttttttaaatatacccacttttataaatgattttccaattatagccttaagctgatgtaaattatgtgctagacttaagtagagagtgaaggtacagtagaacctctatccaagaatacaattgggaccaag

SEQ ID NO: 125720 - DNA, 981 bp, Cannabis sativa
aaaaaaaaagagagagagagatattcttcaagttttcccaataaaaatactaataataaaaacaaaattagatgaaacactatttttaaaaaaaaaattacattttttacgtttaaagaatttttttttttacatttttacaattttttataaaaccaacaagaaaactatataaaaataacaacaaattagtaaataaaatcataaaaattgtaaaaaaatatataaaatttcgtgtcatcatattttttataatttttttattatatttgtgtaattatgaaatagtctaaaaaaactatacacaaatactacctttttttttcccttttatttctatattattattattattattattattataattataataaaaaattacacttaaggattttaaaagttcgtatgttgaatatgacacttttaagtttgaccaatttatatgatatattttttttttaggtctttttatgatatttgatatgccatatataaattaggtttttaaatcccatatttaatttttttttatttgtttaggtagttttatttgtcattgatgcaggaaaagtcactggagtttgttatcggtgccagaataatcaccggagtagttgacggtgccggaaaaggtgttggagttgttgccgacgctggaaaatttaccgaaattggcattatcgccagaaaaattactgaaaaaatcaccaagaaaggtttcttgatgaagaaaccactttcttggtatttttccagtgataatgtcaattctaacaactaatctgacagtggcagttactccagcgacttttcaacaccgacaacaaacttcagaaaagtcatcgacattggcatagtcgccggaaaaattaccaagaaacaatgtcaattctgatgacttttatgatgtcgacagcaactttgacgacttttccgacaccggtatctactccagcaactttttcggtaccgacaaca

SEQ ID NO: 125721 - DNA, 1416 bp, Cannabis sativa
  modified_base (884)..(887): a, c, t, g, unknown or other
tttttttttttttttttactaaatgtgacttttagtcacaacaaaaaataacttgtgactaaaaatagtttttaaatataagttgtcactaatttacttttagtcacaagtattgtgacaaaaatatacttagtcagaataaattgtcatttttgtgactaatatctttagccacagactttttagtaataacataaaaataataatttataattagtcacaagtatttttttttataatgtttggtattaatttttaagaaaaacattacaggagatccactaactttaataaatattgttatgaaaaaaatcggcattaaaagggtcttcgtattaggaacgatttgtatatatggataaagaacaatttgtaccacaaacactccatatttttatatgattgagctcgttttgaacgcactattatgttatattgtattgtattaaactagattatatatcatatttttatataatattatattaagttttaacataatattatatattatatattatatatttaggtgtccatagttaatactacatatagttttacatacaaatattgcataaaatactatgtaatataatactatacaatacaatacggtgtaatacggcgtaccaaatgaatctattatgtagtaattagtacgtcctatattttattttaaagatttaaatatttttacagtaccataacgaaatatttataaatcttgttttataggttttgattttttttttattataaattattcaaaatcaaaatattgacaaaattttagaatacccttacatataaatgattgattctaattaggtatatataatactagtaaatatcccacgcttcgcggcggatatataaaatatttnnnnttatatataaaaaataaattgtgtattttaattaataataatttcttagtaaaattaagtaaaatttttattttactattaaaaatttgtgacataaatacttgaaatattaaatttggtactaataaataccagaaatcgaaaaatagtaacataaatcttcatttatggtttaatttttattttaatgtgtgtgttaagttctaggatttgaattttattgtgtgtgtttataatgtttgagttttagtgttttactgggattttaatgtttgagtttatatttatttttatagattttgagaacttaaaatttgatgttgattctattgcagtattgggattgagagtttgatttttcatacgggaattaaagtttgccttttcgtttcattaattaaaaatattagtaaaaaattaatggaatacttgacaataaagttatcatttaaaaaaaagacgtaaagtaggcttttgttaaaaattaattaatattatttgatataaaatttaaacatggtaaaaaaca

SEQ ID NO: 125722 - DNA, 1241 bp, Cannabis sativa
  modified_base (279)..(284): a, c, t, g, unknown or other
attgggttttactaaaatgtatcccactttacaaattatatctactattctattaggtttccaattttattacttattaagcatacaaattcaaatttcccttttgaaaagtatttgattgattggagaaattttatttacactccattttaataataatttttattttatataaaatttatatctttaattatactaactcttttcttttaatttatattcttaaaaaatatacttatcaaacaaaattaaattgtattttaaatattatgacaaaannnnnnaaataaaaaattatataaaattatcttaataaaatatacatgaattaaaaaaaattataaaaataaaaccaaaataagtattgaaattaacataaaataatgcaaataaaactctcttttgattaaatgacatcttcttttaatgaaaatttcatatttctcttattacgctcgagacactaaaaaataatttttaaaagaaaatctatttttatcatctttgttctctacttttttcttcctcctacccataccccaaccaaaactattttgccagtcaccgtcagcgacctccaccggcaaccaccgtcggtgacctgtcaaagaaggagacgaccgaccaccaccacccaaatttaaaaatatcttattcaaagtaaattaatatagatctttattgtaaatgaatttttatgcattttttttttttaaatttaaagtctattattaatttattactattttagtgtattataatatttatttgttgagttttcgacagcctctcttattttttttagcacgattttattttatttttaatatataatctaattaatataaataatttaaactaacaaatgtcatcaaaaatattatcatgaagaaaaaaatgaagactcttggaaataaatttcaaatggctcacgatcaagatcaataagttaatttcatagtttctccataggttatttaataagttaatttcaaactgccccaaattttcaaaacaaaaattgttaatgtaaaatatagatactatgttgatttgaatatcctagtgttggtgtctttcaacgtgtagattgaaaaaactattaaatacgtttatgcatatccattgtaactatgttttgtgtaaagaaagcctatggcgctttcaaaatcgaggctttcttttcctagcagtgtattttgtgtcagcaggtacaacattccctcttcttctcatctgtt

SEQ ID NO: 125723 - DNA, 1341 bp, Cannabis sativa
attaagaatttcttttctagaaaatttaaaacttaaatgtagtataattcatttcttgttaaaatataacgttcaaactgataattatttgtataagaaaaataaccagtaaataagaaatgttggaaaattagaattttatttaattataaaattaaaagtaaaagagtataagaagaaaattttatatagacaattaacataaaagattaaaataaaagaaaaaactaaaataatcctaaataactatttggcacattccctcaaactcacgacgttactgcaagaaacattaagagtttgcctaaaaaatacgaaaacgaaaacgagaaatcatatgcgacttagtaaaaaagtcagcaaactacaataaagaaggaacaaaagacaaaataatggtgtccaactttagatgatgacgagtaaaatggcaatcaatctgaatatgtttggtgcgttaatgaaaaaccgagctgtaagcaatctaaatatggcagtttcattgtcacaatacataagaataggacaagagtgagtgacatacatatctataagtaaccatctcaaccaaacaatctctttagtagtagacgccattgcacgatactcaacttccgtagaagattgagaaacaacagactgcttcttgctcttccaagaaataagagaatctcccaaaaagatacaaaaaccagtgacagatttttggttgtgggatcacgaccatgatctgcattacagtaagcttgcaactccagaaaggatgtggaaggcagtattaggctctaaaagatggtaccccaaaaataccgtagaatgcgaagaatagtagaccaatgaattgtagtaggagaagcaacaaactaactaacaatatgaacaacatatgcaatgtctggacgagtaataatgagataaactaaactgccaacaatagtacgatacaaagtaggatcttccaaaggagagtcatcagaaggagaatacagaacattcaactcagagggagtgtcaacaactctactatcagtgaggtgagcatgcttaataatgtcagtagtgtactttgattcagaaagaagataaccttttggaaaaaaggcagcttcaatacccagaaaatagcatagagaatccaaatccttcatctcaaactgacaagctaagttttcctttaacatgtaatttcttgtaaatcatccgctgtaataattgttaatgtaatgatcggttaaccttattttgaaaattaacagataattagggcttatttttaaaagtaggcttttaattattatttttgcaattatggagatttatttgaattttaggtgtattaat

SEQ ID NO: 125724 - DNA, 2230 bp, Cannabis sativa
  modified_base (2177)..(2180): a, c, t, g, unknown or other
gtaaataaaatcaaaaaaaccataaaaatatttaaaattccgtgaaactgtatttttgtaatttttttttgttgtttttgtgtatctgtgaaattatcccctttttattcatacatttattactatccttatatgctccaaatctaaaaattgacatatcaaaatagataaagatttccaactaaaataattttacaattaaatttataaaaattttaattaatgaaaaataattttatatacacaattaaaaccttaaaatatctattcgtaatgcaaataacactagacaattgagtttgtcttcattgcaaagcttatttagagcttgctagtttcacgagaatgtagagattgctgggaagatagttgattgaggattgttggcactatggagtttggtccttgtgtgatgataattcattttgtacaccactaacaaagggggtgggaatggtctcagtaataaggagaataatgagaacaagggagtgaagaaataagtaggatttggttgggtggatgctagagtctcttcatgtattcatggattctaatcaatctgatcaaatgaaatgtatgagtgaagagagaagaagagcatttaataatgctggctaagaacaatgcgtgcctacaaatttgaacatttgaaagaaaaaaaaaacaaagaaaaaaagaacttaacaaaatttgaaattattgatccctgatatacaattctataacataataagttcagtcaaaagtataagagttgacttataatatgttaggaattaggattactaaatttccaagttgtgtaagaagataaaaattcgtgagcggcaggattcgaacctgcgcgggcaaagcccacatgatttctagtcatgcccgataaccactccggcacgctcacttagtcatgatgttacatgattaccttgattattactcttatataacaatatctacttgctcctatataagtatgttttatatatatgtcaagggaaaatactcgatctcgacgtgaagcgagggctacctcattttctttggttatatctttcttgcatttgaacaagcaagaagcaaagcttgtatgatgttgcttggtttcgaatctttactagaatgagattatggcttttggggtattatgcttactgttaatgataatgaggtatgtttgttcatccttaatggtaactttataaggaaaaagtaccagtactactgatgtgctagtataatccaataccaaggaagaaagaaacatgggtgaagaaaagaaattacacttttgatggttacttttatacagtagtaactagtagcaattgtgtcgtaataatcgtgccatgtgtcttttgtttttttcctgagtaattaacaaattcaaatctatatatttatattaaggagaagaatgaggcgctgatatggtggtctaaaaatactttatagtcccagatgatgataatccaagggtaacttctgttaatcctgctcttgttgatcaaaatattaaagcgcttatggaaactgattcgctggcttgggatattgacttggtgcatgatttgtttaatgaaagggatgctactttgattcttagcatttctttgtcttcaagtcgtttatgttatgcttggtattggagttgggaaaacttgggctacttttcagtcaaatcaatttataagttcttgcaagtgagcaaagaattgggggcatgggatgataattccatgttttatactctttggaagctaagtgttcccccaaaagtgaaagacttgttatggtgggctgctactaattgtttgcctacaaaaacaagactccgctctagacatgtgccggttgatgccgtttgccctgtgtgcaaagagattgatgaaacaatctaccatagcctggtggattgctcttttgccaaggcatgttggcaacagttggctgctaaagttaatctgacagtagttggttcttttgccaattggcttgcttcagtcctacagcaggtagatgaggaaaaacgaaagctagctgcaatgacatgttgggcgatatggaggcatcgtaatgaattagtttggtctgagaaaattcttacggttgagagcgttgttcatttaactaaagccctcctcacagattggactcgggctcaagatacaactatnnnncccactgctgctttccttacagatgtagatggagatgaaacatggatcaa

SEQ ID NO: 125725 - DNA, 832 bp, Cannabis sativa
tttttttttttttttttgtactgtaaatcctggtcttctacttattggagtgagccttggaaacagagcgccatttctaatccagtcttatcagagaagagagaaaaggaaatcagatatggatttatcagagttgaagaaggtagtggaagaggtagagatcgtagatggtcacacacacaacattgtgtcccttgattcttcattccctttcctcggtggtttctttgaagctcatcatggtgatactttgactcatgttgttcaatctctctgcctcaaggtaccactaactctttactcttctatatatatttatacaatatcattcaggctatgacgtagcataatttgtaatgcattatctagctcagtgttagtaaagattggtttatcgtttcttccttagtgttagtaactgtgatacagattgtctttctctgtccctaaccaataaaaacattacaaatcaactaaaatgccacgttctcttaaaaatgctaaagagtattggtgcctaacaccatcttatgtgtcaatatcgttattggtctcatatagtttaatataatagcttttagagagtattactagtcaatcgtaacataacatgtcaaaaaggtgctaggcaccgctggtgcataataacaatactcaataatttaatacatacttaactatattgttaccgttttcttctaattattttgtttttttcctaaaaatatttttaaaaaataaaattattatattaatttcagatattttcaatttatctatctatatatctatctatatatgtatataaaggagaagtatgaagtggtgatgt

SEQ ID NO: 125726 - DNA, 882 bp, Cannabis sativa
ttttgcactttttaatatattatttttgttgtatatttattaagaaaacccttaaatttacttatatgtaaataaatcatatataatctaatttcttctattattccctctccacttcattgtagtgcactagcattgccgaattacatatattggactacataaatcctgtttttcaggaacaagtgctttttttttttttttttgaaagagaagggacgagtgcttgaaactaaaacaaaatgtacttcttgcaaaatatatatagtagatttttttctccattttagatggtcttttataacttgttatgtaataattagtttggtcctaattgatattttttctatagaaatttactttatagtatactaaaattaaattttgctaaaaaactatgtgaaacttgttgtactttaatttttatgaaagattatgttttatgaaaaaataactaatgggtatttttatcagcattattataagtaaccatttacttttaaaaaaataaaaaaaaaaatctgtaaaactcctcagtttgggtatattatttttaaaaacccgtacattttgataaaatgttttgtaaaaatactcatcaaaatttttattagcaaaataattcttttaaaaaattattaacaaaataagcatatttggtcacacaaacaattaaatagtactatatatttacggaaaattctacaatgtactccctttaaatagatgcattgatgcacttttatctgttttagcattcgaaataattttttagtcaagttttttctcatggtcatgtatgttctatgtaagacatcctgtaaaattttaagaaatttaaaaaatttaacatagatttcaaattttattttatatgcatgt

SEQ ID NO: 125727 - DNA, 997 bp, Cannabis sativa
tttggcttggaacaaccacatagcttgggtatggtctagcaaccattgtgtggggtacatatcccactaccccgagcttggcattacaattacacccccatttggatgtagccctcacctgagatgaggtttgatccccctcccccaagtttggcctcttacctcaagactccctattgagggtcggggtgatgtgcaccctgtgttgatctcaggttaccctgagatatctccttaggggtcaaggtggtaccctgtgctctatttatacctcgagtaacattccattgggggtcggggtttatccccatggccacaacacccgagatgggcctatgatgataccctgagacgagggggtcggggtacaaatcccactaccctaagactacagggtcggggtacaccccgagtaaaccccgtcttcttctttttttaccgtggttattggtgcatcactcctaagtgggggtctgggtggtacaccccgagaccacccatgggtgatcggggtgtgatgctccgtgacgattgtaatgtggcttcgggagttggagacgattgttgtttgtctacctctcgaggtcttaaatatatgctttcatgtgttctttttgcttttcacacttaaaaaaaattttaagtgtatgattgtcattgtcgcttcctccatttagctacatgaattattgttcccttgttgtaaaaattttttggttgtgcactatgaatgtcacagatgtatgccttcttttttactttggagctatgtggttctattactatatgcgactatgtgttaacttgtctagcatgtaccacactatgcgtaagcattttttatcgttaaccatgtaccatatataggttgctcaagacattgagcaatgcacaaacactttatgaacgcaagtgactatgtaggttcacctcttgattacttgttaagtaatcagggctttcacataagaattgttattgtcacgggtttgccact

SEQ ID NO: 125728 - DNA, 1171 bp, Cannabis sativa
tacgggattatatgtaaaatagctttcaatcaaaaaaaaaaaaaaacctttgaatcttctaattgtgctgactttgaatcttgactaaaaacttgtggtattggtttgtgaatttgtgatgactttgaatatttcggccatttaaatttgctatcttacacgaaaaatatgcaaattatacatttttgggctacattaatggagccaattaatataaaaaacactatatattttgaataaatttgatgaagtagttagtatattatgctcaccacaattttgggttctttatatgtaattaggaaacaaaccgtactatgcctggggtctatattttatttaataactagtcgcaacgagctgcgcttcacgtgcggttatatagaaaaatcgaaaaaattctagaaaaaaaaattattatacaattttttaaaaaagaaaatacaaagaaatgtctccaaatatattttacagtgaagaaaaatttgaaactaaacaatcctcacacaaaaatagagatctataacaaaaagaagataataaatctatagaaaacgcattatataattacaactgttatttccgtatctcacttgtattcagtactatatttaaagttgatgtcattatcgtatctcacttgtagtcgttattaatatcctttctaatagattcgttccatacataaaagaaattattatttatgtattttgtagttaatattaattgtatgtgttttttcttaacacaatttaatataaagattaatatttttttaatatatttaattatttattagttttcatgactatgtaattttttttttttaagttttaattaattagtgatttttcactactacaatgtaggcctttagctttccttttttcaatccattttataaaaagggaagctaaagggtgtgaaaatatccacattgacatttagaggcagttttttggtaaaaaccgtaggtatagaatatatatatatctatgccgtcggttgggggttggtaaaaattaggattttttggcacctatgacgtcggttaatacaaaataaccgacaccatacggttatttatcagaccctcctgtacatcgtcttcttcatttcacaccctcaaacccacgaagaacagccaccacaacagccccaaacccacgaa

SEQ ID NO: 125729 - DNA, 697 bp, Cannabis sativa
tttctccagcagaaggccaaggctgcttggattcaacaaggggatagcaactcagctctctttcatgcgagcatcaagcagaggcagagacaaaatcagatattgtctattgttagagaagatggagtgcgtgttattgagcctaaacaaattactgaggtgttcatcacctattataagtccttgcttgggtcccggatgaacaatagaacgagaatttccaaaagggtgatacttgaaggactggttctagaatcttcacaagcagctctactagtcaataaattctccaaggtagaagtcaagaaggcagtatttgagatacctggtgataaagctcctgggccagatggctattctagtttctttttccaagataactgggatcttgtgggagacgatgtgtacaaagcagttacctccttcctagaatcagggaagattaaggagattaattctactattctgacaatggttcctaaagttaaatgcccttttcggccaaggattttagaccaatttcttcttgcaatgtaatatacaaagtttcaacaaagcttttgtgttctagaatcaaacttattcttcctagattgatctctcataaccaaggaggattcattcaagggagattcattggccacaacataatgatttgtcaggatctggtgaagcactatgggaggaaaaccaaaaa

SEQ ID NO: 125730 - DNA, 534 bp, Cannabis sativa
acaaataaaaatataattaatattcttatgcatgttacatttttgattgatattagaattaccttttgtaccaaaagtaaataaaaaaaaaacataagccaaaaatgatatagtaatcccttcaaaagtcaaaacaatactaataataattatttacaaaaaatttactatttacagttgtaatatttttttaattatattttatcattttattattcaaataaatttatatctatttaatatataaataaaaaaatatctatatttaaagttttgtaactgttaagaattacttaaaaagaattaagatgaactttaaaagtaatttagtaacatattttattattctgtatatattacttgttattatcacaatataatatataattatgatattatacataattaagtattacaaatccttctaaaatagtatatttatctattataaaataatataaaatagataagaagaaaataagaagaagaagatgatgaagagataaaaataaagtgaatgagaatttttcagtt

SEQ ID NO: 125731 - DNA, 901 bp, Cannabis sativa
ttaatctcatattaatatataatttgtcacatttaaatattttaatctatattatattatatcaaataatataacaattcttcactctaaagcccctgcatatgaacacttaaaagcttttggatgtcttgcatatgcatccactttgagtcaatctaggtctaagttttcacctaggtctgtcccatatatttttcttgggtatcctcgaggcatgaaagcatataaattgcttgacttaaacaaaaatgtgacattcatttctcgggatgtatatttttatgaacacatttttccttttgttaacactggaggtattccacctacacatgaatcttcttttttctgcatctcctcatgttgcagaaatcgatgagccacatacagcaggtacttcttcctctcatctgattttgttttacctccctcatctgatatacataattctaatatacctactgatgtgcctactgttattttccctcacaccaaatcagggagaaaattttcaaaaccttcttatgtcaatgagtatcactactacttagcatcttataatttgacaaattcttctcaagtttcttttgtcaccactcatcctttatctcaggttgttggataccacaggttatctctgacatttcgacctgttgttctagccatttctagccattttgagccaaagttttttagccaagctcatggcatccctgtttgggatgatgcaatggacacagagatagaagccctcgagaagaatcatacttggatcattgtgtccttacctacaggcatggccgactttaaccctgtgcaagctgtgcaattgcacagggcccaaccttgcacagggcccaactaaataaaagctaaaatttttattatttttaaatttaaatcc

SEQ ID NO: 125732 - DNA, 669 bp, Cannabis sativa
tgtgaggatttaatagtaattaacaaaaaaataagaataatttggtaatttattgtaggaagcccaaacccacattctcatttttatatagttatagattattccgtcttcgtacaatatctgattttgatattccaaaagttctaatttactcacattccgtcttttcaagattaaacagactaaaaaaaatgaaattattttatatatctactttactttatttattttaattttaattttttatttttatatattttttttttaaatatatccacttttatagataatgtctctattagaccacttaggttaatataaattatataatagactgaagtagatagtgagaatatattgaggaatccactaaaaaaagtggatatagtttaacaaaaaaaataatataagagtatttttggttaatggacacaaaaaaagtatttttttcacttatcacagtaaaaaatctctttgattttgaattttgaaatagattgaaaaaatttagtgaagcagtagatttttaaaaataggcttatgactgaagtcgcttatgcattggcctccaatatgggccttagatgagccagagacccattagtgaataatttaatgttttttttttttttttgaataaaacttagcaactttattaactagcaatcg

SEQ ID NO: 125733 - DNA, 633 bp, Cannabis sativa
agcttcatttatggatatggctagcactcaagaagaagcaccagtagtcttgttgctgatgcttcaagtgaagttaaagatcgcactctagaaaaagaaaaagcaacaatagttgaccctgaggctgttataattactgatcttgctggggttgattctttctcacaccaagttgttactactgctacatctaattctgagggtgttcagaagctaacgattgttgtgacagattttaatacagagctggagacttattctacaacaatggaggaaggaagcaaagaacagatgagaaatgcaaaagacaaagaaggacagtgggagatccaaaagagaaatagtggaagaattcataaatggatggctaaacaattgaataaattcattgtattacagcatggataaatgcaatatactgagtttgaacattaggggattcaataaaaggatgaagcaggagaaagttaaagaaattttttataaaaatatagtgggaattggagtaattttggaaactaaagtgaggggtagcaaagtagaagaaataatgaactcctcttttataagatgggagtattatacaagttcagtattagaaggcagaatactaatcatttggctaagtaagtt

SEQ ID NO: 125734 - DNA, 1730 bp, Cannabis sativa
aaatagttacacaaatctaattatggtaagtttgactaatcaatacatctaatataactaaattaagaatttatatgattttatgtaaaaatgttttcaaatgtagacatctataaaattaatttttttgcatattttttttaattaattaaaataatgtatacatttatgtaaaatgcattaattttattgtgtcaattagtggttataactctttaatatttattaaaaattaaattctttttattttatggaaagtgtgaataagtagtgtttttatggtacaactattttaattgattgtgattgatactttcagtataacaaattttgtaatccttttatgcaaggaaataaagtcaaatttgtgatcttaattttatatgaaaagtttgttaattttgtctaagttgccattgtaaagtgcgattctgtcgctgcaaatcaggatttattttaggaaaatatcttacagttgtaaaacgtgttgtggttgtctataaggtttctatgtgctatgaataggaccaagagagcagccaaatatttttgtctcttttagtcttattgttttacattttcatctttgtgagagagaaattcttgtgtgaaaacctagaatattctactaggttttagtctttgtattattgttcttccactgtttttagaataatggaagagcttcattgaacaagagaataattttttattaataatggttatctttcattcacagtgatattgcctaattagacaatcaataatcaaaaacttgtcatgccatgtggtacattatagatttcttatctcaagtctcagttcaggtatgttggctgacttgcttggagaatgatcgatgatcttggaccctatgtcacaacaataaaacaatggttaactaagcaatctaaccttattctaggtctaaaagttcattccaaagggtccctaataggtcactagggtatccctacttccatttctggaaaaatacaaaaaacgagcttcaaaagcaccatcagaaataatctgccgttttgggaaaacaactaacttttttttttttaaaacggcaagccatttactgcaggggtaaatttttgtccctatgcttagccttattaatggttttgatgcaaaatcagcaacaactatttccaaatgtaaggaatctcgagttttgtactcttcgaaatactaccgaaacctatccaaatcatttcaaacttcacagggcacataaatactataaatacaacaatccttacgtaacagaaattaaaattgagtccttaaacgaaaaacaccattaaattttagacttaagatttaaaaaagttcaaactcaattttcaactaaaaatcaactcaaatttaataagtaaacatgaaaactagtcccatagctacccaaaaataatttcatgaagtcaaaatccctataactactctaaatcacaaagtcaatgtataaaaccaaccgtttttaacttaaaacgaaaccaatcattaccttaatcgtttttaataccaaatcttgaatcactaggtttcgaattgaaaattgaagaaaatgggttgagagagaagaagatttcgtcgcacgaaggagagagtttcgttcggtttatgtttatatatatttttttttttaaaaaaacttaatatataaggctaattagtaatttttctccctaaactttgacatgtagtaaatcgtgccctct

SEQ ID NO: 125735 - DNA, 2171 bp, Cannabis sativa
ctctctctctctctctcttgtctcacacgcccacatctctcaaggtgtgcgtgagattaaaaaccttaatctcattatagtgtcacatgagttgagtaaacactggaatacttaaatctgttcatcctataagatctaatatcccactctattcataagtgttgaggctggcttggaagatcaagctgttgattcttcaatcaagttcttggattggatgttcaattattatacaaaaaagaaacaaggataacctaataggcattaataagtaattgttttcttttagtagattagatttagtctatatacattatgttgagatccttgggcttatggttcatattggataaaaattattttattcaaattctgctttcgcttttataactctgatatggaccataaaaacctacaccttttcctttgggaattgtcctatcaggtctattccccttattgcaaaagagccatggactttgcatctgcattagctcatttggtggtgctcggggtatcttagaaaatttctggcatttgtcacattttttcacatgggcctttgaatcttcaattatttttggtagtaaccttgccttagtattctcttagatagactttgcccctagcgtgactaccacaaaatccatcgtgaactttaaataagagccgtacagcttcttcacttgttacacaccttaacaatggtgtcgagaaacctcttttacacattacaccttcaattattatgtaccatatagcctttctcatcattttcctagcttcatcctattgctcggatattctccagtgttaaggtaggcttctatgggagtcatccaatttggtttgtcatctatcatcttgatttcctccatgtaggtgatgctgggttcttttagaaattgaattggaactaggttcactttatctatcactgtgttgatcgctagttgggctagtgcatcaaatgttgcattttcttctctaggaatttgctttaaggtataacattttaattgtgtgagcaagtcatggatctttcctagatatgccactattttctctccacaaggcaagtattcccctgaaacgtgaatttccacaaactatgagtcactacagatcttaatgtactcagcacatatttctcgaacaagctttaacccgacgatgagtgcttcatatttttcctcattgttggaggctttgaacccaaattgtatttctccgtgcaagggttgccccccttgtgtgatgagagcaatccttgcatcaaacaactgatcagtggctgatttgtccacatgaaatttctagataggcttgtctttaccaatttcttctagtgggggtgtctgaactagttccttgtctggctcaggattactttgtgaattgtctgcctctttgccacttcattcaacagcaaaatctgccaaggctagccctttcatagttatgcgtgactggtaggttatttcatattgtcctaactcaattgtccatttgagtagccacccatattaatcagacttttgcaaaatttagtgtagaggttcgtcagtgtacacctgaactggatgagcttggaagtagggccttaacttccttgtagcttggataaaacagtaagttaattttccaaacaagagtactgacctttagcctcaactagtcttttgttgatgtagtaaactggattttgaacattattctcttctcttatcagcatagcacttacagtgtcttcaatgaccttcagcctcaactagtcttttgttgttttactgaccttcctcgggcatgaacaatgaaccaagaacattacagaacctgactccaaaagagcactttaagggattgaatttcatgttgtatttcttgcgaattttgaaacattcattcaaatcctctatgtgcccccaaccttcctggatttgacgagcctgtcatccacatatacttccatgtttcgttcgatctagtccttgaacaacttgttaactaaactttggtaggcaactttagcattcttgagacaaatgacatggctttgtaccagtatagaacaatgtctatatggaagctagtgtgctcttggtccactactacaaaattcactattcacgtcggtcaacgcgactgttcatcgcgttgaccgacgtgaa

SEQ ID NO: 125736 - DNA, 2859 bp, Cannabis sativa
aggctggtaaagagcgggtgccttaccggcccaagttactgctcctggttcccaacactggggctcctgacaccagcacctccagatctggtaagtctcccttagttattcatcatctcccttttgctcaatattaatctcgatgtagacctatagagtttgacgaacgtctccttagatttaagatgcctcctacccaatggggtgatcatgccaagggcttttatttttcaaacctaggtcattttctaggccggtcccggatggggtctcggcctcccgcacctatccttttggatcattcagcctatctatcttccagctggtttctcacctcggacaccattcttggggatgacgaagctagtattatagtgcaggactttgctagggctgaattagattttctgggtaggattagttttactactttgttcttgtgtgcataatttatcgtgaccattctgacacttgtttgtttttttcttaaaatagctaggcccatggatgagcttttggcaactcttgcccaaacttacaatcccgaccccgccttgcctcaggcacctgacctgacggtaaccgtagggaggtcttctttgatcgttcccttaggccaaatcgtcttgatcgatgaagatggggaggctgaagaagaagaagagggcaagattctggcccctttggaccggaagcgcaagggcaagattgtggaggctgagtctaccaagaagcccaagagggtcaatactccagctcccagctctgactcggggatagcccctgaggcagaggaatatactgtgcctcccaacatactcttgagtcccgttcatactgatgaagagagacaactgcttcggattgccaagcacaattatgctatggctgaatacacaaaggggaacgcgaaggtggaggctttgaaaaaggtcctaagggaggcccatgacaattcctcacgtactgagtactttgggaacgcctgggatctaaacatggaccccctgatggactattcaactgcttcatcgggcctaccctcgctccttttgcctcagagctgacaagccactttgtctccaatttgacccaactcccagccaagagatatgcagcctgcgcttctacgaactcaatctaccaaattcaggatattagcgttgccatgattgcgataagtctatctgttagtgatctcgggtctcgttttaaggcgcctgtcctcccatacttacacatttttctcatatttccaaattgctgcagagactggtctcctctcaaagactttaattgaccatgggtacatcatgtccgagtttaggggcatggatcaggccatgaagagtctaagagacttggtggccgagaggaaagctatccgggaggaggcccgaaaaagggaggctcagatggagcggagtcaccaggaggcattgaaggccaaggctgaggaattgaaggcaaaggacgacgccctgaagactagagatggggctgtgactaaggcgaggcgtgagcttagagaggccaaggaggcggttgaggaattgactgccaggctaaagtccctagaggagctgcaccaagctgatttgaaaacgacagccaacctgaccattgaggttaaggagctacgtgacttcagggagcaggcttaaaagaaggcaaaaagagatgccctcctggcccccgttacctactagcactgcaacaaacgtttcgacgattgtgtctttatggcttggcagactaacggtcagatacttaatctcgacttctatcccaagcctgaagaggtcctcgtccacttctgggagaagaagaagagacttgatgccttactggagaagctcaggggtcctcgtctgccacctcgaatttattaagccagcttttcactacctctatcattattattatttttccttttacatatttaatccttctcccctctttaagacaatttacttatatatttttttttcttaaggggagacacttaaggcccgtccccaggcccttatcttttttggagattttctttgggatccgaacactttatattcacgtttgaatacatacttagctttaactttgttaaatttggtctgtttacatttgtctgtgtggtatgctttactacccccctaagtgacatgaaattcaaatttaggtcactcagttttaaaaactttggattagaggttgcatatatttgtctagtacaaatttactttacagaacataaacttttattttttcaactattggtaatacttgcggaggttatcatcattctaggccctaggcaccatggttccgtccattcttttcagcttataggtcctagagccaattttgtcctcaatttcgtatggtccatcccaatttggcccaagtacccccactccgggttcctgagtggctggaaagacccttcttaggactagtctttgagttgaagtgtttggccaccttcttttgataagctaccattcgtatttgagactcatcccggagttcgtcaatttgatccagcgcttcttgtaataaagccttgtttgctaccggatcgtaattcgtcctcctatgggatgggaataatgtttccaccgggaccattgcttcacaaccgtatgccattgagaacggcgagtggccggttgtggttcttggggtggtctagtaggcccataacactcttggcaattcttcaggccaattgtttttgcaggccagcaacttcttctttaggctgaccttgaggattttattgacgccttctgcttgtccatttgtttgtggccttgccactgcggagaatcttttgatgactccgtgttggttgcagaa

SEQ ID NO: 125737 - DNA, 2303 bp, Cannabis sativa
acactactcaaacccaaaacattcaatttcaaatacaatttaattaaattgaaaattttaatttattatagatacaaaaaaccctgataaagcaatttaactttttaaacttaatttattgtttgaatttatatattatattattttatttgttttaaaaaaaatattgggagcttttaggtgcatccaaaaaaaaaagtacctctactagcattcaaaaaaatattttattctattctggtgttcgcggtagggatagttcgagttgtaatatttttttcaaattaaaccgcatatgcaggttttttttttttaattttttaaactgtaactgtatcgcgagatcttaaaattacaaaacttacaccacgaaaatacagtatagtgtagtgcaatttgaatagtttatactatcatcattatcgaatattatactagaaatttaaaaatcaatctataaagttttaaaattaaaaaaagaatcttattaaaattttaacattataacatagatactaatcatcaagttaatatattgaattgtctctaaaaaaaataataaaatgtatgcatatattacatatatttgttcttatataaaaaaagaataaaaatcatattgtaaaaatttataactttgtaatatatagtgcggtgcggtttgaaccgcaattattaaatttaaaatcgcaaactgcaccgcgcggtttggaaaaaatacaaactgcaacagcactacaaatgatttcaaactgtttttttaagcggtgtggtgcggtacgggcactttgtacggtatgagcaatttgatgaacacctctatttctaatggcctttctatgtatagttatttaaaacattttataaatttttaaaaaattgagaatagttgataatataaaaactagtgttgaaacaatttattacatacacatataaaataaaaacttcttaagttcagaaagaatgtgtttgcagctgccctctcttgcctggtgtatacactttttggagaccttgaaatgttagcttgtgggagaatacaaaagcagatgcagaagtgttattcaagggaataggctgttacacaaaagattagcatatgttggccaaagaaagtcagtccagaggacaccagctggttttaaaacttgtaatccgaattgtatgtatgagtttaaagtaagcagtgtacataattgtatagatcatattattttttaggcccttaggggtgctatttgtttgtaaaaatcagatttaagcaatacaaactttcctgattcataaaaaaaaaaatattattttcaacgtattaatttctttcgaattataatttagtatatttgtaaattttgttcgttattttttaaatttttttgtggctcagatagaatacctttaaactatagaaacaattgaaaatatgtctttaaattatatttcgattcttctgtttctctttgataggctacctcatgagtctttttaattgatgatgacaaccttttggtggttgtggtatgataggaactcagtattatttggtaacaagcagtcaagattggatgttattccagatttagtcaataaccatctggcggagtttaaggagtatggtcggtgaggtcttcatttgggactggctcctataaacccacttgtaaactgagctactcgatggatgtcatctcccctgaatcctttgctcttgcaacagatgcttctatagtttcagggaggggctttgttggattggggggagtgatacgagatgcagagggtgtgatttggttggcgtggtcatcaggtgtgtgaagaaatgatattttgcctactggtttgtatgtgtgagctgtcataatagaattatgtggtcccaatcttgtaacaaattattgttagaatattccctttgtaataatttctttatgattgtgtaaagatcctttaggtcattcttgtatactgtacagacaagcctataaatacaaactttagccaatgatttcattgagctgatttctcattctctctgtctatttttctattctctgcaaataccttgctttctaacttggtatcagagctcttcttctccaccggtggtgtgttcgtgtgagtaaaatatggcagtacaaactcctatgcctggagaacaaggatcgacagctagaagcacaaccagtggcgttgctcagatttcagctccagctcccagtatcgttgggccacatgtgggtacaactcttactcaaccttttgctttaaaattagataggaacaattatactttgtggaag

SEQ ID NO: 125738 - DNA, 1086 bp, Cannabis sativa
agtatgtggaaatgtataaatgctaatactatatggttatggttaatggatatgtgagagtcacaaatatatatatacttgttatattgagatgcgaatatttgcatttataatgcttttgatctaataactttccttgcttagtcattgtgactcacgggtgcttcatggtgcaggtaagaggaataaagctatgtttggccatgaatcagaagtctcccaacagtgtacatattagctgtggtgtcttggcttttgagaagcaggatcaacctcttttcttttatgtgtgaaagtgtaactttatttttgtattaacggtttgtaacttgttataaagaaattttataaacaggcgatccctatattttagtggtatttcataaagttttattctgatttaatcaaaaagtttttaattaaatcccacttttcataaactaatagaatagctaggaatatgttcgtaaaagcacacacatgtggcgtccctgcgggttggggcgttacacgtggcgtccctatttgataggtcgttacaacatggtattagagtgaccagtgtttaaagatcctgaaggttggtttgatatgtacataagctgtgaagactagttcgactcatagttcagtaagttttaattattagattatctgttaattaccagtttgcttgtttatttggaatatgctagatgttagaaacatgtgaaaagactgagatatatggaaatacttattagtattgtcatttcttggaaatgtgaccacaggtgtatagattatgcacccgaggcggtctggtaggggtaaccgcgagcttgctgggctcggagttggtggtgagggcgagaaccctccaccatcaccaaactgggaagagttatatgtcgcgatgcaggagaccatccggcagcagggcaagcaaattcgtgagctgagggagcataatcctgatcctccagcacctctggtagtgccataggatgcagggaatcgcctggcaccattgtatgagcggttcaggaagcagaacatgctagtgtttgagggtggtgctgatccactcaaagcagagcaatggat

SEQ ID NO: 125739 - DNA, 861 bp, Cannabis sativa
taagtatgtatttagggaaaaaattttaagattttctaagtatagaaaatcaaatttccctatcctaatatataggcggtcataatgatttctccaaatttcatatacaaagatgttcttaccttcttaccgctggagcaaactgtacatacaaatcttaataagtatgttaggataagagttagttgtacttttctgttttctgttgtatagttagttagttataactaactctttctgtttgatagttattgtattaatcttgtgtatatacccatatatagtggctttgctcctcttgtttagggtgagcctcttttcacttaccattctccctgtttctctttctctcactttcatataaagtatataatgcaaactacttattgtaggatggacctcaagcaggacaaagtgtagcccatgttcacatccatattgttccacggaaagttggtgactacgagaggaatgatgagatatatgatgctgtaagaatatagatagacatttcttccacttcctgtttaatttaatttaattttgtcctttaatatgtatatttcacttcaacaaatgtgagttttgtagattgatgacaatgataagaaactaaagcaaaacatcgatttagatatccaaagaaaggacagaagtcctgaggagagggctgaagaagctgaaaaatatagaaagattttcttgtagcactcttttacaccattttagcattgtctgtaatgctcttatgcttttttatgactactagtttttgaacgtgcgttgcacgtgtaatatatagaggaagattgtatgtaaaaaaaaaagaaaaatcatatgttattattataaagataaatt

SEQ ID NO: 125740 - DNA, 733 bp, Cannabis sativa
atcacaagataacatctttatgaaacctgaggttcgggaagaaaggaaaattggaatagatttattccaaagaaattcagcagctactaaaccaacacccaagaaaacctcactaaatagggacatcccaaaattgttttctaaaacattcttagaacatgaatctatagttttaaaacacttatggtccatcgaatctatgcccctgccacattgtataataccaatgacaaaatgctagtccactaaaatatacttactgcacaatttataccaaatgggtataaatataaggatggaaattgtaaaactggaaaaaattagataagcattaatcggtagggttagataaataaatattcctaaaagcaaacaattatacaaacaaattaagcatcaagtcatcaattttaacatgagaacgaggacaaattaaaataaaattaataaaatctaaattagagaaagaccacttatcaaagtatttgagtaaacctatctttgtgtaatttttaagaatatgatccaatgtaatgtatttaaagtaaataaataaatctagatttataaaaagcagccaattttccgaatcctccaacgaattatggattatcactcacaatgccaatacctattaaaccaattgcagtctaatgtagttcataaacttaaaatgttcagaaaaatcccttttaccaaacaaaattctccaaacgaacataactacgatatc

SEQ ID NO: 125741 - DNA, 1977 bp, Cannabis sativa
attatacaaaacataacttaaaaaattataaaagtgatactaatatactagtaaaatacaaacacattataaaataaaatgtataagaaaattttaattacataaataaattaaaatattaaatattatctattattcaatatactaattattatataaaatataacttaaaaaattataaaagggatagtaatatactagaaaaatacaaactcatattataaaatataaaatattaataaaaaaaatagctaatatacaaatatttagagtaatgtaaatgtgtatttatttaattttttaatttaattttatttataattattatatataatctataattattttaattattttaataataaaataatatatatatgaaaaaaaaaagaatttttttaataaaaattgaaaaaaaattatgttaaaacacaaaattgtaaagctaaaaaaaatcatacgaagaccctatggagtcaattatttcataataaccgactccatagggtcctatgatgtcgattattgtataataactgacgacataagtttcttatgacatcggttattttataatatccaacgctatagggtccctatgtcatcggttgttttttacaccttacagtattgctagaatagcgtcggtaacaaattttgtcaaaattaatgctaaaagcctttaaaaactacctctaaagcctaattttatagtagtaagaacaaatatcgtaatcttaccaataaatctattttaagttaatatcacttagtttatcataaatcaattagatctgaatcttgacatgattaaactttaagctaattctattcttcgagttttggaactctttgttaccagctaattaccctatggactatcccataaaattaagaggattcaattgaaccaattgcatctctttgttttttttttctttctctctcacaaacacttatcttttctctctattgtgtgagatactctctctctactcttacgtggcatttagttggaggtaatgaaatgaaaaggaatggaaagaaaaaaaaaaattcattaattccatgttgcattttgaagtattagaatgtcattctaatagaatgacacttttctatcattttggtgaaatgacgattctattttgaaataaaagaaatgaccattccaatacagtatgacaaaatatttaataattttttcattaattatttatacattttaaatttgattttattctatttctattatcattctcattctcaaatgtatttatatgttttcatttctccttcttctagctcataattgtccattccctcttgtaaggcctggagctcctcatgctcataattgtccattccctcttgtaaggcccggagctcctcatataggctacagacctaagctggtgagttaacagtaagtgccatagttgacattttatgtcatgtagaccaagtgttagtacatgtttgacatcataattaaaaaattattttttgttttaaaaataaaaaattattttttgttttaaaaataaaaaattattttttgaaaataattaaacttgtttgactttgttttttgaaaacaattttcaaaaaacaaaattacaaaaaacaaaaattttgaaaataacaaaatttacttttagtcaatattatttttagaaaacactaatcaaaggtaacttgtgttttgaaaatttcaaaattatttttttctcatttataaaaacactttttttgaaaataaaaaacaaaaaacaatacctaacatgtttttatattgtgaagaaagcttttggacctgagtgatttattttgtattttactagctgtgatgtaagtagatttatctgttttctgttttttgttgcgtgtgttagagattttataaaatggaagaaaatcaagacattacaacactattgcaatataatacaaggatcaacaaagagattaaataaa

SEQ ID NO: 125742 - DNA, 1751 bp, Cannabis sativa
ttaactatattcatcatgttaactattaaatattaggcatctctaagattgaacatcaaattaattcaatgttacactaattagggctggacacgggtcagtttttgggtggtcggatttggatttttgaatgtcggtttttaaaatgtataaccaaactcgactttagggtggtcaggtttggcaggttttgggtcgagtacattgggttttgtgtgggtgggttaggattgcaatagggcacgtccaaatgaaagatttttgagcccaaatgaaattttgtttttaaaaatatcattttttttttctatttttaacaattaaaagtaagggtcttgtgtcttcacttgacttttattgtttcaatgagtcgatgatgaacaaaaatgggtaagggtcttggtcttctaatgacgaacaaaaaaaaaaggcaattaatagattatttcattgagaaacaattgtatgaatgacaaacaaatactaatagcattatagtaatatatttgatattacaaatatagaaaaatacagagaaagataagtaacgaactcaaaattgaaaaatataactatctaaatcatatacaatatataatatatatataatttaactttaaacttaaagaactaaagaaaagagaaagaagatacctaagtactaagtagtagtggacaccttgcttagaggaatcgaactgatctggttgcagggatgagaacttgccggaggagatgagatgatgactgatcaattcgattcagggatgagttggtcagtcttcttctcttccgtatcgtttggggacgaatcgatttactgatatttttttttttacttatttagggttatttaatatttaaggatgaaaaataaaaaaatatatatttattgattcgagtttcaggtgcacacttgagttccaaaatatgcattttaaaagtccgaacccgatacctgtatataccatttttgggcgagacccgacccgatcatacgggttttgtttttttttttgtctttttcggcagcagatcagagcgggttggtgggtttccgggttttcgagttcaaatgttcagccctaacactaatactaaatacagtgttacatttttttctattccacccacaaaactgaaaattatactataaaagtattctttattataatactttaatttttaaataaaaaattatattctctttactattataataataataataaaaatatatatatcgttgctacaatgcacgacatatataccgtgcactgtaacaactaaaataaactggtaaagaaaatagtagcgcgtatgttagaggagtttttaatattatttaggtgatttagtgtcacgatcgaggggctcttataattttagttccattttattaaggctaaattaaaatcaaggtcggccccagtggcagagaaaatggggcatgtggggtcatttgcccccttttaattttttgtttatataaattctgtgtataaatttgtaggtattttacattctgccctataacaatatttttttttatttacgtcttttacatatttttatatttgtccccataaaatttatatatatatatatttttttatttttatcccacatattttcatttgtatccttttaaaatttatatttttcatttttattctcacatatattaaggggtgtccataaattaatccaatctgataacaaccgaccgccaaatattggatatccaattg

SEQ ID NO: 125743 - DNA, 1644 bp, Cannabis sativa
cataatgtattatttttatatcctaatcatttaaagtcgttgtcattattgtatctcacttattgtctcattatatctcatctattttcatcaccgtatctcactcgcagtcatcaccgtatctcatcccttgtcatcaacgtagctcacttattgtagtcgttaccactatctttctcaaatctatatcttaatcttaaattttatctcgaatttaaaatatattttttaacatttttaagacattagagaaaatttattagcctgttatgattattaattaatatgtttaaatttatatgataatctaatataaaacattaaattgttaatataaaaatatggtatggcttatggaaggttagttacgacgtattaaatatctaattaaatttaaatctatttaactaaatttgatatgaaacgctcttctcataaggataatttttatcatcatcattcaaagctgttataattattgtacacttataatattgtagctaaatcaaaaatagatttgtatagaaaataatatccaaaaaatacttcattcaccgtaacttattatatctatcttttagaaaataaaataataatttatctctagaattttatcatgtcgataaatattgtggaatgttgggtaaaataatagattaaaataataattgtttaatattatattattaaaaatagatgagaaatgaaaaaatatattattattttattatggttatttttgaattatattatatgaatattgttaatgatatttttcaatcaaggtatttcatatatatatttgaaaacaatagtttgatattaaaatgtaaatataagaaacaaaagaattattatttatatattatgattattctttaattatgttataaatgatatctatcccaaaaaaatctcgttaatgatttttgaattatgattatttggtatttttacattaactagatgaaagttacgtggcgagccacatcaatattaattttatataagttttagtggtttttatttaagaaatcagtaactaattgtaaattattttataaacgatatgttttatataactaattgttaaaaatgtgataattgtgtatataaacctataatatacacattgttattcaaatgttataatggggatttccagatctgaaatatttattggcatacactctatatcgcaagcctgctcaaatattacccaaatcaagtcaaaatcatgtttaacgactttaatggcaggggaagatggagattgcagacgaccgaaagcaatgctctttttttttatatatgtatatatatcttctatgaataggtttcaatatagtgggttttcaatacaatgggttttggggattttaatggattatcctagttcagttttgggccttgttcttgaaatttttttaattttgcattttttttttcatttattcatttctttgctgccttgtttttgaattgttattactattttatcaagtcttgcatgtctcaaaagtgttaagagggacacattgctcatattcaacagaggtcgatggtttgagagactataagcaacgccaacaacaatggtagataaatctattaaagtttttcatatttgtaaaaattataaat

SEQ ID NO: 125744 - DNA, 1129 bp, Cannabis sativa
  modified_base (918)..(921): a, c, t, g, unknown or other
atctcccctaaacagacatcaaacacccaatgaagccatagtaactgctgttgaacgcaaacaccaaatgaaaactagatctcataacgacatttccaaactaaaatcctaccttgctacaaagcatcccctgcccaaatccttattccaagcagagcccaaatctctcaaagttgccttgaataatccaaatttttttgcttcaatgcagtctgagattaattagttccctcaaaaagcctggtactcagcatctggtcccctacatggataatatgcatgttattggaaataaataggtgcacagagttaaacttaatgtagatgactctctagatagattcaaatcaatattggtagcaaagggctatcttcaaacaccagggatcaattttgaagagacatttagccctgtggtcaagcctgcaacagttcgggttgtcctttctatagttatttctaataactggcctgtgacacagttagatgtcagcaatgcatttctaaatggtgaacttgaagaaactgtgtacatgtgccaaccacaaggatttgaatatgctagatatccctcttatgtgtacaagctaaacaaggcactttacgatctcaaagaagctccccgtgcttagaatgacaagttgtaacacacactcatcaactagggatttcatagctccagatctgatacttctctctttatacatggaataggctcaaatcttgtcatactacttgtctacgttgatgatataatcatcactagcccaaactctgctctaatctctcacatcatatctggtctaaacaatgcattttctctcaaagatttaggaccaattcactacttcttgtgagtggaaattcacacagataatgtaggcaaactttgccaatcaaagaattttcttgaaaaannnntcaaattaaaatttttatattaaatattaaactttatataatatcaaaatatttacaagtgtcgagatcctattttcaaacttttaaacttaatactccaaaatacatataatccaggttgcacagcgattacaaaatataaccccaggtgtcccgagaccgaacactccaggtcgcgccgcgttgacatgtacaacttcatccgagc

SEQ ID NO: 125745 - DNA, 675 bp, Cannabis sativa
aatgcaaaacagcaaaagacaaatggttgataagtgatttgttgttgtcgttggttgcttaagactcattttaactagtcctttataagcaacctctcaattttgttcctttttgctattacgatggtcacaatacattatgagacaaatgtttctatgtccttaccctaatagacagccaagcagaatctccccatacaattcaaggtctgttattactataatcaaaaatgacatcatcagttaatcggtaaaatcaagggtactaatactagacaaaattattagtatcaagcttgcagttttgagttgttgactgcaaaactttacatttacatattattttattttattatgtttgggaagtaaacaaaaacgcggagaaaaataatttatgtgtatgtaacatacaattgttaagtcgtatggggtatgtttggttgaggtaatgtaggaaatgttttttttttcttatttgaaagtcttggaatatttttcaataaatatttttaccatttaagatgactattctatttaaaataagaggaaagataattaataaaataaaataaaatatcatattaataaatttattccattatattcttactaggtaatatggccgctcttcgactaatttattttttttagtattataataaaatataattattt

SEQ ID NO: 125746 - DNA, 1062 bp, Cannabis sativa
ctcaccaaaataagatgtaatgattgatgtcatacccggctttgaacttacaacattaccatctctgtccaacaaagatttaatggtgttatgttgtttacgcgaggaagcataggcatgaaaaaatttggtattttgatcaccgttttgtagccaatcaattcgcgaacgttgctgccagtacatctcctcttgggctagcaaatcatccaatacattttcttgaagcttcaaatcatccatcacagcagtggttcggtcatttgcattattcaaatcagacacttttttctgcacttttgaaattttctttttgaagctgccaaacttttgtcgatgccatagttggagtgattttgcacaactttgaatgttttctgtgaaaatttcagtggcatttccaacagtagcacacttccagttctgctgaataatgtttgtagcttcctcctcttgtaaccacaacttttcgaaccgaaatcgtgtctgcctttgttgctgctggtgtgttgtggagttctgtaacacttgaaccgagagcactctatggtcggaaccataatagtctaggtgtgtagtcagtatttgttgaaaagtgtcacaccatattgtgttaacaaaacaccagtcaagtctctcctttaatgtatcagctacaagtcttccctttatccatgtgaaaggatcaccttcaaatggctgctcatgtagttgacaacgatcaagaacaagtcgaaaattttccatttgtgtctcatttcgaagcgcccctccagacttattttgattggataaaatttcattaaaatcgccaataactagccatggtagcattggagcaacatctttcaatcgttcaagaagtgtccaagtgatttggcgattattagtggctggtgcaccataaaacgcagtgaagtgccaagtcggaccatttccgaaagccatgtagcagtcaaagacatttgtattataatttaataaagttacatttacatcatctttccaaagtaacataagacctccactaagaccaacacgagggacttcaagtccattatt

SEQ ID NO: 125747 - DNA, 1358 bp, Cannabis sativa
ccacctgcttcagctgctacccctacactatggcagccaccacttcgtggacacttgaaactcaatgttgatgctgctatcgatgaatctcgacatatcataggtgtgggggctgtagtcaggaattcctcaggacatgccattgctgtcttctcaatgcctactgttggccatttttcatcacacgaaatggaggccaaagctatgtttctcaacctaaattgggtccttcaattgcagctcccaatcatacttgtggaaacggatgctcttttggtctcaaatgcattaaattcaaatacggtggccacttcatctttcaaaaatttaatcataaacatctctagtctccttttttatttccctaacatatctgtaactcatgttaagcggactgctaatgtagtttctgatagtttggcataatatgccttagggttggatgagacttattcttggttggagaattttcctccttcgatttactctgttattgtaaatgactattctcattaatttataataacaaagttatcttttcgtaaaagaaaaaaaaaatcacatgtgtacatatgtaaaaaaaaaaatcttttaatttacatggcatttgataatggctgatgccatttgtttaatgaagtttacctagtgctcggcccctccttgtaattagcatggaggtggagttcttcgaaaattatttccctcaaaaaaaataaaaaaaaaaaatacatggcattttttttaaatacaagatagtattggagcacacatctcaaatgaaggttctgtattgctgacaatttctactttaaataattcactttaaagtcaactaccgtattttacaacgatggttcttcctcatccatgagaatccccttttcataattttcttttatgcaaacttccattgataaaaacattgagagcacgaagttatactttcaaacaaatcagaatttcaccattccacaatacctcactttgaacccctaatgctttgttagctaagataaaagataaggactttgacttccaaacaacaatgataaaagtgacttacaaagttacaatagcccacctcaagaacaggactccgaatggttttaaagtttctgctataaagttgtacccccaccgtctgacataagagatgcagctgcagctgccgcagtgggaacaaccccagttgaaatatccggctttgacaaatgcaggagcctgagaagacaatatcagaagtgtcaatgattacattcaaaaattaaactcaaacaaaagataagtataaatacttctactcctgatcaattttcgccttatctaattgctgagttcaagacaagctagctgtt

SEQ ID NO: 125748 - DNA, 1097 bp, Cannabis sativa
  modified_base (35)..(45): a, c, t, g, unknown or other
aaaatagactaaattttttttctagatgccgaaannnnnnnnnnntgcatcaatacatccatttgaaggaagtgcatagtaaaatcaccttatttcatatttcatagttgatattatttatataaatttctaagctaattacatataaaaataatattttttagtggttaatatttaaaatgaaaaatttataataattacagtgtaattataattagagcgaaaactccccttttgtagttacatgcaaaaagaaaaagttatgacagatcagattggtattaaaacgttgtcgtttgttaaataaataaaataaaactgttttcttcttcatcttcttcgattactcttttcctgattcgcttttggttcaaactctgaactttcgtactgaaaccccatttttatacacacaagcttcaagtctcgccttcttcctctctcgtaagcttaactttttttaaaaaacctatcttcaaaaacaattattctcttccaaaaatggaaaatcacttatcttttttaattatttattactagctattgttaaactatgaattagcggttggtatttaacataagatccggattttaatcattgagtttgaatttcattgttttatttttattgggtttttttgttttgttggttccttcccttgaggtatttttttttcttccctgacaatggcttatttgttggtttatgtaagtgggtttgtgaatgtgatctgattagtttatgtttatataatttatttcagagtttgtgatttttgaaagtatggtaaaggagactgcttactatgagatattgggtgtcaatgttgatgcctccccagctgaaatcaagaaagcttattatctcaaggtaaatgattttttttctttaatttggatttattttttctgacccaccaagaaattaataatcttttgttctttaagattgtgaatttataatgggtttttaatttaatagctgaagttgttgggtgttcccattttaaaacatggtactttgtagatgttagttttcactttttaggagtttccattgttgttcatgaaaataaagtttctaactttgttggctg

SEQ ID NO: 125749 - DNA, 926 bp, Cannabis sativa
ttttttaactttataatttaattttattcaattattatagtttatgtaaccaacttatatattattaccagacaaaaggttttggaatatctatatcttatatatttgtagaattattataagcaagagaaaattccattattttcttcacaaatccccatgtttttattttgttattttctctttttcttttcttcttctttatttttttatatgtataattaatttattcaatataattgaaactttgttaactttgactcagagacttgggcggcggaaaataataatgataataataataataattcacttcgcccattatagtgttttacattattattgattagggttattaggcactaataatagttctcaaatattttttagaggttattttgtaattgattggtaatattttttaaaaattattatattaaattatatatttaattagaccaataaaaatattaatacttaagagaatgttacacaactataccttttaatatttctcttattattaatataatagagcgttactattagacatatacctagcacttctagacatgtcaccttacgattgactagcaatacttcttaaacgttataaactatgtgtaactcgatattcaattagatcaataacaatattaacacataaaaaatattagacaccactaatattttttagtatttctcaatatataaaatcatcaacaatatagatatttttggtaacaatgtcggctcaacttaaatggtgatgagaatgcaatcgtgtttggaattaagatcaataaatatttttgctgtcacaaattaatgagcataatttttttaattgattattaatataataaggtgaagcaaattaaaatcgtttttgtaaattcctaccattaaaataaaaaaaaaataaa

SEQ ID NO: 125750 - DNA, 832 bp, Cannabis sativa
  modified_base (804)..(806): a, c, t, g, unknown or other
atgtgtttacttataatcgttttagaagttcatatttagtgtgttaatcaacatacttgtgagtagatgtaagatcctggtaaaatcattccaacatctacaagactggttattgaaactacgactatacccgaatgggagctgaacaaaaaacgcagtctaggcacctgtaagagaagaaacccatcagagaagaaagggggtcctgaggcgattgagaagggcaaagagttggtttctgtagtggagcggacgtcagtcccggaggtggtgagctgtcattcccctcgtacgttggatggctgcaccgtttcgtacgatgggttggaggagagcggtgattgggagaatgtcgggaattatacagtgggtaggtgcaacatggatgacgtggaagctgtgctgataccacctcgtggggaaatagaagcacgtgcccttcccagtattgggcttaattttttaaatttaccccagccagattttgctttggtcaataatgaggaaactatacttgatattgggcctactcttgcccaatctattgtagtccctcatgattggctttgtctctctcaaaaaccccactcctttctcaagcctttacatatttgttggcctaataaagactctgaagcccagaagctattttccaaatgtatggacccgatttccttaatctctataaggcccagcagtcaatcatctgtaacccgccaaatctgtctgagatgatcactcatttattgggaaataataggaaaagaaaagctcatcgctggttactgttgggttttatgcccnnnataaaactctttacaatctgattagt

SEQ ID NO: 125751 - DNA, 677 bp, Cannabis sativa
  modified_base (26)..(33): a, c, t, g, unknown or other
ttcctaacttattaattcctcctgannnnnnnntagatttggaattgaactcttaattacatagaatgcactattaccaaaaatagatgcaacctgaataacctattgttttaattcaatagtcaaagatcctatatagatgatctgcattgaatagggataaatttaccgttctccgaaccaaggcctagactcagaccaagacctagacccagacccaggccctagacccaaaccacggactccaaaccccaaacctcagactctgacccgacttggaccacggatcccaatccaaaatcgaaccccagacctaaatatggacttggacccgccccaggataggtttggggtccgaggtctgaagttagggtccaagttcgggtccaaatctgagttcgagtctggaatcgggtttaagttttgtttgaggttggggtccgagcagggctggccctgggcctaggcggactaggcccgtgcctaaggcccactctaacccagggcccaaaaccagccagccatataacctcttaaaaaaaattaggcccagcctaacacccattttctccagccggcccaacccaagtacccagcccaagtggtctaaattccaaccaccaaaacgtgaaaaaaaaaactgaaaagtcactcttctcatctctctctctctctct

SEQ ID NO: 125752 - DNA, 1421 bp, Cannabis sativa
aaatttaggtatttatttacaattgagggttaaacttaagtatttataacgcaaattactctaatataataattgtgactgaacaaataaagaattaatttatttataaaacttaccaattatatccaactttctcaatttaaaaaagtgagatatcttttataccttaaatgaatcaatcaattaaaaaagaaatacaactcaaacgaaatccatattcaatttatataatatttttattaatctaaatatgccaaaaattaaattaatatatattatatataattagatttgatcagtcttaaattaaattttgaaagtattattcaataaccaatacaatttaataatccaacaatacacatttaatcaattcaaattataattagatattcaatttttttataatttaattgtattaaattagttcggtataattagattgatttagatgttacttgctcctactttgtatttaagaagaatagaataagagatatgtgaatacaaatagaaaaatctatagtaaaaataagttttaaaaaaaaatatataaaaaactcatcctacaatatacaatatgagatttagagaaaaagaaacagtaaaatatattgccaaacattatatggaaaaaaaaataaaaaaataaaaaattagaaatttataaagaacacatctataaattaaaattaaaattaaaattaagagaatctagagaaaatttattttgaatcactatatacatacataaatctgtatgatttttttggattattttctgtgtatgatatttaattagcttatgatgatggtgaaagatactactcgtgctaacaatgctaaaaaagaggaccatttatagagagtattaagttggtggatgacatattaatgatttgcaataaaaacttcaagtttattaactcctcttctatgcactcatggcatatagttgggtgccaataaatttcttcattcaggcatgaaagtagaaaaaatagcagtcatttaatatttggaacattagaaaagtgagtaatttccttataaaaacagtgaattgaaaattatggacgaagtacctcaaattattaaaacaataatgatattattaaattattttgagtgtttcttgcacccttttattgaattttccaattatttttatacatattaaaatttataatttactagcagtagtataaggctcagtttgacacagttatgctgtgggaaaaaatagttgtgttatggaaaaaaacagttgtagttgtgctctgaaaaaaagcaactgcatcaaaactgtggaaaaaataaagttgagtgttcggtaaattataaatttcaaagtactgtgagttgttaagatctattataatgataatgataatgttataatctagtttactataatcaca

SEQ ID NO: 125753 - DNA, 623 bp, Cannabis sativa
agtccctattataattttattaacagttgttgacggtgaaaactcctcaactaacttatggtcagaaaactgaaacccacacactagacttagaaagaagattattatgtgaaaattcaaaaacataaaaaatattcaaagcaacaatggaggaatagaaacacttgtatttctatgcatgaagcattacaatgatttttcaaccccttctcacatttgagaatgtgatatttataagctttaatggcgaagggtacaattgtggtcccaagggagaagatgacatccataagttgtaggttgcaggttgtaggtagtagtcttgcgccttgtatccttatctggtgtcaggtggtcatgagttgcgcaggtagtggttgtgtgcactcttggtcgagatgtcaccacttgtaggtgtggtgcctccactgctcatacctccttggcatctatacatgcaggaagcgtggttgtacccaccttgtatgcacgccttgtccatgcaattgtaccttcgtaaccctcgtcttcaacacttgggaaaattcccacttggcatggttgtgcccttgacaagagaatgattgggttatgtgcaagcttaacacatggccgagtgactt

SEQ ID NO: 125754 - DNA, 3549 bp, Cannabis sativa
  modified_base (3152)..(3165): a, c, t, g, unknown or other
acctactcctgatggctagttatttctaagaagttgagaatcatggagctagctttatgccctttacttcaaattacgtatgaacaagttgacttttgactttcatgagttgatcaacaatcttcagaagtttgagaatttgattagaggtccacaaaaaggaggtaacaaagctccaagttctagtaatgctacggttactacgacaaagcctaagacaaatattgcctctacttgaaaacctgcaaagaaaaagaagtggaagaacagcaagaagcctcttaaagttgttaacacggcaaataaggaaaaaaatttgctaatccaaaggtaaaggagaaagggaaattcttttattgaaaagaaaagggccactggaaaccccaatgtcctaagtttttggcaaagaatcaaggtattcctaactttgttgtaaattcaagtgttttagagaattattatccccttgggttattaattctagatctactaaccatatttatgttcttcttatttcagctccaaccacttaaacttgggttattatcctagcgagttagacggatagttggacagaaggttagagaatgtccaagcttgaagaagaagctcgtctttattattttgaattaattattttatttatcgaataatttagcttaaattttagtttgggaattttattccctatttcatattattgcagacaattcatttagagtatgagttgcttttatgaaattgagctttatatttatcaagctttcatgtgttttacatttattattgatacaaaatctatggtataatattcttcgcagtgaagtaataccacataaacacttgaagttaaattcaatgtttgtgaataattgtccaatcttaaacaattattaagattttgcttaataaaaaatcttatgatctgataggggtggaagaagttattgatatatgcagttcaaagatcttttacattgaactctagattatattcaaaacaccacagaatctctataactcaacatattatgatagggtggaagaagttattgatatatgaagttcaaacatcttttacattgaactttagattatattcaaaataccacaaaatctctataacacacatattttggtttgatatatatatatataatatgtaatttatactagcaaactaatagaacatattcttgatcctgtatgtgttccaatgtatgctacaatagtaatagctacccctaaagtccctggacatataatcacagtaccttatcttagtgtgaggattttaatcccttcatcccattattatttggatgacactactgattaatttaaaatgatatgttaaagcaaggaactttaaattaaaactaaagaatgttaatcgaaccattcatatggatagtaataacttatcagaagtataaggataagttagaaaatttcacaatgtttatttgaaagacttcagcacaattcttggtcctcgtgaaatattttatggtctctttagtgattacataatcttaatcaagtattttatattaatactagaatgctatattaatgacttagtctggaaggaatttattatttcctatttaagataaaatatcacaacaagatatccctaagtacaaatagtaaaacaaaaatgcacacctgtgtatgcattaaactagactcttacttttaaatgggagccatcaaagatgtaatcaaacatggaagacaatcaagaaataatctctaaaagtgacctatatgttaggtgataggggtgtatttagaatccttatatctacactaactctgaacttgatatttgaaatggttattactctggggtggaagaattattctaaaagggtgtaaaaacccatctataataatttagttccacgagtgaagctaaataatttagttgctattaaaagacctggaaagttattcaaactgaagaaagttcttgactattttctctattccatttttgatagaatgagagttgtatcttctatacattcaaatacacttattaagcagtgaagaattcagtatccctagaggagtaatacatatagaaaaataatgttctataatgttttatgaacacaaaaggaaataataatgcataaactattgcttgctacaaccttacagttcttattacttgggtataataaaacacactacacttgatatgcatatcaggataatgaattgattgaaatgcacttctagttttatgttagtacaagtgggagtttattgtgattttatgccctaaataaaacccatttcaatataatcttatttgctataaatagaagattagaagtcatttaagtttacatgttattttcatgcttatggttaaatataatatttctgataaattcagaacatatagttattcacaattgcagtgatgtcatcacagtggaaagtaattgtgattatatgcttcaaattttatgctccatgatttatcagtgcactaaattcacattgacatgataatcacaataaaggttacatacacttggataagtggtatgtcctttccagggcattggtaaagtatactagtatcggatgtatgtagtacatattggactggatcgatattgaacttggaaaagatatcataaacttaccttatatctttctaagtcaatatcacttagttgatcttagattaatagatcttaatcctgagatggttaggttctagcttaactgtattatttgtgttctttgacttgttggttaaatttgaccaaatggatcggccccatactttcatcttgagaacatgacagtacaattgagtgggcacactaatcatagatacagaatttatagcttctataatgacatagaagtgaaataatgatttcctttcagcttggcataacagtgataaatggaagagcacttatttcagtaataatagtagtttactaaaatatcatttataggaagctaagtgttataaagatggatttgattatttggattataaaaatggataattaatagcgtatctatatttagaacatatagagcattctatgtaatcaggagtgcgatttcgaatctacagtggagtcagaaagaattaataagttagagaattnnnnnnnnnnnnnntagaactacttattgggagcttgattatataggtccatggtccccgcactagttgagataatattggatcatatactcagttgattggttttaattaaccaattaaattctaaattagactatgtctcatttatgaattttcactaagcaacgacttaattgggaaaaaagaagttttaaggtttatttgttaattaggagactttataaggtctaattataagttaaatagtaattttatttgataattaattataattattaaataaataaatttaatatttataggattaaaattaaaatgtggcatttgtgaaagaaaaagagaatgtgccatttggcaaacatatgttttttaatttttttaatcacaaaatgaaagta

SEQ ID NO: 125755 - DNA, 3101 bp, Cannabis sativa
aaaccattagcatgtaaacttcatgcaaacataaatcaattcaaatttcttatattgataactaatcagattgtgaagggttttatttagggcacaaaacccaacaatctgttgaaaccaagtatgagcagtctccgtgccagttacgaagtagtactcgttaacaaaatgcctaattttgctaacctctgtgtccacagtgcccttaagccacttgtcatcaaggtgagagaagtagaagtaccctgacctgctttgcttcagagtagacttcaaatcaaagagccagttggtgtcgtgcagagatggctcaccccatccttgaatatcgtagaggatgcacaaggaaaattaatacttgatgcccttgggtgtgaactgggtcagacaaaggtggtattagtctgcaatccttttgaaatatgggtgcaaaggcagcatcgccccttattttgtatgggcacccgactaggcccagtatcattccctcgcactagttccccaatgatttggagtagggaggaagcattcaactacgcccaggtacccaaccttctccaaatcttttaaatgatcctcagttacgatggacacacccatctagccctcatgccaccttgtttcctattagggatcccctcggcatactcttggctgacgtaatcttccccctcgaccaagaaaacaccaagctcagatactggttcttcggcctcattgtagcctccaaagcgcaacggctgagaaactcactcctcctcaaccttggaaggactctcaagatggtcgttatcctggtcttccaccacttggacttcaatgcccccctcatagtcctcttcctcagtagcaggcaggacttgttcggcactcgacaatgtggcatgcctggccacgtgacggtcagttacattaatcttctgcatcgtctgttttgtgcgggccatcatcctcctccttgatggatattggtgtgtgtgccatgcaatagtcacggcaggagcagcgattggaatgcctaaggcaccagaaattggaaggcctataggaatagtgtcagcaacacctggatggacaatataggtccagtttgatgggagataatgtctccaccccttcctaagctcccaaataaattgcatgtacccttctcctgcgatctgctcagagtaaaaatggtgttgcacctcgggttctggagtaggtgaactttcactactcacctcccaatcttcaaaactcaagttagaaagtccatcactcaaagagaacggactggtgcaaagacgaggttggccctcgtataaaagttgaagaagatcctggttgatatagtgtttgcctccccaaaattcaccagggttcatctacaaaagataatacatgagatgagtatttggctaagatattgcacaaaaacaaacaaatatactaaccaggtctaatcgacagatcaaaaaggcaaaaaatatcgtgaagggtagggtcacaacccagaatttcaaaaatcttgaattaagggttaatcttcattaaaccatgaacgggtagagtgagcccgaatattgcaaagttaaagtcaaaatgttgctacaatagagttatatgatctattacagtcaaagttataaagtttgtaccatagattttctaaatttttcctaaaataagtcaagaacaattgaattttctacaatggaaacccagaaaattgaagattcaaaaataaaggagaaaaatatgagaagcttactcactgtttgaagctttcaggttgttcagatgaaggtgatcggttcgttctactagaattccacgatagaattgaaagaaaaaatttttctctaaaattacttagcaagaaaaatggtaaaagttgtttattaggattttctaccctatttataagaaaattagtgaaagagtgtaatcgattggaatttcgaacgcttcgatttcccccaaaagtaaatcttgggaaattaaaagcgtgggagtaaaaggcgcgtctcgaggtacaatttaatcagagcattaaatagttaagaactgagggacttctggtcagtttcacatcgaatcacaaacaaatgcatccagcagtgtcacccattcagatgcaaggtcagcttgagtgaagtctacgcgtaacttcaaaagtcccatgcagacttgggggaaaatgttatcccatttttttcactatgatgtggtagcacatgctagtgacacgtgaacctaattccctacatctcgttgaagagatgttccgaacagagctcagcatacacctgcatagataatgtctttccagccgagcagtagacaatcctagcaacacatcaacacttagtaattccagaacttgcatcgtgaagcatgaaagaaatctctagaagtgtaggattgtatcacagagatatggcaagctgtccaaatcccacaatctgtgtattctaaatatgtaatatatgttcttaccaattatagagattgtaagcaaatgggaaaccttccgtcaagcatttagccctataaatagtgatctattctcactagttaaggggtcgaaagaattactttagagaaatctaacagaccatactcagagatttcattgtgagagcttcaagagaggaaacactatgttctttgtacttgtgttctttattatttattcgcttatactgtacgttaattacattttctgtcgcttactatttgactcattattgttggctaaaagcgaggtcaacaactttcaactgtgttgaagacacaataaacaagaatatcaatgtaataaggatttggatgaagtcataaatcaaataaatgatcatatgaaccaaataacacactgaataaataatgaaaataaatatgtttcttcattgataaatgaatataaaagattacattgaaatagagtttcatttaggaactcccagttgcactaacataaaacaatcagtacatttcaattaatcctagattcatttggtgcttttcaaatgcagttacagtcaaaattttggtgaatgcatcagctaagttgtcttcagtatcaactttccccaccagtatgtcccctcttgcca

SEQ ID NO: 125756 - DNA, 1024 bp, Cannabis sativa
agttcagagggaatttttaaccgccaaaaaagttcagggggcatgatttagtatatatcaaagttcagagggaaaaattgctaattagccttttttaaaagtttgtctttttattgttattaatgctccggtattattacaaaatattgtaattgttagagagtttcatattactaatgtgtaaaaaaataatagaatacataagatgaatgaactacgatcttctcattgtcaattgattttaaaatagaaccgcattcgtcttatcccaaattatcagagtaaaaaaaaacaaacaaacaaaaaaccctctaatgactatctgacccaaaaataaaatcgatcgaagtagagtcaaaaaaagagttgaaccaaaaaagagtcgtttacaatcgagttgtccaagatggtaagtaaataaaataactaccatcttgagaggggatgttagagagtctcacattgctaatatgtgaaaagataatattatatataaaatgaatgagctactctttccaattagttttgagatggaacttcattcatcttatcctaaattctaacagtaatggctgatttggccatttaaatgaagtttattgccattttttttaaaaaaaaaatacattaaattttatgtaatattttaatggaattaataaaatatatttttatattgacaatattttgaataaatttaattttatatttgtttggagttgaaaatagcttctatgacacaaaagataaaagaaataataagtggcaaaaataaggtacaaaggtgtgaaaaattagtatttttaaaataaataattatataaaataaatttttttgtaaaaaaattacatttttacatttgaagatttttacataaaatacaatgtaaaaattacattttgtaaaaaaattacatttttacggttttcaattgtagtaacacaaaaacaacaagaaaactacataaaagtaacagaaaaataacattcaaacaacaataaaaaaataacatacatataacaa

SEQ ID NO: 125757 - DNA, 1047 bp, Cannabis sativa
  modified_base (26)..(28): a, c, t, g, unknown or other
acaatctcaatagttcagggggaatnnntaacgaccaaaaaagttcagagggaatattttgatacatgtcaaagttcgggggaaaaaaatcctaattagcctaaaaaaaacccataaccctatagtgttatttatttatgccataaaaaagtaaactatatcctcaattctcatatttatgaaaattctcctattcctaaaggatgttttggtatatatttttattttttttctgcatttagaaaatatttttaggcctttttttttcataattttgtatgctctaattatttaggagtcgaaaataaagtttaaatattgtgtagtgtttgttttttcttatacaagtgataaataattgtttgaatcttatattgtcattataaactattctgaattttttaaaaattaacaagtgattccaaataactataacgtacacgatcatgaaaataatttagattaaaaagctcttttaaatgtcgatacaaataatggatagtatatgtatactatatatttttctttcattttttatttgattacatatacattagaatttctctaactagttttagtaaaattttaaataatttttaatttcaaaataagattcgaaattatttatttcatgcccataaaaaataaattttaaaataatttacttttgtagttttggcacatggtagattattattttttttttattagattgtatatattgtaactatttaaaatccttttataaacttttggaaaattataaataatttatggcatcaaaaattaaaacaggttgttttgaagtttgatttatatgtccataaaatataaatattttgaatcctactttcggcatttgaaattattaggatgcattttataaagttatttttgataaattaattgtgaaaatattatttaatttaatttacatatttaatgagaattaaatagggattttttcattaatgtacaacaaaaattaatatattacataaaatatgcaaaaaaaacttaattataaaaactcatacattttaataa

SEQ ID NO: 125758 - DNA, 1456 bp, Cannabis sativa
aatatagccttatcacgaggagtagcttcttccatctagcctgacataaaagcagtatacctattttagtaaacaagttatattatattatattatatataattaacatattactaagatggagtaagttcataacatttctttgtagctattacaaaaaaaaaaaaaaagtaaggtgctacaaacttaggttgttgagacttcgtgacatctctctacaaccattacgaatagcagggtactacaaaactaggctgttgaaattttataacctctttctacaatccgttgcaagaccaatactaccacaaaatcaggccataaagagaaataaagtggtcacacgtaggcttggtacatgaaagttgaaaaaaaaagaactttcttttaaatatcatcaagagtgagagggttcagcgccaccaaaaggatctgataaaggaacttcaaatgtgttgctgaaagggataacacgatcattaggactaggaactgtcaatgagactggatgttttgcatctaagtaatgacgaaaccatacttgaatctcatgttttaagagctctacatccctattgaatcgggaacaaagaaaatccatatctctctcgtgctcagcaagaatgcaccttagctcagcttcctttctagatattacagacaaagcttggagcaattcagtcctaacagaaatcatttttagagaaaggtcatcaaaatgatcattaagattgtcaaggtgataaagatgatcgcgacattcagatgccctaatacagttagtgtcatcagattcattaagcatacgttctagaaaatggacatgcctatgcaaatcattgacatatgatagagcatcagaatgaagcttgcttaactcaccaactacattgagaggtgaaggacgagaaacatggctattcacagatgacatttttttagcactgctgattgataaaatgatatgaaataagtatacaacaaggtatatttataagcagtcttcaagggatgttcaccataaaaagtagcaaaagactatagagcgcgtatcgaggaactgcatagagtgtcagtatattatctacataaagaaaatacaatcttctctatacagagagggggctaaatgttgataaataaaagggtataataagaagggttattgtctttaatagaagcccttgggtgaagcagttaattacaaatgagatacaaccttatcgatcaacaagttgattaaaagataaggttagtgcaaggaggttgcatatagggtaggttgtatgcagggaaggttatgtactcaacccctataaaaggaaggttgagaggacacataacacacatcaaaagaaaataaaagaagagtttctctctaaaaatctcagttttcatcattgctccctattctcttcccttacacacaaccatcccatctcatcaattctcttcc

SEQ ID NO: 125759 - DNA, 1792 bp, Cannabis sativa
accactaaatgtaaaagccagaggcggttataagtattttgtcacattcattgacgattactctagatatagtttctttacctaatgctaaagaaatttgaaacatttcaccattcgcggtcacgccacttgagaggacagggccagttgccaagagttaagacgggggcaaaaagagcaactcccaggctaggcccctccgggtagcccactgtcacttaagaggaatatgaggcactacaacgaatggtggaagagcaaaaagaacggaacgagtaacaacaacagatgatgatgactgagaatcaaatcatgagcgtgtttcaacaataaatgatccagttgaccaacgtcgttctaggatttaatatgcccgagatgccttcgattctaccatttcagcctcctagccatgttgctgggtcctcctcacaaactgcccatcccggtaatgaaaacgatgttgctgttgatttgtatttttttttagtctgcagtgtgcataacattactatttatgaactataaattcttttatttagtttatgacgtttaatatagttttataattacaatataaattttggttttataatatattttatattatatttattattattatttctattttaaatttaaatttaattatatattataaattttaatttttttataaaaaaaatacttttgtcagcgagtacaatgcgccggcaagaatattgaatattttaaatatttaaagttttgctggcgcatcacttgcaagcaaaaatatttatttattttttattaaatactattttcggcgagttaatgcaccgttaaagtgtaggtgccaaattgggattggcaccaaattcgcgccaattcttttgctggcatgttaactcgccgccaaaacctcgtcactgggacctcaaccggcagccctattgccggcgttgcacttatgccagaaaataaatccggccgtctataaagtcttttgctggcgttactaaggtcgtcggcaaaagttgatacgccgacgagccaatgccgacgccctttgtcaacaaaacaagtcgccagaaaaagtttgccggcaaaatcctcatagttttgccagcaagtttactcgctggcaaaagttatttttcttgtagtgtttatacggagctttactttgatggttcgataataatccatgtttctagtgtatattgtttcgcaggagtccaatgagtgatgttgggaatttgggtaaaaatttgtactttaccaggttgtcacctaggatcacgaagatggatctcgacaagcagtttgcattggaagggacggtatgaatgattgcttgagtttactttttcttttttctagttatagaatttggtatcataatactattcttgcattgttttatttatgtttttcaggtggtgggtgtgcatcttgtgattgatccatggacaagagaattgttacactatgaaatagtgtaggggcttattagtaatttctaaagagtgtgtatcactataaatatgtaactgtgtggctattatgggatatgaaatgagtaaatagaactttggttcatttgggagattggcattgtctcgaagagtgcatttcgtagatttgtcctgtctcgaagaggactattatctaacaattggtgctttcattgagagcaattacagtaaaaaattcactgtaggaactctcagccatgaagaaaacagagcttgcgaagatgttgatggagttggatcgtcgtatggatcgatttttcgatgctcaattg

SEQ ID NO: 125760 - DNA, 906 bp, Cannabis sativa
  modified_base (245)..(245): a, c, t, g, unknown or other
  modified_base (828)..(850): a, c, t, g, unknown or other
taaaaaataccgtctgacagtatttttgtaaaaaaaatagtaaaagttagtataccacgtaaatttctcaaaaaaaaactaaagatacgattgtacgaaattttaaatatttttacagtttttaagattttatttacataaaacatgatcttttgatatatttttatattttttttttttggttgtattcttattattttattgttttttgtatattatatttttatgtaattttttttttattntttttgtgttatttttataaacactgtgaaaatgttaaaaaaaaatctttaaacttaagacagtaattttttttaccaaaaatagtggtttatttaaattttcctattttcttttgtttcttataaaagacattttatcatgtaatttgacaatgcgattttaaatactttagtaaaattagcatgtgtgttttgacacaactttgattacattatgaaatcttaattttattgtaataatttacattgtgaaaatcaaaatattaatccacagtttcattccactatatttaatcaaccactttttcaacacttattcatttacaaaattatcttatggatttttaaacgatgtctttttttttttttttggtatgcgtttcaaaaatactttcattacaaaaggaggaacaaacctcaaaacacaaagttcataatgacaacaaaggatccaaacatgccattggaatatattggtggaacaaatatataagaaaaaaccaaaacttaaactttagaagatgtaacgtctccgcttcaagccttcattgggttctcacacccacggaatgaatggctcttnnnnnnnnnnnnnnnnnnnnnnntgcttcctggattgatgactgaccctacagatcaacacgagtgtttcaagcatgct

SEQ ID NO: 125761 - DNA, 3560 bp, Cannabis sativa
acttagagttgagagcttaggaaggttagaggcttaatgacttaggattttagagataggctaatgctttttatatagtagagcttgcatttctaatatcctccgaaatagatgaataaatccattatttatatacttaattaataaaatacaaatgactaaattgcccctcaaaaatagatattttccctctatttttgtgggctttcaaggcccaaaccattgcttgacttgctatccacgaatgagagttgcacattaaaatcttgtgaggccaaaggctagctggccatgtacctacaggttgcaggctgactagccatacaatgcttacaggttgagttatggctgaccatgctcctgctagggtttggcagacaatgtgcctgccagcctacaggctgcacatcaagtggttgccagcctttgtaggtgatggccagccttgggcatggtcagccttggtaggtggaggccaacctttgtaggtggaggccaacctttgcaggtggaggccaacctttgtacactttttccttgtagaggtcaggcttccttggtcgatcagaccctccctcagtataaaagttaccttttggctggccagcttgtgctcaaaccctagccgaccatacaagctcatcctgactggcctgtagaatcttcttggccagccagacatggtggtacaactccttgacagatcacttaactcttttctcttttttattgaaaatttttccataccttataaggagactttgtcttgctattggtaaggttgtgctctgcgtgtcctttgtcttatcttacgtgggtatgccacatcaggtagaaaaaatttgggataatattttccccccaagtcctggtttgaacatctggtgggatagggactttccagctctcgtcttgcttgtagtagcctctattgagcagctttgtctagctaactgttagctttttgcatggcatgtcattaaatcattaatcttctctctccatatatgcttcatcttctcttcttcaacatctcttctttgaacctactattgataagttttaagcttttagaaactttttgattctcacgttagattgtaatcttttttgtattttgatccacatgatagtattagaacgtataatctatgactttatgattgaaaaagattaaattttggccttcgttgtgattcttaactctttgagtcataagaacacaaggcacacattcaagttttgaaaaaaaaacacacatttagattcaaaactaacccttgcttgcgctaggggtcttgcttgagacttggctggccctacgatttaatcataggagttggctagctttagggtgtcaccctaggaagcttagccggttcatgcctgggtttggtgacccttgctagtttttggctaagtaatgggaccctggttgaccctcttaaagcttgggaaccctggccgacctaggctttgggtccatgagggtggccagcttttggtcctcttttgacttcggtaagtatcctgtcatggccctgtaggcatatacaaccttcttcttatgcacgttttccttagaaactatgtattacacttaatggtgagtctattatagtctgatgctcaacttaagactcaacattttccaagtagtttcacttgagacttgtactttgttgatacctacccttgtacaatgacataatttggcaagtacccttgggtactattgcacagtgttttgtctattgcttggaacctgcatgtaactctgacttttggcttgggagctgccaagaactctgccttaccttagcccgttacgtggttcctataagaacattgtccagttcttctctagttttatggttcttatagagccttggccttatgcatttgaaccaaaattttattcacattcatcctttaggctttcatgttcttgcttttggcctatatgtactctattttagaatactattattgtttagccttaaagccttttactgatcgtccaagctatcttctaattgccttgacatgtaagtgtgaagatttacttttctttatctcaagctgaagtatggttgcacttgacttagagggagatttagtagcttattttaagcgttaaaattcttctacataagttttctatgctagtttcatgcattgtacagtgtgggtgtccccaaagtgtgaacgcagacttatggtctcttggtctcttacaattcacaaagtttcatagaccttgctttgggggtgctatcgggtgtacgcgtgtggaactaaaaaagaataactttaagaagttatctttgttaacaaggagtttagacacaattggtcttacatgtaacaaaagcttacaacttagtgttcacttttgaaatcatgttttggctacccttgcgcggcttactacacaatggccatcactgagaaagtaatgggaggccatgctgaaaagcgatgggtactagctcatttatatttggctacctctatagggcttaccgtgtgaaggccatcactaaagagtggtgggaggccatcattgagtaccgatgggtactagctcttttatggattcatacacgatgaaatgttagacaaaccattatacaagttgtctagtaagaggacttacccgagatgttctctattccaatatttcagtaaaagagccaactccaagttcttgttgtactaacaaggcttgtatgcacatttattgtcatcttgtaatgcaatgtaaacccttttcagttggctccaagcatgcttaatgcaagatctttgttgtcaaggaatattctttaggaagtaagtctcttacaaagaatttctttttcgatctatttgttgaagggcctactaactctttgtgggcaaaaatgccactttgagtttgcttggtctcttcttgttccctttcgtcaagggatccttgaacatctttgttataagatgtttgtcggttgctcttacattctttagccaaaaggacattaccttttagcaatataggcctacatctatcaagaaacttgcatgttcctagttgaatggatacatcttgatctgattataacctgaataggcatccataaagcttaggatctcatgaccagctgtggcatccacatgttgatcgatccttggaagtgggaaataatctttcgacatgccttatcgaagttagtgaaatcgatgcagactcgtcatttattgtttgtcttgggcactagtaccgggtttgacacccaaatagggtagaattcctcgataatgaagttattgtgcataaattttcaacttcatttttgtatgcttgtgctcgctctttatccaatagccttcattattgttgtacatgatagaagttttgatctatattaatggcatcagagaatactgatggactatttcgaccatgtcttcatgcgaccaagaaaaaatgttgaggtttgcccttagaaaatttagggtaaataccattttcgaccctctgttttacaaaagttaccaattggaccctgtgttttgtt

SEQ ID NO: 125762 - DNA, 1578 bp, Cannabis sativa
  modified_base (33)..(46): a, c, t, g, unknown or other
  modified_base (320)..(320): a, c, t, g, unknown or other
  modified_base (1349)..(1353): a, c, t, g, unknown or other
atcaggtacgcatacctaattattatatattannnnnnnnnnnnnngttatatacaaattgatcttgggattattattaatttttctaacaggccctgggtgtaccaatataaatgtgctacgtgtacaagagtgtacacataagtagtttatgttggcagctaactgtaaaaaatagatgacacattaaatttactaacagttcagtcatttggagggttttattttatcaccaaaatttaagcttggaagattaagtacaaatacaaatagattaataattgaaaatactaaaaaaaatgtctctttcaacttactcntctctttctttcttattttttattttttttatgaaaaaataactaattcatcttaaagaagaatgactattaagttgggcacaaaaaatattatatttagctcaatccctcaccattttttttaaaaaaatatataatataagaccagtcacgcatccgtgtcccccttctatatatctatatatataatagaaacttgaacctatgacatgacattcttaaactcctctatttttatttatctattttatcatttttcttctatttatctatgtaatcaattatttctaaccactaatcttaattattaattattcattaatattaatattaagaatcaattaaaaaccctcctattgaattgatggtaactcccatttacatttcaattcacaacgacacttaaaaaaaaaaaacttttcaatatttaaacagtttagagttgttagtattaataatcaaataattttcttttattaaattgataataactccaattaatattaattaattacaattacactctcaaaaatatatatagggcaagactatagtaatacttagcataagtttcttacgagtagggaaacttttttgatgattagttttagattagttattaagatataaggtttatacccttacgaaaggaatgcttatatataattaaattttatacatattataataatatttaattatatatttattttaaaaaataaaatcatatcaataattaaaaaatttattaatttttaatttaaattattattattttttaagttaactctcatataaatcttcacactttttgtaccaatattactattgctctaatattttttctcacttgatagtgtgttctctttttttttttttttccttttattttattttctgttttatttttgctaggaaattttcttttcttttattcatcaataaattttaggagttttttttatcaagtcattgtttttattaattttgtctgttatattacattgtcttattattattattattatnnnnnttattattattattttgacaaagtgatttagattactcaagaatttgcaataaaaatatcagcatttggagcgaaaacctcaatttttctttcatttttattaattaatggattttataggtttctagattagcatcttttttttcgttgtctttatatataaatatgtattttctttgtattttttatttaaatatctatcttttttattaatattttatttta

SEQ ID NO: 125763 - DNA, 1389 bp, Cannabis sativa
gttttgccgcaaataacccttaataaaattacataatttatttttttaaaaataaaataaaaataaatgtacaatgttgatttattagaaattttaatgcactagtaaagtaattggtttggtgataaactttacacaccacatgaatatataattcgaacagtattcaattatttattacatttgtgattatataattggatactgactttttttggtctaaaactatagtgctattcatcacctaccaatttctatacattcatttaacactccattaactccattcattcatagcttaaaaatcccccagaaaaaattactacatggggtagtttcagcttaatttgatacaatatatatattgatttttttttcttttttaatgaatttatgtattgattacgaatgcacaaacattatggaaatcaataataactgaataaacagtaccaactcattaaaaccatttatagcaatagactccaatctttaatgttttcttttaattaagttttggaaacaatcaagttgtgtaagttggttgaacttggacatggacaagataccaaaaatcaaattatgtcttactttataaacattataattttttggtcaaataagagaaatcgaaaaagatactcaatagtaccacccatcacatgtgagctgaatctcctcaaatctaactgcttatatatataaaatgtcagtactcaaaaaaatatataataagtttctgaaatgtaggaattagataagaggttattgtcaactttttgggtgaaatcttagaaattaaatacttttcatgatcaatcaatagatcttgttgtgtatgccgtattttattagtagaaactaagaaaaattggttagcaattagtgcatgcatactcaataaggccaaacaatttttattttgcccatataaatttattgtgagatatcatcacatgctgaaatatatatatatgttgatatatcatatatggtaggtttaggaaggtataaagggcttttttgcacacaatgtatataggtgtagtgctataataaagagtcgatatctaatcaagaacaatctagaacaacatcgctttttcattctttttttcagtccatatatgctgaaatatgtatttcggttgaggaaaagctttctttacaacttatctcattagtaataagtttctttttataataggcaatttctgttatcgcctcactcacttttgtctacatgtgtatgtcataatgagcccccactttacaaactctccctccgcgacagtgtggtggaaataaggtagagtatggtttatttcaaaattaattagtaaggagaggtatagtttatcaattatatagtattaaattttcacatat

SEQ ID NO: 125764 - DNA, 536 bp, Cannabis sativa
aaactattctgctggcaactctaggattaacgtaatcagtacttggggtgaaggcaaaacaagagatcaatgttgcctcatcatcctaatctcctcctcaagctgttgaatcccagcctccatctccacgaaccttggctcttaatctaacagagcctgaggtggattttaataacaacctccgtaggttcttcctcggccaactcggcttgggaaactaaggggatcccattctcgccatctgcaccgatctaatcaaccttagcccaattgcatgattcttgttatacgtccattctataggacaaacctgtgcatttacgagttagctcggtcaggcagtgatcgcaaatgaaatttacctacctcttacctgggaacttagtatgctcctatttagctattaatctactaacctgctttctaccatgatttttaaatcatgcataataaataaaactgctaaaacacgtaaaaacttactaaaccatgacactacaacatttgacttcattagcggcggacaactccgccgc

SEQ ID NO: 125765 - DNA, 1169 bp, Cannabis sativa
tacttttcctttatatatataaatttagatagattgatatatttgatacactacgctacaataaaaataatacttttataacaaaataaaattcaataaaataataatttgttgtagaatgtttttttttttctgcaaggtaaaaaatattttccaataaaattttatactgtaaacattatagtgtactttgtatctaatttattctatagactaataagaaagttattaaagtcctctaagaaaatagtagtgttataagacacgagtaatacttagtatcatttaaaggtagcgtcttgcgatagttagcaatattttataaaaaatattatattaaattatatgatatatactatttaattatatcaataataatattacatgtttgagaatgttaggacttttaacttttcctaaaaaaatactaatttttacgaagataaaaagtagttgaaatgataagtaacataatgacaaaaccatacatttatagccaataatttaaatgaagtattggtcctgttctaaccaaaacaagataatattgtattaatttctttcatgagtactaacaatttttctacttcatattttaacaagtaattggtagaaaagtttttttttttttctcaatcacatattcgattcacaaatctcaagtttctgacaatactaagtaccaacattttagagaagatccaagtgatgagctattctccttaaattatttatataaaaattgtaaaagttttatacaagtttttttttttggcaatgtaaataagtaatgaaaagttaaaatataaactcatttaacaaaaagcgtactttaatgtcaattttagcacaacatttgctatgattaaaatttacatcataataaatacactattttttatttacatttatatcatttgtattattttattagtataattaactatagcattaaattataaaacatttatattatttttttttattatcttacatattgaaataaggctaattaagatttttatcccctacattttaacatgtaccaaatcatgtcctttaaacttttctggctgtaaaaaattctccctgatttattgagattgttagatttaaagacttttgtttaattttattcaattatactatttcagtgattgtttatgtac

SEQ ID NO: 125766 - DNA, 1710 bp, Cannabis sativa
  modified_base (41)..(52): a, c, t, g, unknown or other
aaatccgcacttagtgtggattggatgttgtttgaccaaannnnnnnnnnnnggatcggatgaacacccctatctccatgtggtggctgccaatgctcagcacagtctcctagtaaaaaactaggacccgagaacacaacatctaaactatgagcaatgagccactgattatggtagtttttagccgagaacactatactatccacacttgtcaatttgttttgccaaaccatatcattccttgcattccaaatagcctaacaaagagctaccaatagcttttccatgtctgaatcaagcaccagaaacttggccacgcaccagtccaaaaaagatgagtttggctgcactgaagtgccaattccaactatgtcccagcagagtttagcagcagggcaagcaacaagagcatggattatcgattcatcttcaacgttgcatactggacagtgagcagccacctcacgcatttagtacgaagttgaaccatggttggaagacaaccttgtccagctctccaaaccagatttttcatttttggagggagtttcaacccccaaaatttcttccaacagctgtcagttgctgtcgcgtcttgtgtattctcaccatggatatcttgtgccaatttataagcactccttacagtatatagaacagaaatttcacttgtccaagtgaggtaatcttgtccatgatcatgttgtagaagggttatgaggaacaaagtttggtctcgctacttaaacaaacctgctaacagctcctcatcccaactgtaccatctatagagaacaaattacaaaccttggcaccaacaagagcaaggtgcgaagagataatcaagggatttttagtatcgggtagccaaggatcccccaaaaccgagatacaagtgtcatccctaacagaccaacgaactcctttaaacaccaaatggcgagcttcaaggacactatgccaaacatagttgggattgttaccaatatcagcagtgataaaagagcctcgcggatagtaccttgccttaaaaatacgagacacaagggaatcagatttggagagaagcctccatcgttgtttacccaaaatagccaagttaaaatctcttaaattacgaaagcccatacctcccttcgatttatgtttacaaaggtttttccaagccatccaatggatacctttagatgagctattcgaagattgccaccaaaactttgacattaaaccttctatatctctttatttgcgggatcaaaaaacactcatggcatagcttgggagcgcttgagaaatcgtttttatcaaaatttccttaccagccctggatagaaactttgttccccaaccaagtagtcttttcctcaccatgttcttcaagaaacccaaagcagcaaatttgttatgtcccgtagagctaggtaaccccaaatacaaactgccctcagtagccgtgaccactcccaaaaggaagttaatcctatctttcatagaactcaaagtatttgaactaaaaaagatagaagagttggaaagattaaccttttgtcccgaagctaattcaaatttgtgtaaaatttcctgaatccgaagggcctcatcttctgtagcctcacaatataggtaactgtcatccgcaaataacatgtgagagactctttgagcaccattcgccaccttacaaccatgaaaccaatcacgttgttcata

SEQ ID NO: 125767 - DNA, 1244 bp, Cannabis sativa
  modified_base (345)..(345): a, c, t, g, unknown or other
aaaaaaaaaaaattgggccttagaaaaatgggggccttgtgcaatggcccaagctgcccaatgcttgggccgaccctgctattaagtaacagtggtgtttagcaccttttcgacatgtcgcgttacgattggctagcgatactctctaaaaattattatattaaattatataagactcgatacttagttggatagccgatatattataaccacatagaagggttgctaccaagtgtcttttagcatttctctaataattattaggtatcacattgctattatataggcagcactatacgattggctagcgttattttttttaaaattatatgagactcgatactnaattacaccaataacaatatgattccgatgagagtgctagaccagtaacaccttttagtaattctctatagggcacagtggaacactttttagtaattctctatagggcacagtggagcccaatactttttataggtgccatcctacgattagttaacaatatttattaaaaactattttttttaagttatataagacttgatacttaattatactaataactaacaatataacaagtattagcactaataatattttttagcaattctcataataatagcactatctaatttttttaataaaaaaacatttttgtcttcggaattattattactatctgaacatttatcttttgtgtatttgttttaaaaaatttcttcaatattatattttaccatatatcaagtattataattacagaattgttctccaatcaactctggacagaaataaataataattaatttggtatatattataacaaataagagtagtattatataatattcaaggatagaaaatgaaaaaaaaaatgtatattacactggataataaatataattaattagattatatataatttttttgacgtaaagttatatattaattaattaaccacatatataaaaatttatatgtgacactttttgagtctagtaattaataaatgaagaaaacaaatatattgtttattaatttaattattataaatgaaaatatatttggataacattccaagattatatagttatacttataatccgttcatattttgtcactttttatatttattaaaacggatttttcttcagtaaaatatttttttcttgaataattacgcttcatttatacatatatatatactaggtggttgttacgtgccaagccacgtagtgtta

SEQ ID NO: 125768 - DNA, 2095 bp, Cannabis sativa
aagaaagtaattaaaatagtggtgagatggatcccactattattgaatataagaatggtgtggattctatggaactttcaatccctccctttctctatctctctgattttcttaatttctttctaactatgatttaaaaaaattaaatatgatttatatgacaaaattaataaaatatgatttaaaaaaatgagaaaaatagtagaaagtaactgattacaccttgcaccagttaccaaaaattatttttcctatattttttttctcttgtaggacaacatgttgcttgacgctcttgagtgaaaacttataatctacataattaattaaaatcaaataaatcaagcgacaagtcagtcattctatgaggcgctatgtcgcttaacctgttatcctaagtcaaaaataatatgtagatatcttcaaatatctccaaactcgttaggtattctttttcactctaatggagtactttagtttagacctaatatcacgctcttcatattttgcttattacatttaaccaactccaacacgaagcatggggtttcgctagtttttttgctctcggggtaggattttgtgtattttttttttttttcttttggtttaatatttgagctagtttgtgtttagttttattggtatgtttgccacccttcattacataacgagtgtacttttactatttttgtattagtctttattcggatcatctctctttagatttgtattagctttttctgcttttcaagcatatggtagacatactatgtattaactattaattatgtgtcatttaaaaaagaaaaataaaatatttacaaagtacaaatgttgattctaattttaaataattatcctaatatatacattactataatcagagtcgtttatattcccattttttttaaaaaaaaaaaaaattgattttttaacatcatatcgataaggtccccaaaaaaatttgctacaacaattatttaaacacttattaaaattttgttccaaactccataaaaaatagagaccaccctaactaaaatagacattacatttttgataagtttattttaagatgcatgcttttaactttaatttagcattaaaaaaacatttttgtgagcattaattatagaaaaaaaaaattaaaaaatagcatttgttttttcaatgataatcttcattattaatcataaaacaatcacattcttttttgaaaaatatggatcatatagtatatattttaaagcatatatacacgtgtgattccaacaaaaaaaaaaagaaaagaaaaacaatacttagaactttttcatacaaacatttccttctatagctagccatgtatgatacatactagcattaaattattctccatccaatgataagaaaacatgaaatattatttattgattagtaatatatgtttgagaattaataatatataaatttgtgtatggagaattaattaagggtagtgtgacattattatatataataatttatagttatttaatttgttgcccacaatggtaacaaagtggtccacttcctatttccacaattaatttgcctaattattttggttgatgatgactagctacttatatatattctctctctcttatttcatcttcaaatgctttttttttttaatggaattaataaattggcttcatatatatgtcaatatattttactaaatatatatagaacaatccatataagttttattaataaattttgatagtttattgcaactcattaataatttctcaaatatgattgcgtgtaacataatggttgctaaaaaaaaagtgagatttatttttcttgtttccttcttttttggtaataattaatttaaatttaaagtatataaaattacaaagctctcatgtatagtaagaaagtatatattttaagggcttttttatttatatttttatgattgattttttaattatttataaaaatagaaacaatataatcttgaaatggaaacagtataacctcgacatggctcatataaccttaaagtagaaacaatataaccttaaaatgaaacaacttttataaaaatataaaagaa

SEQ ID NO: 125769 - DNA, 1127 bp, Cannabis sativa
taatcatttacatattatgaaaaattgcatgtagcatccattacatgataatgtaaactcatgtaacataatagtctttttttttttttttgtttatatctgtttgtttctgaaactaaagtaactttagcaatgaacataatattcttcagaaaaaaaagcacataacattaatttaagttttccaccggattgtaaataataaaaataaaatcgaggacagctctaaaatatattattgacaataaatttttatttaaataaaaacggtagctcaaattgaaaaacaatcttttatttataactaggttgatgttacatgtaaatgtatgtataattaattttttctgaagtgatcttaagtgcaatatatgtatgtttaattttttaattaaatgtatttttttttttttttgaaatgagatttgaaattttaatttttaagatttttttaactactgcacctacattagtgtatatatgtcttctatcactaattagtacttcatataatcatgatatatcaagtttaacttaccttacaaatataatttggttaaaaataattttcgattttgatataaaaaataatttatataaataatatttcaagatcatgtacctttaaaaatcacgtgaaatgcatccatcgataaaattataaaaatcattatgttttactccacttgtatattgatcaaaaagaaaaaaaaaaaataatatcagcacactaaatatgattagaagactaatataaaatatttacaaatgaaattcttatataaaatatctacaatatttcaagtattttaaatttaaataaaaaaatttcttatataaaatttctatataatttttatctacataatttttattttaaatatatataataatattataaaataaataaagaattgttataacaaaaattccactgatacttcataggaggacacgtgtcaacctgagaaaaaacgaatcaacgagacatggatgtacaaactattaagttgcatactgacgagaaactattttttatatgaaaacacaatcataaggatgacatgttgactgttagaatacttagcgtatcatatacattatacaaactaagcataagagttgaa

SEQ ID NO: 125770 - DNA, 1091 bp, Cannabis sativa
tagtcttttattgtatttttttagacactttagtattttatagatttatgcatactatgtaaaatgttatttagaattgaacttaccaattattattgttgttattaaaaatgatattaatcattcatttttaattaagttttttttttatatatatatatatactctatataattataaaaataaaaagtatatttattagttattgaaaaaagtgaatgaaatgaaatgtaataaaattaaaacaaaaaaaaaataaaaaatctatacatttgcaaaatgggattaaaattaaggtgacttttttatcccatttaaaaaaaaaaaaaaaaaagtgggataaagggtatttatacatgttctttcataaaaagtgggataaaaggtcccaatttttttattaaaaccgggataaaagggtacctttctctaaaaaccgggataaaagggatactttttatcctagttttttattaaaacggagataaaagtgtacttattatcccagttttttcatgtaaaatatgggataaaaagtatccattttatctcaattttttaaataccttttatcctactatcatgcattcctattttcattttagcgaaaaccgggagaaaaaaatcttaaaaattgggataaaaggtcttttcttgtagtagtgctaatcactatattagtaaccaaatagtttaatttttagaaatagcaaaaaaaaatatatccttctcatatatatcttaaaatgttcacattaaagaatagatcacaataatatttggggccatacaatatttttaaaaagtaaaaaaaaaaaaaaatgagaaatagaaaagatagaatataatgaagaaatagggaatcaaggcttaaaagagaaggaaaaaaatgaccggcaataatatttagtcaggtattaaaacatgcccacctattaaaaaacgttaacaatactttttttttttacgtttgtaacattgaggggaaagaaacaacaagctcaagttacaaagagaaagcttggactattgtttttccaaaccaattcctcatcaagccctaaagcaccttttgccatttggtgagcatg

SEQ ID NO: 125771 - DNA, 1003 bp, Cannabis sativa
ttttgttgaccatggtgttgacttcagacgtctccgcatcgattttgagcttgaagaggatgacgtgttcgatgttttgggatgaagacatagttggttttggtagagcaacactagtgaagaagtatcttatataagtctctatgttatatattgaaaattgataaattactaatttgtattctgtactgtagtaatacaaattatcattttagagtgcgtttgaaaagtagtgtaattaattgatttggtatgtttgttagaacatctaattatagagctaattatacttttttaattttcatggtctcccataaaaaattgagtataattatattgtgcaattattaaagactttttattttaaatattaactactaaaaaatattatttttctgagtaatttctaatcatctaatgatagcatttttaaaagtgttaaatttctcacgtcatctaaacatataatattttatttatctgtcttgtatattatttttaacactcttacttctaaaaatactttaatagtatagcacattttaagaatgttataattataatctcacacattattatatttatataaatatattttttttaaactattatatatatattgcacttttaattttttattaaaaaaaaatatagcatcaatatcattgtgtatcattaatgcaaattttgtatttcaagaataatattcttttatttttaatagtataacatccatatatttttccgcttaaactttccaactcattaaacatttttcaaaatgctatcattagtgatactcttatttagacactgtgtaattaccactctaataattacagttatttccaaacatatacgtaataaatcttttaatcttatttatagctaagtagttttgcttagactatatataaaatgttatcttttatttacttaggtgccgtttgttaacacttttttaatcagttttctgtttttaaaagtggaaaagtgaaaatat

SEQ ID NO: 125772 - DNA, 832 bp, Cannabis sativa
ggagtttaaataacaaattgtagttttttgtggagcacatttagtgtataagaatttagttcaaggaccaatctaatgagtagcacatgcataacacctttttctcaacattttgagttaatctcttctaatttgactaagtctcaaccgaaataacatcaagaaggagtatagaagattatgtgtcactatctatccattaaatattacttaacaaatataatttaaaatttgaaatagttagagtatacggttattggttattaaggagtatgatgagagaggataactataggtggttactttctaggcctatatatatatagaactttaatgcttcatttttcaccacacactaaccatgtatcaccattgtcattcacaccacctctgtcagtactatacactatcattatttacttaaatcttctatagcctcgtttctaccatacaccgcaatagattactaccagttctaatatctcaccattccattcgaagttccctttatttatccgaaattctcaagctctcctctttgtgttattttggttcaactaggatttaaataaagagtcaaggtattttcttagtctagttttttttttttttttttttagtttaaatatttgtttatgatatattgagtttaactcaaggttacatattggcttttaaggtatttttccacaaagtattggtcctaaaagtttgtaacgcaatcaacgctagtttctccacattcgatgtaaggagattaagtagaaaaacgtaagttttctgtatataataacattcataggaagagtgggaatagtaaaagagaagttaa

SEQ ID NO: 125773 - DNA, 1210 bp, Cannabis sativa
  modified_base (155)..(161): a, c, t, g, unknown or other
agtatttagttacaagttgtcactaatttaattttaatcacaacaagtattgtgactaaaaatacatttagtcataacaaattataatttctatgactaatacatttagctgcggacctgaagttaaaacaaatgaataataatttataattagnnnnnnntttttcacttttagtcacaagctttgttgtgactaaaagtaagatttttgtagtgtaaaattgaatgaaattagaaaaaaaaaaattaaatctaacaatcttaatagttcagataacatttttaacaagagcataatttggtacatatcaatgaattaatatcttgaatgatgtactataattgcatttaaaatattcacccaaaaaaattaaaatataaatttataattattatatgtcatgccgtttatgatgataaaaaatcataataaattttcatgatatacacttagttggcaaaatattttttaattaatttgtatttttattgtgataaattcgtgtcctaattgctttatttcttatatggaaatatctattcccaactggttgtatttatttaggaagcttctcttcgaagagaagaaattttctatatggaaaagttacctattttggggatctttgtctctttcttattctttaatgattttagttttgctttgataagatcagatcaaacaaactatatttggtaggattgaaatccaaattcatgatcatggttcaaattagaaagtttcctttctgatcctaatctactgctgccgagtccaattttgatgctccaaattaagaaattttttaagaaagtttcatacagttgagaaatcatttttgtggctgtctctagggttgttatattctataaatagaagctagagagcagccaaatattttacctcttctagcttttcatttttgcataatttttaatttgtgaggagagagatctttttgtgagaacctagttgttcaactaggttttagtgtttatgttattgttcttatactactcttagggtcggttgaacaacttgattgaacaagagaaaggtcttcaggaggagactagttcaatccttactttgggaggaagtaagcactcacacatcaaagacgaatggagttcgttgtttggtgttgtttcaaaattgaattacaaagaattacggtaaagatttagagggagtctaaacttgtttaag

SEQ ID NO: 125774 - DNA, 554 bp, Cannabis sativa
  modified_base (501)..(506): a, c, t, g, unknown or other
agggatagggtaacaataaaaatggtattaatatatagagtatttggcactagcatttttaaacatgtagttttggattggttaatcatatttttattacattaaattatatgtggtctgatattaaattaaatcaaatcgtgatataaacatataatgtaatttaagcactgatactttttaatgtttctttaatatgtatgtaaggttaaagtgaattattatatgtagggtaaaattcttaaatcaaataatttcaatagatcaaaagaatttttaatagctaaaaaatttcaaagatgatttcgtacatgttaaaatttaggggacaaaaatcttaatttgtcttattaaagagaaaagagtcgagttgatttaggttgtaaagagttaaaaaatgggattatttcacaaatacaccaaaataataaaaaaaattacaaaaatacgatttcatgaaattttaaacttttttcacaattttttttattttatttacannnnnnacggtctttttatgttgtactcttgttgattttttgttatatgtatgt

SEQ ID NO: 125775 - DNA, 1046 bp, Cannabis sativa
  modified_base (464)..(466): a, c, t, g, unknown or other
agagagagagagagagagtatttaattttttaatgttcatcatttgattttcttctctttccttgaaagggattacttaagcataattataaaagaccattgcacaaccaaatggctaactataatagcatgtccttttcatctttctttcaattttttaattaaataaattaagggatctttttcttttctataatattagtataagacaaagtaacaagaagaagataaacttttttaaagctttttgagtttaagtggttaatttttttatgttcttttaataagtcattgccattttctatgtttatgaagattattatttcttaagtctagatttatatggatatgatatattatttttttttgggtgtttaaaagattatataatttttcattgaaaatatagaaacaagaaataacaacttttaataatatctattgagtatatcttgtgtgttttnnntttggttgattcttttttatttatttgctatcattattttatatttcataatctaagtcgtattttttaattcataattataattataaatcataatattaatctttcacatatttgttacaaacaaatatgaacaggtatttcaaaagtataccatagtcttcaacttctatgtgaaagattgatggaattgcaaaatcaagttgtgtggatgttgacacatatcttgaagaacttgaaagtgatcccgagttgagaataccaatgttagaccatccttcaatagtttgtgatcaagttcaatgagcatatatgcaaaaaggccttttgtcaacctcatctcaagccatttccatcacaaaaggttggacctcaattaagggccttcaacggtgcttggtatgcagactatcaagattggcttgaatatattgtattaaaggatgcgactttttgtttatattgttctctgtttaaagaagatgttggagggcaataaggtgatgatgcatttgttagtaaaggattcagaaatttcaaacttgcaaaatcaaggcttcatactcatgttggaaaacct

SEQ ID NO: 125776 - DNA, 813 bp, Cannabis sativa
ttttaatggaaaattcatctttattaaccattaacttcaactactaagtaaggtagcaaatcagttggaataaactccaaactaaaataacaatcagggtataatatagcagctctagcaaaattatgagccaccatattagctgatcgttttacaaaaatcacagaaatatttttcaataaagcaagccaacgcttgcaatcattaattacatgtccaaataaagaaatcataaaaaaagtgcctcgcggagcttgcacaactaaaagacagtcggtttcaagagaagccaattgccattgatgatctttgatccaagaatgtgcttcccgaactcccatttccactgctacttccagttctacttaaccagccaagaaatagcacgaccttcaattagaaagccatttgaatctcgagccaccatgccaaagccaaaaccattctccctctcaaacatagatgcatctacattgatcttgatactattaatctgtagtaaaatccaatgcttagccccatcacccgcctggataccaggcaggggcggagccagaacttcaatgcaaggggggccaaattttaaaatttagtataaaataaaaattttatcatatatttattttcaattaaaattaaaaataaattcttttatatgtcaaaaattatctataaaaaatatcaaaataaaacaaaaagtactctacattattcaaattaaaaatattaatatacttttaattaaagcgtatatattttataaaacaaaatgtatatatgaacaaaataatttttacatttaataaaatttaa

SEQ ID NO: 125777 - DNA, 1329 bp, Cannabis sativa
aacatggttaggcattggaagtgtcgggactagctggggtttttaacccctagaaagcaaatatgtttttggttgtgttagggggcatattggtcttttttctatgggacctttttgtcttttgtggtaattagtattctaattttattaaacttggttgataattgatattaatcttttacaaggtatcacttagaaaaaacaaagaacacactatctctccctttctctcgaatcttcaagacccaactaggggtgtggatttttctgctacatttaagagaattctagtaggatttgggtgttgcaattcaaggtataacctcttagtctctttccctttgatttcctatgttcaagttaggctttaatggattaattgttaaagatagggttctgtgttgtttattgatgtttgaatttgtgatctagggttaaattgaggttgtttgagttgaattgagctaagttttttgattattgtggtgtttgagcaaagtttatgtttaaaaactcaagtttttctctctaatggtttttgggtttttgagctaattgttaagtcttgttgctttaattgagtttattgtggtataagcaggtgttctggaagttattgagcaatttggggtcgatttgaggtgttcggagtatttttggtgtttcttgcactgaaccggtctgtcggttggggaaatttcgcgaaccctaattttttccatttttgtgatagttaggatatttccatgttatgaagatagagaaacttctagttttgattttaagtccccaaaaagtatgttagcgtgtctcttatcaaatttacgaatattatgatagagggtccagtaaggcatcgagatgctattccactcaggttgaacagcacacctaaatttggaaacaaagtaagattagcataaagtatgtatatgtgtggatgaatgcatgtttatattgtttacactactaacactagaatagttgtagtattgagtgtgttagtacagtgtatggtgtttaagggtaagttacggtgttactaccacgaatataagtgggtacgaagtgcatgtggttcaacacctagtagcacccagaagtacaatttggccctaccaacactagtacggagatggttcttcagtgcatgtggtacaatgatcatacttctgttaagaacgttcttgaccatttggtaagacttgtgctaaggctcggcagggcctaagtacaagtcgatattgcattgtttataaatattaaatggatatcttactaagtccgtcgactcatcagtttgctaccatgtgtaggtaaaggaaaggc

SEQ ID NO: 125778 - DNA, 1300 bp, Cannabis sativa
ttaattaatatgtaaattaatttatagcattttaaatttgtttttatcaggaggagcatgttgatatggaggagatgtagggcaaccaccattctcttcattcatttcagcaggaggcccttctttgtacagatcgcataaaggttgtggagtgtgctatgaggtgaaatgcacatcaaatgtgaacagagcttgttcaggaaatccggtgaatgtggtcataaccgatgagtgccctggttgtaacaatcaagctgttcattttgatttgagtggtactgcttttggcgcaatggcaatttctggccaggcagatcaactacgaaatgttggagtccttcaaattcaatacaataggttctattaataactataaaaattaaattacaaaacatatattacatattatttctcagtatagtactacaacatattttaatgtataatgattgattaaagttgttttcgactgctatatgtacctatagggttcaatgtaggtttggtgagaagagcataacctttaaagtggatttagggtcgaacgaccattatttttcttctttgatcgaattcattaatggagaaggtgaactggagggtgttgaactgaaacaaagcgaaggctcgtgggttcccatgcaacgatcttggggtgctgtttggaagcttaactcttcctccaccctaaagcctccattttctattcgtctcacttcaatgggccagaccattgtagccaacaatgttattcccgttggctggattcctggccagacttatagatcaacagttaatttcgctacttgaaattcaaataatgttggcaattaatcaaatatatatggagcaactatacatatgtatacattacacatatatatataataataattaccctaagtcaacttgtaatggaagttggaggtttaattatccatgtacacgaatatcattaccaatatttataataattatctcttctcaatctttcctactcttaattagttttaaacttgtcattatttattagcaatattgaaggttgtaatgaagcttttgatcagtacactccaattaattcacttgactatgtttcagctgtcctaacagctttgggtaacaaattcagttatggactgcttaagtgaaataatttcagttatttatttaatatttatggagaggaattcaatttgcttggattgcttttcctaaattttctattgggattaaacttatttaacttgtcaagtgagtagtgttggaatttattttaccaggaccttagatctactca

SEQ ID NO: 125779 - DNA, 1100 bp, Cannabis sativa
tacttctccagccacaaaacagataaaattacatcgaaaccatatctttatatagtctgctgattgcacacattttaactacttgattaaaataacaaccatacggaacaactgtgtagatgaaaatcttcaaaaacttgttaaatcttccaactttaagtatagattcttcaactttaatatggagggtctatccatagtaagtaatgacaaccatcttcaacctctctctgtcaaaaaaaaaaaaaaccaaaaaatgtttcaaaattataaaatcttaaaaaacacatgaaattttaaccaaaccttatatcttggataaccaaaaaaatcttcacctcttatttacttctgttcacaccctcattggtggtttccatttcactctttcagcatattttctttcacttttactacccaaatttacaaaataaagacattttttgaaaggattagagaaaaaatttccatgaagatagctgactggaacaattgttgaatatgattgaagaaagatgaagaaattagtaggattttttaagaagacgatgaacagtggagccctatttttttattactaaaattgtatctcttattatattagaaatcttttttaatctaattatttattttgttttcctcttttaggttttttgaattaagattaaggttataatagtcaaaccatatttattttgtatttaaagtattagctataactgccacatcatcatttacataatcaatttaaataatttctaacagaaggacatagttactacaaatgttataatttagaggtattaataacaaggcttatattataaggggcacaatctggtagtgtaaaaagttcagggacaaaaatgttaattcctttttttttttttttttttgagttaaccaaaaaccaacttaaaatcattattttacatataaatattttttaatggactggatcgtctaaatattgaacaaccctaaaaataaataagcatcaaatactcaaagaaagtcaaattaatcactcaacgaaaaaaactcaaatcaaatgagctcatctatgtcgacagggtccattgttgagcttcaaagaaact

SEQ ID NO: 125780 - DNA, 1397 bp, Cannabis sativa
atacaagcatttctcttctcccattgttgctctaaaaaaatctttaattttttgaattttcatattttcattggtgtagagttttttctgttactttataactgtcgcttcatttgttttggttttggctcgtgtgtactaaccctaaccctatcattctcagtcacatatgatgttcaattttttatgggtacaatatatatttgtcggtccatcgaaccgacataattacacatatgtgagtttcaaactcgcttaaattaactctttttttgtagtatagtggtttctgaatagtgattagtaactttaacttttacttttactttattatgatgtgattccagctggagaaagcaacttgccatacacaagttgattcacactccaactttttctcacttgatcactaagaattcttctatatatacataacacaacacttgatcattaagttgtatcttatatcaacacaacttgcattgtgctatagcaattaatggatcaaaatcttcaggatgatgaggcttctacttctacaaatccaactactcctccccaaatcacttcacgtacgagtaaactgcgccctcttccttatgaagtacttcacaatatcattatgtatatatagatcatcataataaatagcattaatttatatatcaatattttatttataccatttactacaagtgactaatatttattaacaggtgaatggtcggttagaattgcccttttccatgcagcactcagtggagactaccctaaagctgaacgtatcattaataataataacaataatgaaaaccctaattatgatctgattaacaacgaccttttaaggactgacaacagaagggaaactcttctccatgtggcggccggagctaaccaaatcgagtttgttaaaaaaatatttacacaacataatgagaacatcaacctcgcagaggtggatgcaaatggcaacaccgcctttttcttggcttgtgctaccggtgacatcaaaatggttgaagaatttcttaatatggaaagagatatcatcactacttcgaacattgctgaggtcagcccatttgcaattgctgtttcatttggtcatggagaggtagcatcatatttgtatcagcaacctcaaattacaacttattttgctactcgaattacagagaaaatggcaattttttacaattgcatctacaacgatttgtatggtaagttatatatgtccattaaattcttataaatttgttttagagtgtgtttggaagtaactgtggaattactaagtaggtaattactagggtggtaattacacactttagtaattacactatattttaaaatgcaaggtgtgtttggatatgaggtggtaattacatatgaat

SEQ ID NO: 125781 - DNA, 883 bp, Cannabis sativa
aaaaaaaaaagctaattcatgaaagaaagcatcagaaagatggaatagtagttttaaaaagaaacgcatacagggccaccagcttcagcctcgtcgaacatccagcgctgctcaaggggaacacgagaaatttcctggcaacggacctgtaaactccttctcccattttcaccacttagaggaagtttggctgtggcggagggggtaggaagccaaggccctctagaaaggctgaccgagaagccaaggaaaggggtttgtgaggtattgaaagaaggggataatgaggaccttgaggacgaaggtagaggtgaagaagaggaagaggaggatggtaatatgtacgaacacgatgaagctgagactgagagtatcgccattttctctcgtctcaggtttttctgagtttgggttacagcttacagtgtttgaaggatgataaagcggataagattgcccagcccaaaaacactacccctccctccccttctccctcttcctattttatatttttttacaggttttttttttccaaaaaatatttataattatagactgtaaattagatcaaaaaaaattctatcaaaaaaagagggttaaaaaataggggaaaaaaatattcgcaaaccaccacattattcgtgaaaaacgacagctttatcagaaaacgacattactgggagaaaacgacaccatttttttaagttaaaacgacacgatgttaaaaagaaaagaaatcgtcaaaactacaaaattttaataaaataaaatgataattaaaggagaaaacggtgacattataatgttatgtttttttttaaggattatatgttagataaattaacaattaaaccaagatctatttgtatataacatagaacac

SEQ ID NO: 125782 - DNA, 590 bp, Cannabis sativa
  modified_base (32)..(52): a, c, t, g, unknown or other
gtcccttatagtgaaaataataataataatannnnnnnnnnnnnnnnnnnnnataataataataataataattgccttgcctgttgttatatgtattaataatagggttgaaactagttgaaagagagaagtcacacccatgatgttgaactccgtacgttgtacagagtatttatgtaaacctcgaagttagcataaatgttcctgctggcccgtacgtaaaacggtaaatctttccggggtatttacagctatatttattagcagtaaactaacttgaatttctactaattatgatatcgatgttaaaagatatatataaccttttagttttactatgtgtgctgcaggacctactccttaatttttgttcggctacatttgatcctacgtacatttataactctccctatgtatattgcccattgcccaatatatatcatatatgtgtccaggttcggccgctttacacttcattactacatttgcttaaattttattttataaataattgtaacaaaaaatataaaatctaattttaacatcttaattgttgtacaaattacaaattaaaatagatatattaatat

SEQ ID NO: 125783 - DNA, 1054 bp, Cannabis sativa
aatcccattcttgtatatatgtctttgtaaggaagaagaaagaaaagagatctcaaagggtttgcaaggaagtaaagttgaatacttgagaggatgtgaaaacttgaggtgataatgaacccaatttcatgtgtatatatacacattttgaagacctttgatatgatggggtctattgaaaggaatagtccttttcaaatcacatgctattgccttttctactcatcaatgcttattatgtattatgttatcatagttgtgtggtcaaaagccttcatatccagcttgttgaaaagaaaacagattgttactatttaaaatgaaaaattaaataagaaaagagtacagattgttacttgcaggatgtactagcttctctaaaccacagaacatggtgaggttacatttttgttcattatttttgtttttgtatttaatgcctagatctttcatctatttgtgaacacataaaatgtccaagacatgtctcctattgcatggggccacatatattaatggccttgtcattacaaactaggctgtcattgcccatttactggataacaaagaagatttttaatattgcatcataaacatacttgcagcctttatctttctttaaggctactcttcatgttatttgtctataaaagtgattgtagaatcagattaagaaatcacattactggttgtttcagttttgatatgaaaatggtgtccttggatatggaacatgcctaagacatctattggaaatttttataatctcattctcatgaatatgtctctgactagaccccatatcctaatcctatctagggtattattgattataaatacacacaagagtcaagactgggatcataatactatcccaacttctctaatttccaaataaaaagataaatctgtttgcaagttttctgagatatctcagctcacactcttattacaatcatgggatttcgctttgcaagcttaattcatgccaaacaactcattcagaggcctttttcaagcacaaaatgttagacttttatttggacttacatta

SEQ ID NO: 125784 - DNA, 2384 bp, Cannabis sativa
ttttttttaactaggcccattgatagcgtaaagtacaatttatattgactttggaccggttaggtaaggtccaatttacgagataacagtcttccgtatgcttgggaccattttgatggtgacaagtgtcgcgcacgggcacgggcaagtttgtacaatacatgtaagagaatatggtgttggacaaaaagatatgttccttttggtggtgcacgctctcctcaagtctaacgtaggggacaaacctctaacttcatgtgaccctacatttagaggatgccacgtaggatggttttcggatgcttatggatgtctctttagttgcctgttctagattaccccatgaaggtgtctgtatgcactttgatggactgggtgggtgttccttctcaaactaatacaatctagccttatcatgtttgtaagttggactaacgttcaaatctagagccataggccgattctgttgtgggtcgatctattatcttaattgggcctaagaacgggcctatcttaattaactttaggccttggaagtacacgtgccattaattcaaaaacatgaataacaagtattttttcaaatactactgtccacgaggccacgcccagagaatgaaatcaattagtaacgtatcaaaatttgcaaatgcaattgacttatacaaagtttgaatccatctaacccttttattcaatcttttataatccacattgctaatttgatctctaaaacacaccaagtagtgaaattccttcagcccttgatgtgtgctcactttctcccaaagtgaatcttagaaaaatcttcaccgaaagatatatgctcaagttctcctgaaatgagacttagaaaagtattcttctgaagacccacacttgttcaaagcttcttttgaacctattttttgaacaacaagagaacaataacaaattcataaaaacctagcagaacactctaggttcttacaaaataaatacttttctcacaaaactaagatcaaaatgagatactagaagagataagagaagagagttgctctttaggttctatttatacattataaaaacccgagagatagtttgtatatgcttttatagcagtataaaaattacttttctaaaagataatatgataggaattaaaatcttattgatccgcaacaacaaattcacagtttgatggatcttcctttatttccatttaagtttatacctcatgaaaatagctatgaaaccttctataaaaggccacaaaaatagttgtgtatacaattgaaaactgaatcaactaacaaggagaagttaatgttcttatcctgaaaattgccctgatgatgtggcatagaataacgtgacgcatggtaaatgtagaagagattaaacggatagaaaaccttcgagaagattctccagaagatgtcggtcgacagtattgaccagatagagccgcccagcatcagatatgtgctagactgagtatatcgactagctttcaaagcaatcaaagggtgatctaatagaagacgtctgaccaacaagttcatgagaggaaatgtctaaattcatttcaacaacttatttccttaaaaataggtcaatcagcacacctataattgagagattgcaagaatcagaggaaattgaaagattacatgggattgactcattcaaatattaaatgctttattctataataaaatgtaaatagtctacattcttctccctataaattatggatcatagtcactattcaggatcgaattctacattctcaaaagagctattatgctgccaaattatttgtaacctttagagataacaagaaactcacttgatcaagctcatgtgatcttgttattctccagataaatacaacaaaaggggagtaggtcattatctattcaagggtcaaacctctataaatcctgtgttgtttatagcttcttgattattttaattattaaaacacttatatcatcgttttattgactttgaattgttgactagaaacaagatcaatattttgctgtttttcattgagataatagagactatttgttggttttatggtactaaattaggtacgcaacataagagtttcgtattatctaattatcatcgtaccatatcacaatagatctctaaatatgtatacattaaaccaaaaataataaaaataataattttagagttcacctcttgaagcctatcaaggtatcctcgaaacttctcgtaagttgtatctcttaattcagatgatggggaatttggaatttagactcacacgagtgtctttcaaatcattccaccacacacaaggaatagtatgagctattaggataaagtgtataacctttattcttaaacgtactgtgcagctc

SEQ ID NO: 125785 - DNA, 510 bp, Cannabis sativa
  modified_base (75)..(79): a, c, t, g, unknown or other
aaaataaattttattataaaccaaaaaaattgtttgcaatattatgagaaacgaacagggaataaaatcccaaannnnnaatccaaattgtttgaaaaattaaggcatcagcgatgtgagatgagagagttgtggaagaaaaaggctttataaggcatcaacgagttgtagagagttgttaactggtatgagccgaattgaggagtctttgattttgtctcttatgaagtgacgatcaagctctatatgtttggtgcattcatgaaatatggggttgttggtgatgtgaattgttgagcggctgtcacaatatataaaggctggagtatgttgagggatttggacgtcgcgaagtagatactgcagccatgtgatttcactccctgttgcaccaagtgcgcggtattcagcttcagttgaactcttagaaatggtgggttgtttatgtaacaccccgatttcccgagatgtcacataggatagtccgtataaaacaatttaataagataa

SEQ ID NO: 125786 - DNA, 1120 bp, Cannabis sativa
tgcctttactaatccatattactagagcggtcattacattcagggcattcagtgatgtttcagagacaatagaatacaaaattaggtcaccagatgcgatacctaaggaatagagagaaccgtgaggagaagaagcgaagagttcatcgttcctgttgagggagaggcggagagacgaagaagaggttgttgaggaaatcgattgagcaatggcatccttgagttggagaagagaagaggcattagggaagcttgattctaatggtctttttagattcaatcccgatagaaaagaccattggcgatagaaacaaagttggcaaaacactattaagaacccaaatcggtgaaagtagctattcatcgttttgggatggggagagtgaaatggagatctgcgattgggagtgagaatggaagggaagagtgaatagtccatctgcctgagaatgaaacgattgagatgagagaaatcttttttttttataagaatatagttaacagcgttaaaagaaacgttttaaaaaataagaattgttctcttggcgttaaaaaaaaaaaaaggaatcgttaaactaagaatttctgttagatagacacttttaatatataaagatataattattcactcataatgtatttttggacaactataatgtagtaacaaatcgagaggcgtgtgcatggtatttactcataaatgtttattagtattcactcttccaaacatgattttttagttcagttaaatattgagttccataaattttaatataataatttttatttagtatcattaaccattcacaaaataaaaaatagtgcgttgcaaattattaataactggtttaaaattccatatatgaatatgtaagttttaattaataatcaaaacaataaattttatattattttttaaggtttctttttttaaatctttagccacctcaggttgttcttttctttggacaagtctgctagccagtggcggacccagaaattaagttaaggggggaacacttttttttaagtgacggggtggatcttttcttttctacattgcataacatgttaaaaattaatgcaaatttatattttagtattaaatatagtataaagt

SEQ ID NO: 125787 - DNA, 2013 bp, Cannabis sativa
ggctactgtttaaactcaaaaggatttagatgtttgcatcctagtggtaggatctatgtagctaggagtgtcacctttaatgagtctgaatttccctataatgaactgtttgccccacctgttcctacacaacataagtcacctatctacatagactctaaccaatacaccatacctcccattacaccagcagatataccaccaactcccccacccgatcctccaagtgaatctttcagtaccaactctgacagcaatacacctactcccatctcaccaacttccttcacttcaaacacctcttcccaacacagtaacaccaacaatcaaccaacaacaaatgctcatcccatgctcactcgagccaaaatgggaatctttaagcctaaaacctatctgtcaacatctgaaccagaagtggaaccaacatcagttaaagaagcccttgctaatcctaaatggagaaatgcaatggacaaagagaacacagccttggtcaaaaataacacatggatattagttcccaaaccagaagatgctcaaataatcagcaacaagtggctgtttcgtatcaaatataatgctgacagcactatagccacttacaaagctagactcgtggcaaaaggatttcaacaagtcccaggtatcgacttttttgaaacatatagccctgtggttaaaccatgcactatccgtgtcattttcactcttgcagtcacctacaaatgggaaattcagcaaattgacatcaataatgctttcttgaatggtgaacttcaagaaacggtttacatggctcaaccacaaggtttcattgaccctcactatcctaaccatgtgtgcaaactaaacaaggccatctatggtttaaaacaagccccacgggcttggtatgatcaactcaagcatttcttgctgtcattggaatttcagcaatcaaaatcagacaccagtctgttttatagcaacaaaagaggcaaacttttattattactcatctatgttgatgatattttagttacaggtgctgataatgatcaagttcaacacattattcaagttctacacaacaaatttgctcttaaacaactcgggccagtcaattactttctgggttttgaagtgcaaaaagacaacaacacagtccaccttacacagcagaaatacataaaagatctcttgacaagaactaatatgctgacagccaagccacaatccactccaatgtgttcaaatgccaaactcactcatgactcgggtgcctctttgcaaaatgtgacagagtacagaagtataatcggggcattacaatacctatgccatactcgacctgacattgcttttgctgtaaatcgtctaagccaattcatgtcacaaccaacaactgaacactggggagcttgcaaacgtgttctcaggtacttagttggcactcaacaccttggactcaccttcaaaccagctcaagttcttgaccttcagggcttcacagatgctgattgggctggctgctccattgatcgaaagtccacctcaggttatagcatctttttgggtggtaatctcatcagttggtgctccaaaaagcaacaagttgttgctcgttccagtactgaatctgagtaccgggctttagctttggcaacctctgaaataatttggctacaatctctcctagctgagttatctatcaccacatttcagacccctattctatggtgtgacaacatgggagctagatcccttgcctcaaatccagtcttccatgctagaaccaaacatatcgaagtagatctccacttcatcagagatagagttcttgccaacaaacttgatgtgcgttatgttgataccagcaatcagattgctgacatcttcactaaaccacttccaacatcttcattccaattctttcgatacaagttgacacttggtgttcacccgtgcaacttgaggggggatattggaatatcagaagctacacaggagtccagtgaaaatgaagcaatt

SEQ ID NO: 125788 - DNA, 872 bp, Cannabis sativa
  modified_base (618)..(618): a, c, t, g, unknown or other
aaaatagaccctgtatttttcaaaatggtacaaataagacactgaactgattttttgtcaaaataaaaattaataataatccgatctaaatatgagaaaattatttatattttgtgtatctgtttgtgttagaaattgtcttcaagttgattatattaaaaaaaagttgttaaaaattaaactcagggtcctatttttactattttggaaaatacagggtcaattttgtcatttaacaaaacagatggtccaatcggtaacttttgcaaaatacagggtctaaaatggtatttgcacgtgtaattatttaaaacttgtaaattatttacttaaaaaaacatgtaaattacaaatatttttccggctctctccatttcgcaaacaaatattttctttgttggcagcggtagtttatttttggagtttttataaaaatattaaattttgagtaaaaaatttacaattttactgtcgcagagaatttttttttttttataaaaatactagttttttataaaataattgtaacagaacaattgaaacaacaatggacaactaaaaaataaccgtgaaataactgtaaaaatttaacacagtatacagtataaaacttacacnatatttttgaaaaaaatttcatcccataattaaaaaataaaaaagttaaaaattccaatatgtggtgtaaaaactcgtttatgttatatggaagaatcaaaacaatgtattttaaaatcaccaagtagatgctgtttcagaccaattttggtgctgttaagttgtaaaaagtgtttgaggaaatatatatttcagggtaattttacaatacatctccttaaaaggaatgtactgatgcactttctacttgtttc

SEQ ID NO: 125789 - DNA, 1451 bp, Cannabis sativa
ttgtctctagtggttaattttgatcaacttacttatgttatgttaatgggtgtgaagtatgaagaagtgtattaatgcaatctaagccaatttgttccatcatttatgggtctactggagctacccacttcgatcaattagcttagattttgaccagatacgaaatcactcgtgcttgatctagtagtacttttatggggattctatctatcgttgtaggattcctattcaagatcactatagtttcttgttgggagacttttgttggagtaatgtataaatagagacttaatttaaattttatttttaatcacataggtatgtaaaatttggtaaaatactttcatttgagtggtgtttgaatacaagaatgaccttattgaatcaaagactgcaaaattagaaagaattttatgatccaacaaaatactactttattccattcttaagaagaaaaaaaaaatgttccttttattcgttttattgatattgaaagataaatcttaattttgacttgtataaatgaaaaaggtgaaaaaagaaaataggctaaagaagaataattttttttgtccgtaaaatgcaaaattcgttcatgatgatgctgaagtgcttgcaccaccgacaaagtatccatcttgacaattattgtttgttgtggcaacttccgcttaatctaactcaaaacttctttaagctcaatagttttttttgtaatttttgggtgaacagagttgttagagtatctctaaccatactttttaaacacactccttaactaaaataaagagtgagattttaaaaaaaaaaaactctaactatataaaaaatgactagagaatggagctttctacttttttgctatttttttttataaaatgttgaatttattaacacaaacgatcaaccattacaattgtttgtaaatcaggagcatcaaactcataaaaagtacaatctaatataaacaagactcgaacaacacaatgagcaattatatttgcagatcgttaaacaaaaaataatgaaacattactcaaaagcactattaatattttattattttataaaaaaattaatttatatttaacaaatttaaattataaaaagatattaaaataatcaaatactaagaagcatgattagagtaataataataaaaatgactatctattttagctaaaaaaaaaaaagaaatactcttatatattactttttttttttttgagggaaaactcttatatattacttaatgatttggttaaaattttctttatcagaaaaaaaaaaagatttggttaaaattttagaataaataaataattattttcatgtatatcttttttaattataaatatttaaattaaacttcgatttcacaaaccgaccttagctcagttggcagagcggaggactgtagttggctaaaacccattagatatccttaggtc

SEQ ID NO: 125790 - DNA, 640 bp, Cannabis sativa
ctggaaagataaaagaaagatctataacttttatattttgactttttccaaaatctaatcagaacatagttgaattcaggtttgaagtttcaactttattttcttacatatttttctctattttatatatcatctttttgtgagatttttttatcttttttttccttcttattcttttgatattttttaatcttcttctattttaaatctgcaagaataaaagataaaaagcgtaaaaattgctccaaacaagagtagaactaaattaaaaacacactaaaaattaacctaaaaataatgctaaaaacaacctaacagcagtgggctcctgttttgtcttgagtttgtcatactttgtaggtatgctccatttatctttttgttgctttatgggctttatattattattttatctcttcgtgtgtcgtttcgtatttttcaatctgttgggtcttctctgttttttttttttttgggggattaagatatctaattgggctttcatgcctttctcatttttctccccaaaacacctactaccttaggggttaagttgaaaaatactacttttattaatcaattgatcaaatttacctctaattttatatttaattgaaacatacctctttttatatgtatt

SEQ ID NO: 125791 - DNA, 1925 bp, Cannabis sativa
aaaaaaaaaaaaaaagagtaatagaattgtttgtggtcttaatgtattgtacacgatttttttttttttttaactaaaaggcttgattttaaacttttgcaaaaaccccaaaatacttagtccggatgtgagttttctgaaacatggatacaatagtatgaccaaacaagtttataaatacatgtttttaataatcattttcaaattttctatcttaattcacttttctaaaactatatgttttgaattaatataattcacttatttttgacgtgaatttaggcaaataattataatatttatgtaattgagaggagaaagtactacaaacaaacaaattttacatagttcggctaaaatttatccaatgtgcgtatgagagaagttctggttgagaatttctttttttaccaaagttacgtacaaccttgttctctctatcacttcgtgtgcatttattaatcaataataattattcactcgatcgacacaaaataatatattttaccataaaataaaaaacctaacatatgaaacgaaattatattacatatcatattttacagatcaaacacatggttattaattaaatattgatctgtacgtagtacatatattataaattaattttatataatagccagcttgcattacgtactttttttggtaggtggcaaaatacatggctaattaatattacttttgcaacaaattattaaagaagagagaaagagaaagtatttatttcagaacttgaattaattgatgatgagtttgtttcaaatcagtatctgtgaaagctatattgaaacaaaaggacttcacactatagtatctatatgggatatatagtaattgaaaatgagatatgaataataaaaaacactcccatttgcttgggaaaaataaaaaaacccaactcctttcctcaaacaaatatgaacaagacaagagagggtaatttggttttttgttctggaccacaaaaaccctaatttaaattaattaatattatatcatgctagggaatcgtttgtttttaacttaattatcaaattttaattcatttttttgtcgtacatataaatgtgtaaagatacgcgcatgtgtattcctcttatatctttttagctatatagtcctttttctttctttcctttttgctaacaaaaaagaaaaaagctataaacaaaaaatcgcaactaattccagcaataaagcaaacaaaacagattagagacaattacaattgcagcaatgaatgcttacttactagttgctatcaaacttttttgaaccacacacacatagatatattatcacatgcatatatatatatgtatatataaatatctacacatataaactatagatattctacaatgcgcacttctctaaatagagttaattgatgcacttcttactgtaaaaaatcttatttttatagttataacaaaatttgtaactaaaagtaaaataattaattataactaattataaatcatcattcttatattgtgactaaaatgtttgtggctaaaagtattatttatagaaattataatttactgtgattaaatgtatttttaatcacaatacttgttatgacgaaaactatattaataaaaatttgtgtctaaatactatattttagttataagtaattttttgttatgactaaaaatcatatttagttactaaagtcacattttatcacaaaagttatgttattactaaaaggtatctcttttttgtagttctgtatcgatattttcgatcgagaattttcgagtctacttttttttttcatgttcatctacatgcagggccggccctaggcataggcgggctaggcccgtgtctagggcccactcattttaggggcccaaataaaaaaaatgctttttaaaaaatatacatatttt

SEQ ID NO: 125792 - DNA, 1397 bp, Cannabis sativa
agtacattcgtttgttggcgctagatttaagacatcaaaatttgataaaaattcttatcctttctcttcaacaaatttatttaatcctctggctagctactagtgccatgggctcttctatatagtttaccttgagttataacttttttgatggattatcttgagttataacttacattgataaatttggtcttttaactatgacattaggagattcagccaaaaaaaaaaaaaaacaaaaagaagaactttgagattaggagactaatttgtcaaaataaataaataagaattaagttgcaaagtgtattataatttcagaggctatttaaaaatccattgttttgctgtcattcggagagagagaaagatgtccacgtgggagcaaaagtagacttatataacatcattttccaataaataagttatttcaatgaataaataaaatgaaagtgtaggagaaaataaacatagagtaaagctatagaactacccatatgttagataaagaaagtttatatcagtttattaaaagatcatcattctctttaataatatttattcaggtaagatatatgaggcaataagaagaagaataacattgaaacacagttatgagcacacaccgttttgtatttattacagatggtccaaagaatataaacgaatgtgtttttagtgagatggtccaagtttcatgtttacgtatatagctacttaattatatgattctctctctatctcttttcttttaatttcctctttctgacccaatatttagccagccacttcaaattcttccaatataatagaaaatttaaaactacatataggtaggataagggtagggtatggtagggtctggttcaactttcaattttaattttttattcacgtaccctcataattaatctcatcgacgagcttggcctctgccaagtgccaccaaacccacatttgtaaaaaggagcataaagtaaaaatcgggaaaatacgggtgcggtttttcgacacaacacgaaattgggatgagctcggaaggtacgagcatgactagctaggcataaaaaaatataggtttggatataggacactatatgatgctacaaattagctcaatacgatacgaaaaatatgtccttaagcaccacacgcggtatgaaaaacacgaaaggtaccacatataagcaaggatagactagcaagaaaagcataacacacaataagcccaaaaaacacgacactacatattaaaaaatcatataatttattcataataataagatatgaatttatcaattataaataagtataaaataataataaaacttataatactgaatactataattctataattaagactattaaagcacgaaaattagaattatatatta

SEQ ID NO: 125793 - DNA, 1101 bp, Cannabis sativa
gggggggggggtattagggaggggctaagaaatcactacaacaaaacaactttttagatgttttttttcacaatttttataaaaaatgaagctaaagagtgtaaaaaatacccgctttttaaaaatttatattgaaagagttattttataaaatctgtagctataaacatttattaaaatcctttgccttcgatttttaatcaaaaataataaactataaaaacacgccccatggtgtcggttatatgaaaataactgacaacatagggtcatttaattttgacacgtgtagcttataccttcgattatttgaaaataaccgacgggatagggttatataataaccctttcaacttcgtcttcttcttcacgaaaccaaaacaagcggagagaacagcaccacaaaatccttgccaaccaccacacgaccaccaccccatatcttcgctatttttacactatttgagcctattttttttaatcttttattgtccatacctaaacttatacacccgaacagtttaaatttttaccctattttaaatgtaaaccgaagccaagaagtaattgtggtggttataactctggccaccagttttagtggagaaaaaaattaaatctcaacgtccattaatgtataaatataatttctattaattttagtaatgtacattactttgtttttgattttgaacttttttttgaagatttttctatattattaagattatgttgttgtggttgtgcatggtgactggatttttaacggcattggttgtcggattacagtaataaggtaaaaatttaaaccttaataatatatatttatgtattttgtgtttcattaaatatgtattgtctgtatatagattttgtagatgtattgtatttataaaaaatattataattgtattatatatattctaagtattgtatatgtatatattaagtattttataagacaacgtagctcttttttatttttttttattttcttattaaatttaatttttttccattcctatttatgtctttttatatttttactaactactaactagttaccttttttcattcatattcatatatttttattactaa

SEQ ID NO: 125794 - DNA, 633 bp, Cannabis sativa
  modified_base (135)..(145): a, c, t, g, unknown or other
gactttacaaattcaaatttaaatatacttaaactattttacatataaatatgtcattgagttcagtctcactttagcaaaacacccacacacacttctaataaaattttgaaaaattatctcatatattatttnnnnnnnnnnnaaatttacagtttgggttgttctgatggtttctccagtaatttttatgtgggttgctatgtatattttgattgcaatttaagttgctctattagttgttacgtgggtttctatgtaaaattctatagaaatataaaaaatatatatatatatatatattttgaagtgtaaaaatgaaaaaaaaaaactccaaaattttttatatatgctctatgtgaaactcattgtaccaaagaaatttttatgagatacaaaaatagaaaaaaaaaatgaaggatttaataaccttttttataattaataaaattttaaaacaatatgatactaaccaaaagaaaaagtaacattatgctgccacaaaataaatatatatatatatatatatatatataggagaggtctgttgtcacgcatgtgatttttgagtgactagtgctgcacacttttaatagccattagattgtattgattttgatctaaaggctgata

SEQ ID NO: 125795 - DNA, 521 bp, Cannabis sativa
aattttgtaatcacaagtatatttttctgaggaaagaaggccgacgttcatcagattcttctcatttaataagaaatctatagctcgcaacccatatggcaaactaagtaggatcctgtgacgctcaacaatctcaagagcagggactgatctccgaggaacctctgcaaacagataaaagttcaataaccgactttaaagatacaagttaatattcttatggttaaagtttacaagaaagagaacttacgtataatgcgaaaggtcgatgtatctattggagagaggcccgttgtcgagaagaaatcttctttaaaatctatcttgtttggcagcctaattatgatcttgcgatcaccagtgtaagtcccaagatagtagaagtctcctacatcattcttcctcattgggactgctttgactaagtaaaagcaggctatctccaaaggagtagggcactcccatcctaagatgtgatataggaccttcaggctcgcaaggatcctatacaaaatggggtt

SEQ ID NO: 125796 - DNA, 719 bp, Cannabis sativa
aaaaaaaaaaaaaaagatataatctcaaattagtaactattaggcttaaaagttcagaaattgaaagtagtatgtatgaatgaacactaaagcacaatcatgaatcaacaaccttgagggttctcaaactcctcttttttttagcacaaaaacaacaatgttgattaacattatgaatatgaaccaaatcaaagaaaataaaacaaattactactaattcaataactatacttttttttcaaatcttttcatactttaagatcatgctcacttatcgataaaaatttaaaataacaaacaaaactcctttatattatcactgtcatacatatttttttatagaataatattaatagaaggtctaattcaatttgacatatacagagtaccactaacaatgcttaatgatgctcaaattaaagatgaactaatatagatagttggatttattagcacaaaaagtcatcaaaattatacacgaaagaaaaaatagaaatgtagaaaaagataccacaatagaaatctgccacctttgataattccccatcgtagacgagcctttgaccaatcgcaattgatgaatgacaaactgaaatggaaccaatcctcaccgttgacgcggtttttcgtcaacggatttaagaagatcgtaaaacgagcaagatgaacacaagcaatagttaatcaaagtaaaccggtttgcaaaaggaaattcacca

SEQ ID NO: 125797 - DNA, 1502 bp, Cannabis sativa
  modified_base (43)..(45): a, c, t, g, unknown or other
atctcgaaagataagtacttttttgtaagtgtttattttagtnnngatcaccctaatggtggtgacttttaatagggcttacaaaagtatgaaacaaatactatgctatactaaaagtacatttttttaaaaatccaaaaaatatttccccaccaactacttttttcacatttcacaatatatcccaatgataattttccaagaaaaataaattataaggcaattatacaaagaaaatgaccaacaaaaaatacggaaaatggtctttagccctcaatggtagtggagggttataatagcaattttggattaaaaggccctcttttgaaaaaaataaaattttatatgtatgaaaagaaagaaaacaaaaccctcacatttcaatattcattcatcttctccagtttactcttcattttgggttggatattttaccaccattggaggagattttgaagctttcgagtgattcttggacacttggtggaactcttcttcactatgggtaaatttctaacacctccatagttatttttttgcattaaaatcatatttttggtggcatttttgaaactttttcttggttttcttgctatggccgaatttgacatggttgattgagattattggatttcttgatataatgtgagtgtttgatgcttggtttttgtagtatagatggtgggtaatgtatttttggctttgatttggtgcaatttgacgaaaaaaataaggaaatttgaaacttttaggttggtggtgttcttgaatattgaagaacactatgaacataaaaaatttcaatatttccctccattttctcaacactttaattttcatgaaattggtaaaaatgtgtttgtggtggtgtgaagtattaatcttgggccttttctctagctacaccccgagatacctctttgggggtcggtctcccttggaggtcggggtagtaccccgatttggctttcttggaggttggggtggtacccctattttgaccctcttggaaggttatacatatgtgcttaataatgctttgtttatttttattttaagggtaaaagcacccaaagacacatatatatatatgtttaagaaaagtcaaggctgtatgtatgttactactcaccccgagacttgtgtctcttgtttattattttttctttaagaaaagaacacataccaaggtggtttgatgtgtctcttttaaaccccatcatgccaattttgactattgtaatgtgctattttatttacatatatatatatatatgtgttatggagtatacaccctgagactaggggtcgggggtaccctgcgacaccccctttggggttcagggggtacacacccctgaataacaagagatattttttatatatatatttttttccttttcaagtgcatacacccgagatacccctttgggcgtcaggggtatgttatagtgagatttctctcacctaggaactcgagaccagactcctatttaaaggac

SEQ ID NO: 125798 - DNA, 829 bp, Cannabis sativa
  modified_base (27)..(42): a, c, t, g, unknown or other
aggatgttaatgaaacatacatggtannnnnnnnnnnnnnnngtaaaatatttccaacatttatctccaccactcttggtcgaaaaccaatctccactgctctcttcatgtagatatcttcttcgagaactaaattttctcaccatattttggttcaatacatcatatatatatatatttgttacaaatacacaaatatgtatattataaatacatagccaaaataaaaagatgatcagagaccttgtgttcaacaaagaagatgatcggaactcctccacgtgcgtgatgaagaagacgaccatagctcctccacatgtgtagcgaagaagacaatcggaccaagaaatgaagtcagtacgaggctgcaacttccattgcgaatgatgcgtgttgtatatcgtattaaatttactaattaatgttattccaataattctaattattatagcataaaagtaagtacgagtcaatcccacgagaactatctcttattcaaaattaaaagggggattgtttttactttttttagaacaaaattaacaaataaaattaagaaaagaaataaaatgaaatactacgacatttaaaaaatagtacttaaaggttaatatccaccctcaacagtcatccttaattactaataacaaatgttatttcaattttccaatcaaattattaatcccacaaaaaatgccaaagcaaacaattatctcaatctccctattgcaagtaatcaaggtgaagcgctcaataattaactcttttaactaagcaatcaatctatgaagcatacaatttatttaacttagataaagctttaaattca

SEQ ID NO: 125799 - DNA, 1180 bp, Cannabis sativa
aacaatcttaatagttcgggggaatttttaacggacaaaaaagttcagcacgatttagtacatgttaaagttcagggaaaaaatttactaattagcctttgaattatcatgattgagtttttatatttaaggagattttctatagtcaagaaactatgtacaactttacctttaagtgtatatgttgcttcttcgtttatataaagaaaattgccaaaaatctatccaggtacaataattctatcaatatagtcataaatattttatgtgcaatttttactagtaatattaaaaggttgaagcagggctagcccttacaaaaataataagctcaagaccattttaataaaattagaaaaatgagccctctttatatatagatattaataaattattttattgcataataaataaattatgtatacttgatttatttattttatttataggacaatctagaaacaaaggaaaactattatttattttatttatagaacaatttagaaaaatgtagacgaatgaaataaataattaatatatgaatgatatgatttagcatatactggccagccaacataactactactacaacattattaattatatataggatcatcccaaatatggaaatatatatagatttcatagataatattaaaaaagtaagcactaatttctaagctaccatatcaaaataatgttattaatagattcaatgtaacaatttaagaaagataagaataatttgatttataaattacatgtcaatccatacctagaaacttctagtttcctcaagatatgtataataaattagatagttcttttcacacgcatgttttcatggatacctcttatttatttacctgttttttaatattgaagaaacctttattttttttgactaacacattgttattttaaatgttccgccctacaaataagtcagagaaaaatcgatctaattctatttgcaataatttttaaaataaattttaaccacattgtaaagaaaaataaatctaaactgagacacttttttaaattaagtaccttaagaataagaatcacattcgttgcattgaatcactattgatccagcctaaaaataatccacaagtgtatcataaaatcccatgccaactgagtcctaataatgtttaaagaaaagaacagacat

SEQ ID NO: 125800 - DNA, 1975 bp, Cannabis sativa
ataataataatttattgaggttaggtagtccttgaataatggccagagagaagtagtgtagtagtatcactttttgtcaaaataatatgacaaagtcatggtcaaaataatttatcattatttcctatctgggaaaaaggtgtgttttaactaataatgcatgtgtaataaataaaaataaacaaataaaataataaaaagaatgatctacacaaatgtagctagagaaattttgtggaaaaaggaattcacactatattaaacaaataaaaaatcaaatatatattatatattattaaacaatataatatatagtatataatgccttgatttgaatgtctctttcaagtattttaattacttttggaattaggtaaaagctcttttgaagaattagatggatcgtgaaattagcatatataaatatataaattatgtatatagcagctaataagctatatatataaaaatatatttagattagatgatcaccatccttttgacaaaagtgcatagaattttttgaattgttaatgtcaaacttcatatagtaggtttcgatttttttggggtgcagctaagctagctatattttttattttgatttgatttgagattttttttttaattaattattgagcgttagtacatatatacatgctaaaaatgaaaatgttctcacgtgcaagagaatataaacaaaaaaaaaagaagcaattatgtgtttaagtggaaaagactatatatattatagaagatatgattacttagtgattgaagaatataattagcaattaaattaatattataaatgataaaagaccataaagttaaaaacctaacatcccacccaaaagaagattaaataaaaaaaattatagtaattaattaaggggtacgtagaaaaatcaaggaatttaaagtagtcgatattgatgaaaagacttatcacatgctttgttttattttacttttcaaaaaaaaaaaatcttctctgaaatgatcatgtggaaactctaggattttgaaaatgtaatatataaagagagttattaaaagagttaatttcttaattaagatctaatatataactttaaaatataaaaaagcttattcactaatggcactttttatataatattattcggacgtaagtaatatatttataataatatcaataaaatatactctaaaataactagattttttatatatagcttgcactactacataaatatatgtgtgatttagcattaaataattatataactcaattaatttacaattatggaaaaagattgataattaatggggacaagtttcgtgcttttgtaccattaattttaaacttctacacacaactctttccctttctcatcactcatatttcaaaagaatcaaaactacctaactactttgattattatttttgtctataattttgtctataatttttcttttttcttttgatttcctacgacaacatggcctctgtgatttatatttcatacccactttattttatcagttttaatttttactttatatttttaagatatattcacttttatatgatattctaaatatccattaagttaaataatgtaaatcatgtgtttaacttaagtcgagagtaaaagtatatgaacaacacactacaaaaataagtatatttcattatttattaattaaataaaatatgatataaaaatatttttaattaataaataaaaaaataagtatttttcaacttactcctaatttataacccaatattgtttcttttattattattattattattttttttttgaaaaatagtcagctgaaactttcatgcatgaaacgaataatttcgtgttaaagccattattaatttcgcgaatttgggttttttttttcgaaaggtagcgaatttgggtttctagtttctactaattaattctatactataataatagttaatatagtagaa

SEQ ID NO: 125801 - DNA, 735 bp, Cannabis sativa
cagtttaatagttagtaatttttttaaaaaattattttttaagttatatgatactccattcttaattacactaataaaagaaaaaattagataacaataatatattttaacaattctttatttttgatatatatatatatatatatatttgaaattgatgcgcagtaccattcacatttataccttaatgaaaacttaaagttactttaacttgtaagtaaatactctacctaaataatgaaacaaatgtaaactaatagtgataatgtaaattaatgagcaattaatactccagttcgttaattagagtgtattattgtaattgttatcataactagaaggccaccctcgctaatatttattgtactcaattttttgatagtaaaacaaaatattaaatagattaaaccatgacatataaatttggagaaattaacaaaaaaaaaaattgtatataatcttgccttaattctattaatttatgtgattgttttgttttctttgagattcataaaaaaggaaaataaatatactaattatagtagtttttgttgtgtgtgttgttgagcaattttttgacaattaaatttttaagttgtaaagaatactggagataaatttttttggcagttaattgtcccgtgatccgtaaggcaaacaccggttaagttgtgcaatcccacaacgtttagggaaggtcaagcgtgatgattctgaggctgtgtaggtatgaga

SEQ ID NO: 125802 - DNA, 1326 bp, Cannabis sativa
aactacggaaaaactattttcagtaccagtttctttattccgcatttaattaatcacttaattaaataattaaactgggaacattaaaatacggaatttcacatgtattgacgagacactagcctacctcggaatacacagatcctaggacaagattcgtttattttaaaagaataagtgaagttactcaaagcaacctcagacaatatatagcgaggcatccacctcgctattcataagaaacttgacgaggtgaatcatttatcaacacttagcgtattttctacattacaataaaggataacaacttggaaatatacaagatatgattgtccagtctgcgaggcctaatggtcaaagagcacttcttaagtttgctcagtacataggtgctcataccactgctggaaggcatatgattgtccaaatcagcattgacgatctacgagttaagcgaggtgttattgtccaaatcatcatttaccatctttgaggataaggatgacaagcggttaagcatttatcaagtattatctagtaaataattcaattgaaatgtgggaattaaccacgtttcattaaaatagttatgtattttgaatttaaatgtaaataactgacaacctatattcttataaatgggggcagatcccacagaaaaaggaatggaaaaatctttgagagaaatacagaaatacgattaattatatattgtattaaatactcagaaatatcttgaataagatagactcacggagtatatagatttaactgcaaaaccaaataaaaatattcagtgttattattatactttctatactttattatttcatataatttttgtgttaagtttattatgaaaaaggcttattattggttaacgaaaatctgcgttaacaaaatacattaatgtattttttttataaaaaattatatatagaataactccattaaaaaaataataatgtatttttcttttataaaaaaatacattaagaaattgtattataagagttgttttttttttttgtaaataattatttatttatttttattaatgaggtgatagttgagtgctacatgctcaatatgtgcttcccaaggagtctaatatttcttttattttattttttttaaaaacagataaaattaataaaatattttttctatttatataatatacatgctattctatactaaatagtttaaatcttcaaaaatttattagaatatttctaattaaggaaataaaataatattattgattctgataaatgaatattttatattcattgaatctggacagaatcaattacgtaatattct

SEQ ID NO: 125803 - DNA, 882 bp, Cannabis sativa
ggcataaaacccaacaaaggagtcatttaattctgctacaaccaatgtaaggtttctcataccttttatgtatttatttgatatagttttagaggttcatgtttaggatattaaaaacatacttgttagtaaatctaggtcctagtaaaataaattccaacatcgggaccgagactggacttgcccgggatccaaacccggacccgggaccagaccaagacccactcccgaactcgggacccaggcctgggattcaggctcagacccaggactcagaccaagacccagacccgaacccaggaaccaagcctaagactcgaccccgacccaggacccagacccagacccagacccgaacccgagattagaccaagacctaggttttgggactcaaacctgaagctgaacactcagacctgcacccaaatccaaaccggacccagacctaaacacgagacctagggccaggacttagactcgagactcgagacctggacccgggacccggcccgagactcgaagctaggcccgagactcgaaccaaagacccgagacctaaagcagggaccggacctgacccaaacctgggacctagaacccaaactagactcggatcttggacccaaacccaaacccaaacctagactcggacccaaaactaagaccctgacatagacctgaacccaaacccggactcaaaactggatccgaatctagacacgggacctgagaccatgaccttggacctaggggtgttcgcggtgcgggtggtgcggtttgtgactattttttcaagccaaccagcacttgcggtttttcaaattttccaaaccgcacctgcaccgcaaaattaaaaacctgcaaaaaccgcaccgcaaaaaa

SEQ ID NO: 125804 - DNA, 982 bp, Cannabis sativa
ttcttcttcttcttaagctttttttttttttcaatttttttcttcatttgtttgaaagattgatccatgtttgttaaattaaggttttcattacttcttgctcttctcatctccatcatcttcaaaaaaaaattaacttcttaagcttctttttttcaatttattttttattttttgtttgtgcatgttcaatcgcaaatatcaatttgggattttgttcatcactctgattttatataattttatattttttgttgttttgtatgttctattcggtgtttagcattatatacttgattttttttgttttataacgattattttttggttattctaattttttttttgtgtatttagggtaaggggaaatttttcctcacaaaagagttattaaggtatagtattttcttgtgattttatttggttattttattttatagttttgttttccagctgttctggtggttcggactgtaaatgttgaaaatggaggcttcttatgtgttttagggtgtgtacagtataaaaaaaataaggcgaggacaatatttttgtaaaaaaatttgtgtgcctgtataaatataaaagtgccccccaaattcagtatttttttgtataaaccattaacaaaaagagtacttacaactattaaagagaatataaagcccactgagataatcaaaagactaataaagcccaataaagcaaataaaagtagtcatacccaaattaacccatgagtaatttgtataacccgacccgaagccaagtacactatttttttttggaataaaatcaggagattattagttaataaactcgttcaaaataatagaacacactttagaggaacaatcctccaactaaagcacacaacctacagagaaacacgagtttcttgccaagcaatgagctaacttgtttgcagatcgtttaacaaaacacaactcaacaaaagataaagccaaaagtaaatttcgaa

SEQ ID NO: 125805 - DNA, 1871 bp, Cannabis sativa
gtaaaataaattccaacagcttcatcactgaacttgagcagaactaagcccatggtaattctaaccacttgaacaatacctaaatgtccacagatgtgtttgatgaatccctcgaatactgccattggatgaattgctccaaggaccatacaaattatagccaacctccaatttttcgcttgtttaacaacctcatctggatcaatacgagctatcttgactccatttttcatcaacggtttagtgtatttagcatcgagtcccttaaaaacgagttccccttcaaaaaagagttccaatgattctttttcgattcgtgaaacaattcctactccttacctaacttaatatatacttctttggcccaatcaaaacctttcagaggtgtacgatccactttcaaacttgattttagataatctctttctccatttgatccatttctggtgaattagccacttctgcaatcgggttcaatcctccaactgatcttgtatccttaatttcacccaatccgccttgcttctcttcattagacttctgaattgtagatcgaagaactggctttcaaacaactcttctcttctaatattacaacctttgaaattagaaaataaattacagaactaatctccatcgctgcaagggcattttgtaattttgtaagatcttcgtaagccttaaagttaattaaaataattttaattaataaattttaaataaaccttttatttaaaatatatcttaaacccttttaattagtttattcttaaataaaccctttatttaagataatactcttatccttctaattttatcttaaaataataacaattattatttatttatggttaagataactttcatcttaatttggttacacgtttgagttggaatttcaaacctaaaatcaattatattatttaattcaaaaatagtttttaaaaaataaatatcccacaaaatattattattttaacttaattattaaaaataataaaactattttttttatttattataaaattattaggagacttattattttgaatttgaaatttaaataaataactatgatatttatttgaaattcaaatcaaaataaatattccaaaacaaacttcattatttataattaataattattagataatttatagtatatatactatatatacactatatattatatatacattctatatacataatatatatactatataaataccgaaatacatatatatgtatacattattgggtaacgacactactacaatatgggcctttagcttcccttttttcaactccttttataaaaagggaagctaaagagtgtgaaaatacccgcatgattcgaaattaacatttaaaagcggttttttggtaaaaactataggtatagatattaataaaccctatacattcgattagaaattgtaaaattttgaggatttttagtaaaccctatgccgtcggttctttgctaggaaccgacggcataggtgcacactttattgattatatatatatgtatatgttatttttttaaaaaaaattaattatagaatttagtaactagtaacttgtttcattttttaatatctagtaagtaatttattaattaaaattttattttttttgtatattgcattatattataggttgtgagctaatatttgaggtctgacatatttcggtgttgatcggattttaacgtgcaataggtatatctattcactaatttttgtcattataattaattatcaatgcatgcttagtgaagtttgaatatcttaaatattcacttgtagtgaagtaggttttgcgaatacatgtattgcagtcggatgggtggagaaattttgtat

SEQ ID NO: 125806 - DNA, 1303 bp, Cannabis sativa
  modified_base (1151)..(1159): a, c, t, g, unknown or other
ttacaataaaaatgtaaccatcgaatagtcacccatatatatatatatatactaaggatggtatatctccatgctgaaattttaatatttcagtttttatttgtaatttagtttcattttaataattttgtttgttacatttatatattaattttgtaaatattgttatatttatgctttctttatttgtatttttttttctatattatgcttttttagataaattaatttttattttgtcttaattcttaagtttacttccctttctaatttttttttgcccccaaaatttttaggtccgcatcagagtaacatacaatgcatctttacttagagatgtattagagttaattacctatttattaatttaaaaaataatcataaaattaactctaatgcaattcaattattttttaaatacataatgttgccccaagtttctttcaatatacgtggcagtctcggtataggacacgtggcaaattaagaccccccacctgaagataataaaagtacttaggccaaatcccctctaaaggaaccaacaacttgtctggggagctagcttccgaacatgggaaggccatctcgacttcctctccaggagctggaaggcatataaactcttccaggtttgtggaactagagatgaactgtccgctcgcattttaatacaacatggaggaagcgtctgagaacacccataagaggacgtgtcagacatcataaattcgtcttttagaaattacacgataattaagggtacaagaaacaactctattatgaagaatcacatcaatcaagaaaggatgaaggctaatctcacctaaagcctaggcaacctactacgtaggttatgcatgccctatttcataaatttgggaacttgtgcgtgcccaaggctggcacttagaacaaacgagacatttcttcttatttaatgaagggataggaaaaaaaagaacacaaaacattctctgtaagaaacacccacatattaataacagagactcatggactgaggctcattaatacccaaatcacgtaaaaatatttgcattaattcttcctaagctataattattacgttaaatatctagttgccaatctcggtcaacacataaaatttaatttatttttaaatttatttnnnnnnnnnatatatctaactaattttattttaaaaaataaataagtttagatgttttaaaatatataattaataaatttattatgaagtaggctaattaggatttttacccctcgagctttgacatgtaccaaattatgcttcctgaacttt

SEQ ID NO: 125807 - DNA, 769 bp, Cannabis sativa
  modified_base (723)..(724): a, c, t, g, unknown or other
taatactggacaacgctgaattgtccttccaactacctttcaccttcaagatcaactgcaaacaatcggactcaatggaggctaaggggatcttgattgcagaacaccagaggaggccctctagcagagcatgggcttcttcaaaaaggggagaggaggcaccccattttaagatagagaaccctacagtatgctggttctggttgttgcgaattgtagctcccaaacctgttttaagctacttgagatcgagggcaacatcaatcgaaagagcaaagtggcattgtggaggagagtgaggaactggatcaattacattagttggttgattgtcttggatagatgggattcgatctgaaaccttggactccaaaggatcggtatggattgtgatagtgtgagcttcttgataatcctgcaataaagagtgttatacccaaaattcagttgtgtaccagaagctgacacatgtcctataaaaggcatttaaatcaactcaataaatataataatgacattatatcattaaatgtaattcaaataactcatttgatttaaatatatatatttaatagagatgttcaaactcactaactatttagtcttatgcgacacaagaataataactattaaactaagaattgacgagacatatgttttcctcagtatagacagatggcactcaaccgcctcgcgttactcataactgttgggttttatgcnntaaataaaacttcatttcaatgtaatccagtttattcaacatcaa

SEQ ID NO: 125808 - DNA, 821 bp, Cannabis sativa
  modified_base (767)..(774): a, c, t, g, unknown or other
ttccaacagtagctcggtgagagtctaaaggcctatattaataggtgcaacatcaaagcggccaaggtcaagaatgttgatgatagtgggggactcatggcacttggagcaggaataactcatgtgtttttactatcagatagcctccaaggaagaggtgcccccaccatcgacgaatttatgaagagggcccaaaagtatgtaaacattgaggaggccagaatagccaataacctacctcttcgctcaacacaacccgctccagttaataccacaatgaattccacaaatgcaaaggcaacaactaccaaccaccaataattctgggcacaataacaagaaaaagggcgacaatggaggagatcaaaaaaatactaagaggagcaaaggttactagcccatgttcacaatatactatgaactggtggagacacaagaaaccatatatgtggcaaacgaacatcgggtagcctttcggatacctaaatctctgaagggaagtcgtgcgaagaaggatccaaccaagtatgtcgtataccataaagacatcaagcataccactaacgagtggttgaacctgagagatgagataaagactctccaatgtaatgggcctcttgcccactatgcaaggaatagtcaatacaacccacaaggggctagtgcataacaacctataatcctacgtgccaatgtgaaaccacacgtggcactaggaaataatgctcttgttgggtttcgtgccctaaataaaacccatttccatnnnnnnnnatttactaattaataaaagataaaaaattattttatgttgcatggtt

SEQ ID NO: 125809 - DNA, 920 bp, Cannabis sativa
caacttgaattatgttgtaaaataatggcgcacacaacaattttttaaagaaatttccgaaattttgtgtttgtaaaaataatgaagatcaataattattagttacgcagaccgtgaaatgttataaccagatgcacagttttgttctttctatatgtacattttgtagatgacaatatattaccaccgtgaaacttttttttttcttttaaaaaaagataaatacttaaagatactagttagtatacattttattttgttgttatatagttatttattagtataataaagtattaacttcgtataatttaatataataatttttaaaaatattactaattaattacataaaccacctcaaaaaggtgctaactaaaaaaaaattaaaaagtttatttattgtattcacttttaaatagctaaattagattataggttggtgaatctgttacaagttcagatttcagcataggcaaattagatatgtgcgggacgatgcaaaaaaccattttctcttattaaacttatactgttttttattaatttttaaaaaaatatcatttttttaaataaaagtttaaaatatttttttttctataacctactaaattttagaaccggccttaatttattagtaattgtttggttgtcaaagcttaaaataattttagcttatataattaaaatcacaaaaaaggaataattacataaaatattaatttttgtaaaatttttatttttttatatttaattttttttttacaatttttacgacattttataaaaatacaaaaagaaaaacataaaaataaccaaaaataacaaataacaaaaaattaataacaaaataataataatacaacataaaaatatactaaaatattataggaaaattctacaatgcacacccttaaaatgga

SEQ ID NO: 125810 - DNA, 882 bp, Cannabis sativa
agacggttgtggacgcgttggttgcattggagcagcctcagttatcgctgcctccatttgtgcacattgttcaggtatcattatttgagtcatcaactgaagttgtctttgcatctgagttacagtttgccttaagtcgggttggtcagtagctgcaacaggttgtgagcgccgtcttgatgatttcccttttaatttgtgacacaatcctcgctcgtggccacgcctctctccaagagtctcacgaagtatctcaatctcaacatcttgtgtacaattagaaggactagattggttgatcatattttatcttcatccgtacctactgtaagaataagttagaaactaaacaaacttataattatttgaatatatttaaaagtaagtagtttacataatcttacatattcatttttggcatacttgttgacaaattcgtttgtgccattctttgtgtgacaaaccttccagttctcaatgtgactcatgttttggtgataaatataaattataagaaaattacaattaaattaaacttcataaaataaatagtatatatattaacttacattttcacgaaggatctcagccatagtcatcgacccttgagttgaagggaatttcatcttctgccgattgagatcgatcattttgcatagaacgaacaataaactcaggagatgtgaataattgttcttcattgagttcattggggggttcttgactacaatttcatagtcttctagttttttgttaaaaaaaattaaaatgtatgagtctaatgttctttctcgtcttgtattttttggccaattcagttaacgaaaaaactagtaattttggatcactgtcaatttggtaataatactgcatttgacaaaa

SEQ ID NO: 125811 - DNA, 585 bp, Cannabis sativa
aatacagagtccattttatcatttaataaaacagaaagtccaatctataacttttacaaaatacagtgtccaaaatagtatttacccttaaattgattgtataaaatgttgtgtacttagtagtaaaaaaaatctaaataattaagaacatgatcatattaaaaataaaaagtacattaaaaaacaagtggagaataaagtaaaatataaaattatgttattttcggcagaaacaatgacccgtttcttcctccattttcttttttttttttctctataatataatttaattttattcttacttatatagcatataataatcagaaaagatgactttgactagtacataactacttaaaatgtagcttgataagattttaatgaaaatctaaaatatcattattcattaaattttatgaaagaacttgtctagataataccacaattccatcactacgaaaataattacttttagtgataattttttagtcataatataaatttttatgactaaatgtgacttttggccccaataaaaaactacttgtgactaaaacatagtatttaaatacaatttatcattaa

SEQ ID NO: 125812 - DNA, 2143 bp, Cannabis sativa
agttcatatttatggtgttaaacaacatacatgtgagtagatctaagatcctggtaaaataaattcaaacagttgtagcattgatgctattcatttttttaacaaaaaatttatgctaaaaagttattatagttaaaaattataatatatattaaataataatttgtgagatcataattagagcattttttaaaaagtgttgtacattgaagtattttaagaagtaaaaataccaaaaataatggggaagagaaataaaataaaaaatattatatttttaaatgatgtgtaaatttgtagcatccttaaagactgctaccattagagatgctctaataacaggttattaataggcaaaaattcttttttcagaattatttaattataattaactatcttcttaaaataattaattgaatatttaacaatgcatcttttagcaattaatatttataaataatttattttttatataaattcctactataattattttaagtcattaaattataatttttataataaaattttattttttttacaaaaattatttacatagattagaattctcttcttgcataataaatttttaaataattaattatttttgaatggaaaaagttagctttctctcgtggttcttgctcttgcagctgagaagctggtgccatggctaaaacaaggtcaaaatctcaagggaaagttcaatcgattactaaagcaaacaggaagaatggagtgaagagtggatctaaagctgttcgacttgctagggaagaagaggttgctgaaattgctccgttggagttaacggatgaagaggatgaggtggcggacgaccctgcaattcacgatgtatctcaatcgccattatcccctaaaacgtcactggagatgattcagaagcaggaggggatcagaatgactttgtgcacttcttgcgagccaacgatcaatgtaacagtgatgtggcacaaggtaaatctccaattcccccaactctgcgatctggttctgttatgagaaatcttgaaaattcttttaggagttctagtgatagcaccagtaaagttagaattacttttgagcatattgaggaagaagtctcattctggacaccttctgttgtatgctatgttttgggggccaatcctccattacatgtgcttgaaggttttgtcaatagaatatggaaagataaaattgataaggtgaaactattggcatatggagtctttatcattcgatttagctctatagaatatagagatcagattttgaatggagggtatattttctttaataggaggcctgtgataatgaagccttgggacccccatgaaaattttaagaaagagaatgtgaagtgtgtgccaatatggatccaattagaggagttggaactgaaatattggggtcaaggaaccctgtccaaaattgtaagtcaggttgggaagatggttatgcttgatttggttactagggagagagagcggttgagctatgcaagagttatggttgaggtgatgatggatcagaattttccagattttctggaatttgaaaatgaattcggttcaactactacagtgaagctgaagtatgagtggaaaccagtggcctgttctcactgttctgggtttggacacacagcggatgaatgtaggaaacactctaatgggaagccacaatgggttataaaaaaggataataggaagaaggttgagacagatgaagagggctttgtgaaggtgactcgaaataagagtaaaactgagcagaatgaatcaaaagttactgggaagaagggggcaagtattagtaactcttttcagatttcggaggacaatgaagaaagcttgatagaacagttaatggagaataatcatgagacagaggggattgatgctagaaaggtgattaaaacaagagaggggggagcaccctctctttccaatggataaattgttgtgttggaacgtctgaggggccaataatcagcataaacaacagttgattaagcaatttatcaatgctcaaaaagttgattttgttggtcttctcgagacgagagttaaggctccaaaattaggagtcttatactcaaatgtgtttcaaagttggtgtttttcttccaacatag

SEQ ID NO: 125813 - DNA, 1255 bp, Cannabis sativa
  modified_base (1190)..(1206): a, c, t, g, unknown or other
gattgcgtgcacttgcgtagtaattaataaaatatcgcaacaatccctattcccgaatgagttttacacggaagtatcaaaagggtgccacgttaaatcgtgtgcgaatatcccgggttccccttccttttaagataggattaaggaagacatcgaagtatccgggagagcgcatccattgtgaagggggaatcgatcattgaagttgtaacctaatgctttcggtattcagaggcatacgcgaagcacatgccttccggagctcttaggaattagctagtccaggaggtcccgtgttgcacttcctggaagccccctgtgacctaacttaaaattacactcgacggttacatctcgtctaacaccaagtcaaatcttatctcttgcttcagaccatggttgtgtgcatacatgcctctgttgtgcttattgtccaacagtttgtctgggatattgcttttaaaggagaaacctttgaacagtgtgtgtccatgttctcatgtgatagcctacatcaattaagcaccacacgatagaagagttacctaccaaatcaacgattagatggtcttgtattatttcacaacttcatttgcgtgctgagtaaggaaccctagtggggtaagagggtatgctctcgcccacctacgggcctataaatacctccacttttatgtatagtgggtgaacaattttacttacagaacttctgctaaaattcttagagagctttcttcgagagagaaacaaaaggaatacagagattaccattgtaaacacttgtaatactcaaacatttaccaaagaaggctaatactactgactcgtggactaaggatcattaacgcctgaaccacgtaaaagatctatccctctctggatcagacttcatgacctaggtctccaatactggggaaacaagtgcctaagtgctctagttaatactgttgggaaacctataatggtggaccagcatactaaagattgcacaagggtccaatttactcgagtattggttgaaatggatatatatcactaataatcctccacgtacaattcaatacctcaatgaaaaaggtcagcttatggagcaggggatagactatgaatggttacctatgaagtgaaaaaaatgctcagggtatgggcacatctgttggaatttattttactaacaagtatgtttttannnnnnnnnnnnnnnnnttctaaaacgatataaaataaacaaataaaaggtatgagaaaccttaca

SEQ ID NO: 125814 - DNA, 1247 bp, Cannabis sativa
gcgtcgtaaattcatgaatgattttaatcactttgtcaaaaaaaaaaaaaaaaattagttatcacttttttagtaagttttataattatgttacttaatcacaaggtaaatataattaaactaatatgttccttttattattaattacatgaaaaaaaaaacataatatacctcaactcaaacactcaaacactcaaaaactttaatatttcattaatggtactaatatcatagtagcatgaagatgatgctttatatttttcttggacctataaatataaaaaatataattataattaaccatatatattattaaatcatatatatgataaaaattaataaaataatttcacataatagaaaagaaaaatgattaagacagatttaaattacacatatttcttacacacaagatgtgtagctaatctcaatcatacaattaaaagtgatcttaaaaatataaatgactaatatttattgtgtaataagtgtgtatccagcgttacttaatagaaaatcatatttaagtctttttctctattgtgttgaactcacattaacgctatttaactcttgtcgtcgtcaatgctactgtctctatcgacaccaaccgtggtggtggtggtcatccaactttggttttctcccaataagaaaacaaatcattgattcattgttcttacctttgcaataactactgcaaaaaagagtacttatatgtaaacaaaatcagttaatatgaatgatgttaagatagttgttatgcttgtggcaattaattctagatttattatatattaatttgatcaaccaagtaattttgttttgtttgtagccttcttattgttgtattgtgaagtttgctaaggaattagatttatagatgaaaatcataactaaaacaatatgcatatacatagttgagctataacaattgttgtaagcaataaatatgtaagcaatatagatttttttttttttacaataattattgcaaagaaagaagattggtttgtttcttcattgggaaaggaataaacttcaagctgtttgaatgactattatactagcagacagaggagttctttgatgtaagccaaacaatgaaaatttaattatattaaaagtaattaaaaaaattttgtaaaaaaaatcctaatataatatatttaaaggataattttaaaaattataaaaatacggtacatacgaaatttttaatatttttatgattttttagattttat

SEQ ID NO: 125815 - DNA, 590 bp, Cannabis sativa
aatctaacatccaatatataattggattggatcgggataggcctaaaaatattgaatgtagtccaatgaacacccctaatcttaagtgtgcattggttgactttctctcagatgatgtggcagtctatctccacatgtttggtccgctcgtggtaaacgagattttcagaaatgtaaatagctgcatcgttgtcataatatagaagggcatgaatggtgggagtgattccaaaatctttgagtatggccatcatccaggtgacttcacaagtggcctgtgacatagcgcgatatttagcttctgcagaggatcgagagactgtttgttgtttttttttttattattatttctatgagatgagggaggatcctaagaacacacagtaaccagtaatagagtgcctagtatcttgacaacttttccaatattttaaattaatatatgggaaatcgttgatcaattataggccgtaattcgcaattaataaaaaaatactgggttttttttatttttacacttcaaaatattttttttgtatttttacggaattctacatagaaactcttattgcaactagcgatgcaactta

SEQ ID NO: 125816 - DNA, 756 bp, Cannabis sativa
agttgacaaccactgttgaataaaaatcaacccatgacagttgaaacccaaacctaatggccaattccaagtcaagtcagacagcaacgagctcagccacaggaaccggaaaataaccaacagctccatctacccaagcaacccacacagtcctcgaaccatcttgaacaacaccacccagcccgacaaagcctctacctgtgaccactgcagcatctgtagccagagcaaaacccgaaactggtgtcaaccacctagtagagctcttcaagattggcacagctgtcacttgaaagaaacctttaactctatgatcttgaaactcagacaatgcagcaagtgcaagctctaaaaacactacaacatgcgagagagaactgccaaaaggcactgaattcttgtcaaaacaaacccaccaaaacatcatcaaagcacgcccaaactcttctcgtgacagcatctctgataaccttcgtaacacctacgacatcagaccaccgagacacttttgtaaacttgaccaaagatccacccgcacccacatttgcacgaaactagaacagaaaaacaatgcgcgttctggtgtctccgaatcttaaccacaccacgaacaaactagcggcacaagaatcttacgtgtctgtagttgggtagccacgggaagtgtaaagaccgcatatgattaataccttgaattattaaataattaaggtttatgtatgagattttattattattaataataatacaattatg

SEQ ID NO: 125817 - DNA, 1951 bp, Cannabis sativa
caagtcaatttcaaagtcttgtaaaccagttagttgccatgaagatgaatatggatgatgagatgcaagcatcattactcctcagttctttacttgatagttgggaaactttggtgataacaatttttaattccacgccagaagggactttgactatggatttggtcaaagatagttttcttaatggagagaccagaaagaaagcacaaggtgaatcattttcttcttctagggctcttgttattgaaaagcatgacacgtggggacgaagtcagactagaaatcaacatggttctagaacaagatccaagtctcgaaaagatatcaagtgttatcattgtaaaaagccaggtgacttaataaggtattgcaaaatattgaaaagagagcaaattcaagagaagaaaaatgagaaaaaggctaatacaatttccactaaaggtgatgttatcattgtatgtgatgatgggtgtgttagtcttgaaactcaagattgcagttgggtgattgattctggtgcttcattccatgttagtgctcgtagtgattttttcacttcttacactactggcgactttggcaatgtcagaatgggaaacagtggtgccttaaagattatgggtattggagatatttgcttggaaacatatgttggcagcaaattgttcctaaaaagtgttagggatgttctagacattttccttaacttgatatccactggaagacttgatggtgaatggttcataaactggtttggtaaaagtaaatggaagctcaccaatggttctcttgtagtggacagaggaaagaaagtgaatcctctctatgtcatgggagctaagctacacaaaggagagattaattcagttcaaaaagatgcaagcattaatctttggcaccagaggcttagtcatatcagcgagaaaagactccaaactcttgatagaaagaaattcttactattgttgcaatgtatgcctcttaaaacttgtgatcattgcttagttggaaaaacacatagagtttcttttcatacacgtccaccatcgaaaaatctaattttattgctttgattcacacagatgtatgtactatggaaactagaactcttgaaggtgcactttattttgttactttcattaatgaacattctagaaaattttggattttttctttgaaatctaaagactatgtgctcgatgctttcaaacatcatgtcaaaattgaaagagaaactggaagaaagttgaagtgtgttcgagaaaataatggtggtgagtatatgggtccatgtgaatactactgtagactccatgaaatcaagcttgagaagccaattccaaaaactcctcaacataatggtgtggaaaaaagaatgaacagaataattaaagaaaggattaggtgtatgctttcccatgctaagctacctaagtctttttggggggaggctatgagaattgcagttgatttgattaatccttcagttcctttgaatggtgatgtgcttgagagagtatggagggagaaagatgtctcatatgatcatttgagagtctttgggtctagagcattttttcatattcctaaagatgagaggtccaagcttaatgataaagaaaacccatgtattttcttagggtatggtcatgaagagtttgggtacatattatgggatctaatgaacaataaggttattagaagcagggatgtggtgtttcttgaagattaaatgttcttgtgagcactagctcagttccttcacccatagtgcatgatgatcatgggggagatgaacaggaaaaccatgaagagcatgtaaatgaagaagcatatgaacaagaagattgtggtgagaatattgatgataatgttcctacaattgatgtgttgggattttatgccctaaataacacctatttcaatgtaatctgatttgttatcaatagaa

SEQ ID NO: 125818 - DNA, 1450 bp, Cannabis sativa
  modified_base (274)..(275): a, c, t, g, unknown or other
  modified_base (1085)..(1089): a, c, t, g, unknown or other
tctaaaccctaattagaacacaacatcattattggatgcaaattctagtagtagaacttgtagagatttggccttagactaaggcaggctaggcctgcgcctagaggcgacataattaaagaatatatacttttaaaatatacatatatatatatatatatttttaataatttttgaaaatattatctattcttataataaggacttaaaaattaatcaatcactataaaaaatagctatttttagtgataatataatttttttgtgactaaanntaacttttagtcacaataaaaaaatacttgtaactaaaatatagtatttagatgcaagtttttactaatttaattttaatcactagtattatgactaaaaacatatttagccacaacaaattataattattgtgactaacacatttagctacggaaataaattgataattaacaaatgttgaatttgattgtaagaacttagttgataattataatgatctttccactctatctaatgtaattaaagacataaattactctttatgctcctaagtaagttaatattttagcatgtagaatggataggaaggttttagggttggatagagagatggtatgaaatggttttaggccaagtttctaagttgtaataatttagtttgtactacttatttaatggaaattacaactttgtcgaaaataaaaaaaaatatatatatacatatatatatttttcttaaggcttaattcaactcaaggcccaccttgaactagtatattaattattgagataattacataagacactattttttgtaaaagaattacatttttacgtttaatttttttttatatatatttttatagtttttcattgaaacaacaacaaaaaataatattacattaaagtaacatgaaagtaatatcaaaacaacaacaaaaattagcatacagataacaaaaaatcaacaataaatcaacaagagtacaatataaaaagaccgtattttctgtaaataaaataaaaaatattatgaaaatatttaaatttcgtgaaaatcgcgcgtattttgtaatttttttttattnnnnntgtgtatttgtaaaataatctcttaattatttttgttgtttgtgaagtataagtagtgttatcataaatttgaatacttagccattaattcaatgctactatagtcttgctattattttgacttataggtgatttaggttttcttttcttcttctttgaatttcgtatttttcttctattttcgggcatttttcttgacactatttttgacttaactagaagctttatcttctattctttataatattacttattctatataaaatgtgcctatataacagaatttttggtttatgagaaattattggatgacttttttattttattttaataaaaaataattttattctaagatatttta

SEQ ID NO: 125819 - DNA, 1074 bp, Cannabis sativa
ctctctctgtccctctccttatctctatcccgtcccttctccttctccccatctctaccactcctctctctatcccgctcacggtcacgatctctctctcgctctccatctctatccttactccgatggcggcgttccttatcgcgaccattctcatgctctcctctcgactttttgctcctcctgttgtcatcatcttcgccgcctagaagaacagcagcgtcatcttcaacatctctcttcctgtaactcttctcgctcccttctttcttcgtcttcctcttcaaatcatggtcgtcgttctcctcgacagtcttctccaagtaatcatactcgtcgaattccatcactacgtgtgctttcgaattctgtactatgtagttcggatagggtttatcaaaaaccctagaaattcgagagaaaaatggagctaattgaaagaaattggggaatttgtaattctagggttttgtggggtttcgaatgagagactcagatggaagagccgtttggtagctgctacaggaatatgctaatcttatttttgtttcctttatttttttttattttagttttttcacattttttttaatcaagaataaattttctattaatcaaacaagccatttagcttggcacaatccctcaactaattacaagagcttacaaatagtaaaaattacccaaaatatagaaaaattttaagaggttttttttaagcataaataaataaagctaagtgtttatgagtttttttttttattattttttttacatttatatgtgtttttttatgctatatttttgtaaaaaaaatggaaatctcatatttgtaaacaataataagttttaacggaaaagtcactggcgccggagaagtcgccgaaaaagtcactggcgtcggagaagtcgtcagaaaagtcactggcgtcggagaagtcgccggagaagtcgtcggaaaaaatactgtcgtcagaaaagtcaccggaaaagtcactgtcgccaaaaaaaagtcaccagaagtagatgtctcaaatataaacaaaaatagaaccagttataattgaaatataa

SEQ ID NO: 125820 - DNA, 1237 bp, Cannabis sativa
gtccagcttcgccagaacacagaagtagactaagtgatgtcaaaatatcacttaagcatcttaaagtacatccttggatacttttacacttacctcttgtccaggttattgtcttttgttaacatgggaactgggatgtcagcctgggtgctagatatcaacttgggggctgggtcatgaactaccttcagtgaaacaactataactcactcaatattgatctgattgatgcgattcaacttacattttagagctaattaaaatctctatcaaatcatgtatcacacttcaatcacaattatgaagctatcgaccacaaatttcacccaagggagttacaaaaataagcttcgggttaccatggtaggtcccgccaggctccaaaaaatgacaatcgccattagaagctaattttcaccattggatcatcatttatggtcaaaaacatctaatttgtatttttctcctattttcgtaggcctcctttacctataaaaagagagctcccttagctcatttttcacattcaaaaaactacccacaagattagagcttctctctctctctctagtttctctttctaaaaattgagattttgacacttagtctatttctgtaataccatctcgtgaagaataaaaactcgaagtagacataacttcattattgtcgcaatacagggaatgaaaaaaaaaaaaaagatgacaaaaagagaaaaagagagaggccaacattcacaaattttttaaattaaacaaaaatcttatggtaaaaaataatttatttaaaatatagtcttacagaatttttttctttttaagtttataataagtcaaaacaaagtgtaaattaagagatatttttatcttaaatataaaagataatttaaataattaaattaaattaaaatttattcataagtaaataatatttatattttcacaaaatatgagtgaatattgttattagatattaataatatctaatattactataaaatattatcttataaatagttagcgatatttttataaaataaaaatacatgaggtatacataattatatcactaatttgacacctctttatcttttaatatttttctatattgtataccaatattaatttttaccgtagtattgaaagaatcagggccggccctaggcataggcgggctaggcccgcgcctagggcccacactttccggggacccgaaataaaaaaaataaaaaaaatta

SEQ ID NO: 125821 - DNA, 564 bp, Cannabis sativa
cacagttgtggaaattagtatttagtagtggtggaaaaggttaatatgatttaatgatgagaacctattctatttcgttgcaactatcaactgcatttttacaaagttgtcatctttccttgtcctactttcccactcataactaaccacaggcaaagccaattaattgcacgtcttattatttgaccctttcgaaattacattcaatatctatggtagcttcaatcaattgatttggattttttttcattttttattttttttgaaaggagtgataaggattgaaaaataaaaaatatatatatttttcttttttttttttgagcagaagttaatgctactgtttatatgaattaattgatacaataatggtgttatgtgtatatagaatcaatattattttctcatgagaatgttcattttacaaaattgacaaatttcggctccatcctttacacttacttcataagaccccaaaatatctatttttcatgagttggttcccaaccataattttcaaaccatattaatctggtcccaaaatctgttttcttataagttgga

SEQ ID NO: 125822 - DNA, 2927 bp, Cannabis sativa
  modified_base (302)..(314): a, c, t, g, unknown or other
  modified_base (600)..(613): a, c, t, g, unknown or other
ttacctaaatgtattttaaataataagatagcacaatataacttaaaaatagctattgattattaagatgtttacaaataagattttagatgtaaccaaattgtattttaaattatataatttaaaagtaactgattagtttcttatcagcatcataaataaccaaaaggttacttttgaaaacccaagaaaataataaaaaaaaatggaatttgggattaatttcgttttaggcatattattttagaattaaggtatttttttaatgacgtggcaaagtattattgtaattgagatttatnnnnnnnnnnnnntaaataatttatattttaagtatattattgaaaagattcctaaaattttgtagtggacctaccgagtccaataagcctctaattaatagggctggggcttatgggctaaaaatgaaatttgaataacaaatataaaagaaaataaaaggataattccacatttttcaaagttaattaatgtttagaaaattatattacataccttttttaatggaattatttcacaaaaatataaaaacaacaaaaaaattacaaaaagacggtttcatagaattttaaatatttnnnnnnnnnnnnnnattttatttacagaaaatataatttttttatgttgtaatcttgttaatctgttgttaattttttataatatgtatgttattttttgttgttacttttatgtagttttcttattgattttatgttgttttcgtggtattttttagaaaaccgtaaaaatgtaaaacaacattctttgaacgtaaaaatgtaattattttacaaaaaaatatgccttatgtaattattcatttttaaatttgatgtctttaatttttatcttttctttcaaaatttaatatttttacttcttttttcaattattatactaattttacccatataactatacaataatttttatttttctctaatcaaaatcttgccccaattttttcacaaatctacacattcatctacaaaaaatacaaatatattatatttaaaaatatgtcttaggacttccttgtacaatggggagaaacaagaatgttattctgggatttcttaaagacaaaatgcagaagcgtattcagagttgggagggtagactcctttcaaaggccggtcgtgaagtgttacttaaaacagttgctcaagctcttcctagctatgccatgtcggtctttttgttgcctttagacacttgctctgctttggaaagtatgatgtctaaatattggtggaatactacttctcaagacacccatggtagcacctggatgagttgataagaggcttacgaagagtaaaagtgatggaggtatgggatttcgtagccttcatgactacaatctttctttactcggcaaacaaggctggcgccttcttcttaatgatcatactcttgtgggacgtgtgtataaagcgagatattatcttcaaggaaatttccttacttcctcacttggaagcaacccaagcttcatttggaagagcatctttgagtcacaagatctaattaaaacatgtgctagaattcgtattggttcgggtctagatactaatgtcctcaatactccttggctcccatcagatacgtctcctcgtgtggaatctgatcatccttctctgcactcctgcaaagtctatcaactaatgaagactgatgttaaagagtgggattctgaagtgttatatgaccttttcaactcaagagaagcacagatcattctccagattcctcttaatagcaattccattgaagatgtctggtattggagcaaagaaccaactggtttctactcggtgaaaagtgcttacaagcacctacaagttataaagggtaattggtccatggatgataattcgaatctgtggaagaatttttggaagattaaagtccctcctaaagttctccactttgcttggcgtgtattaactgattgtttggcaacccgtgttcaacttcaaattaagcgagtcccggttcagaatcattatttattttgcaactctgcagctgagactacccttcatttgttccttgattgccctttctcaaagtcttgttggaacatatcagctgtgacaattccccggcccttcgactgctaccagctttcttgactggtttactgtagtgtggaatcggcataaaggtgatgccattgaagaagttttaatgatcagttggtctatttggaaagcccgcaacaacattgtttggaacaataaaacaagtacggctgctgaagttgtttctacggcacatcaagttcttggtcaatggaaatttgctcaaagctgtcgctttgagccgctgcacctaagctcaaataacagtagcagcaacgattattggacaaaaccagcagaaggaatgatcaagattaatgtcgatggtgaaacgtttgaagccaacaattcctacgggacaggtttcattgttcgggactcgaatggagctgtcatttttgcatcttcctattattcgacgggactttcaagtgcacccattgctgaaatgataagcatcacactacaagaataatgggtaataccaacgccactattaccaacgccaaaaagtcctcattaaaagtgagggtatcaataacgacacttacttgtcgttgggaaatatattcaattttttttttttaaaaaaaatagtaaatcactaacgacttttttttcaataacgacaatgtcgttattgaaaaaagcttcaataacgacattgtcgttgggaaaaattttattatattttgaaaaatgtccgttgcattggcggcaaatttccccccttttttttacaatgtcgttggggacttctgtgacagtcagtagtcccgtgatccgtaaggagaaataccgggtaagctgtgcaatccc

SEQ ID NO: 125823 - DNA, 1503 bp, Cannabis sativa
ttttgcgtttagtaatcttttcttcttcttccacattgttttgtttagttttctacatttcatttacttttatgcctaattatttataacaaagctaatatgttttgacttaaaatgcccaccaatgcaacactcactcaactatttactagaaataatctcttgagaaaaaaaatgcaaaagaattgagtgtttcattaatcgatatatttgatatacataacaaagtttcgagtttgtaagcaatataaacttaattttaattagttttttaggggtaagtatttttttttttttttggtatagaagtacctaatgttagttaatgtttaatttttgtctaattttggtaaccccatactctagtcattgagtcaacatattgcatgagttatttttaaattttcttttaataaatttaaaaaggtgtcagatattggtgaaacaggaattttacttaaaagttgatatttatgccaccaaaaaaaaataattggatttataacaaaattttggatattaatgttgcagtaatattattttatttatttattcagaaaaaatgtcattattgaaaaccaacataaatcattatgtaaacgacattatttacgagaaacggcattatttgaggaattgaattatttcaaaaatgtagaaaaataataaaaaaatttataaaaatataattgtacgaaatttattaaattttacggtttttaaaattttatttacataaaaatatattttgttgatgtattttttatgttatttttgctattttgttgttagtattctgttatttgtatttgtatgttgtttagattttttataataaataattttattatttttgtgttatttttatggtgtaaaaaaatctttaaactaaaatttttattaaaagtagtaatttatgtaaatttttcaatatatatttaccgtgttgttcatctttttgctcgagagagtatactgctgtttgtttctactcggctgctattgtttcgaggggattctttgatgttattttgaatgatttggcttaataaaatttagagttttttattattattttttttatttttatttttacaatttagaagagtttttttatatatattttaacgaaaattcacgtagtaattcacatagtaattaattaacggagcaacttaaattgtaattcaaattcagcaatctaaactgtaaaaataaaaaaataaaaaataatatatagggtaattctaattcccaatggcatgtttctttactaataagcaatgagaatcaatagtaacggagtcattttcttatatttgtttatttactttattaaatttagaaaaggtaaaacttatttaatatttgtttatttactttattaaatttagaaaaagtaaaacttaattaaataaggggaaaaaaaaaagagaacttttcccatcaattttttaagaaatgtcattaagcttaatggattttatttattttattttattt

SEQ ID NO: 125824 - DNA, 714 bp, Cannabis sativa
  modified_base (48)..(50): a, c, t, g, unknown or other
gatctttattaattaaatctgattctatattgaaatgggttttatttnnngcacaaaacccaacactaagatctattgatggaatagtagctccaacattttgtgatgcaacaacaatgtgtggtcttctccaaacaaataataccttagaagattatttgcaagaagcatcgatattccaaatgcctaacagtttgagacggttatttgaaacaatattggtctattgtaatcctaataatccaagatatctgtgggaacgattcgaaaaagacatgtcaatagattacaaaaaatcagaagattccacttcaaatataagacttgaagcactaaaataaattgctttagcaatacagtcaatgtagaaagatattaacacatacaatctcatagacaaccaaatatcatttgatgatgaagtaattcagacaagagaaatcaacgatgaacaaggtgttgaagtctcggaagaagatataattaactgcatcaaaatacttaaatacagaacaaaaggaaatttacaatgctatcctagaaaaagtttttgacaataaaagtgttgctttctttattgatggacctagtagaactggaataacattcttatacaaggctctattggctaaaatacgatcaaaaaatttagtagctttagcaacttcatattcaggtgttactgcatccattcttcctggtgggagaactgga

SEQ ID NO: 125825 - DNA, 1419 bp, Cannabis sativa
  modified_base (1388)..(1393): a, c, t, g, unknown or other
gagagagagagagagaatggtggagtgtgagagactaatgtaatagatttaggtttcatgaagaagaaggtttcggtggatagtagcggtggtggttctgttatgatggtggtggtgggaagaagacagaagaagagagaaaaaaaaaagagagagtgttgactgtggacttagtcaatcgacttagagtctgacttagatcgtagcttacgactaccacatgtggaacgataataaatataaggagacacataaattttataaaggttcaaccccttttgtttaggtaatggcctactcccttttagttgtatttactcttgagataataccaagcagattacaagctaagactttgtaatttctagctaggctctcttcaacattataataagttttgcaggtgagaagtatgaaaagatagaggacttatggctatagtacttctgagcgtaattgcatcgtaagttctaagtatgtatcttgccctttatatagtagtaggggttacaagttgcacgtagagatatccctaaaaaaatagggaagttacaacatatatttgaaatacaaagagaataataagtaatccctaaagaatagggttgttatttgttgatggagactacctatctttgtgggcagtttgaattgatccgaactcgtgggaatgttgtaggtatgttggaaggcttgtgagaaaacacaagtattggtgtgtttctgcacctttggccaaccagccttattgaaagtttccaatgcttagaggttggcacttttggccggccagctataggtccggccaagactttactggcaggtgtgtggatcccaattagcttgtatgtaccatgcagcatagaatctcaaaggttaaggagttactcggcactaatcctggcaggttagtgttgagttgtctcctacgtacttttcattttttgccacgtggaggagccacgccaagtggacaaaatttaggataacatttgtccctcaagtctctgtctgaatgtctagttgggtagggacttttcgctctattttgtattgcaacttcctttgttgtgtaggtatgcatggccagttattggactctttgacttacgtgacttcatggcagttattaattttacattaatcaacgtgagaagttgtgcaacgactgcacattttcccatattgcaactcgtggccttttctttcccatgcatgcccatttttgtggcattaactcctcattttaagtttttttttggggggaaaatttccagaaactatatataagcctcattcttcttttcattctttacttttcacttttgaaaaacaaaacttctctcaaagacttcttagagccgaaattgttgggaatattttaccannnnnnagatttactaataagtatgttgatta

SEQ ID NO: 125826 - DNA, 3270 bp, Cannabis sativa
  modified_base (3241)..(3245): a, c, t, g, unknown or other
aattattatattattataaataatatacagaagatacttgttagattggtaacgagacttgctgtatttcttctattgtttaactattttgctgcctatccaaaaaaaaaacactatctttagcagtaaattggggtattatttactgtttattatgcaatacagttcctaaattttaatgttcttttattgattttgggacccttcctatgaattataactttaaataatcaaataagtttttcttgaataaatcaatctctctctatatatatgagcaattctccatgttattaacaccagtaaaggtcggtctttgtttaacaaatatttttgatacaattttgtttttctttctatatgctcttgtacatcctcgaatgctaacaacgagaatcatgatgttgggttggatagatagaaatttcaagccaagggaattatctccaatgggcattgaaatattaataaaaatatcgtcttaccatagtttgttaggttcctacacaagaacttgccataacaatacgacgtgtcgtttggacataaagatgtcgttttgagtttgagggattgataattttctttattgattattgtaaagagaaaatgacgtagaatatagaattttttccttaagtttcatcaatatggaaaaattataaatttacttaacttatgattttttttaatttaagttaattttgtgggaaaatattttttatatttatgagtttttattaaataaagccatatctttattttattaacttatgtttagagattcgtaatatttttagagcaaattattaatgtatatacttttatattatttattattataattattttatttatttctactctacatttttattttattttttttttcaaaaaaatatttatattatattaatatttgtagacggttttttttacttaatcattacaaagtatgttttaatttatttgaatataaattaatatttttatattatattctataaaagaatgtaatgatgattttttttacttcttatttttaattttaaaaagaatttcctcatatgactgtaattaatatttataatagttgaggaagaataagactaatatgataagtgtatgatgctctcaaataagaacaaatagtgacaaagtaaaataaaaatattttatccaaccagtacatattaatcgaatttttattacataatttttaaaaaaatatacctaataacaaaaaaaaaagataaaatgatggcacccaacatgaataattgctaattaacataatcttaattgttaaaatatacaatttaaaaaccattatgtcaatttaagtactaggttactttatgttattatctttgttacatgtttaagtaaaattaaattaatcattttctttctttgtttttcttgatttatgtgtcttgttctttggtaaagttttacacatatttaggttgcaagcaccattaatgaaattcaatctctaaatatagtgaaaaatgcacaatgtaccatgtaccatattacattagaaaggaggataaaaagcaaaaatatagaaaacatgttactttttaatgtgtgcaggttatatttgaattaaaaccgtaaacaaatgtagcacatcaaccaaatttaatattttaggtaacaagttattttataaaacaagataaaagacaaaacaaaaaataggttacttttgtattaaaacaagtcaaaatataacacattaaaccaaatttgataattaagatatatactaggttactttaggaaacattgggttactttttgatgttgctggtaggttacatatgtaaaaaaatatagcacatcaactaaaattaatattctgagtaccaagttacttaagaaaacacgataaagataaaacaaaaaaaaatgttacttttgctttaaaactagtcaaaatgtaacacactcaataaaatttaatatcctaggtactaggttactttagaaacatcgggttacttactttttgatgtttccaataagttacatgtgtaaaaaatatagcacatcgatcaaatttaatattccaggtatcaagttactatagaaagaaaaataaaagacaaaaacggaaaaacatgttacttttgcattaaaaccagtcaaaatgtagcacactcaaccaaatttaatattccaggtactaggttaattacttcagaaaatatcaggttactttttgatgtttccaataagttacatgtgtacaaaatgtagcacatcaatcaaatttattattccaagtaccaaattactatagaaagtatgataaaagacaaaaatggaaaaatatgttacttttgctttaaaaccagtcaaaatatagtacactcaaccaaatttaatattctaagtactaggttactttagaaaacttcgggttactttttgatgttatcaataggttgcatgtgtaaaaaatgtagcacatcgaccaaatttaatatttcaagtaccaagttactttagaaaaaaaaataaaagataaaaacagaaaaataggttacttttgaattaaaactagtcaaaaaatagcacactcaaccaaatttaatattccatgtactaggttactttagaagaccttgagttacacgtgtaaaaaatgtagcacatcaaccaaaattaatattcttagtaccaagttactttaaaaagcagaataaagacaaaactagaaaaacatgttacttttgcattaaaaccagttaaaatgtagcacactcaactaaattcaatattttaggtaccatgttactttaaaaactttgagttactttttaatgttgttaacatgttacatatttaatggtagtggtgttaaaaaagtattatgttactttttgatgttgccaataggttatacgtgtaatggcagtggtattaaaaaagtatagggttactttgtgatgttgtttctgctacatgttagttttcatggcattcgaaagtactaggttactatttgttatgcatgtacatgtttaggttactttaataatattaaaataagtactaggttacttttatccttatctttgttaattgttttaggttacttttaaagtgtctagaacgtatcatgattatttttatttttttttgctgtgttactttttgttattgctttgtttaaggttccaaataaattttagggaaatttacatagtatactaacttttgtcannnnnttacaaaaatactgccagacggtat

SEQ ID NO: 125827 - DNA, 569 bp, Cannabis sativa
  modified_base (31)..(48): a, c, t, g, unknown or other
aacaaaacacagggtccaattggtaactttnnnnnnnnnnnnnnnnnnaaatggtatttaccctttaaaaggtgtaaataagagtgaggttttttgacacgatacaaaattagtacgagtatggaagacacgaaaaaatataaatttaggcatgatatgacacgatactataaattagtacgataaaatataaaatattaataaaaaataattaataaattaaacgggttcctgttgtggcggggagtgtcatccccttccctgtcccgtttaacattcagggacaaatttttatcctcgtccccgccccgttccccatttaggcagggaatccccgccccagggggtctacgcgacgccccatcccatggagaaaatgtgcatccttagatacgacacaaaaaatatatatttaagtacaatatgacacgagaagcatgaaagtacaaataaattagtttaaaaaatacgatacacgacaaacttaaaaagcacaatatgacatataaaaataggaacatgattttgtcccgtgattgtactttcacgaaatgtattccgtgatgtac

SEQ ID NO: 125828 - DNA, 2618 bp, Cannabis sativa
acaaagtcagttcaaacttcctctataaaactcttaacaaagacaagactgtaacccaatgaattgactatgagtgacctcctcccaagtttattcacagccctcacttagttatggctgaggaaaaccgtggttacaagctggcgaaacatacatatcttcttcttcttttatccgaaattaatcaaacatactcatacatacttgtgtgaacatatcttttttcaaaaagtcacaacaagcaaaggtctgaattataatatttagaagaaaaacagcaaaaacatatgtgattattgtaacccaaacaaagatgcaaatcattaaatgataaaaccaaacaaaatataataaacacacttgaattggaaaatcctcaaatggctgcaaaatataagacctaagatgtaaattgtaaacactctcataatgtctgtcaaagcaaattataagttaatcaagcaaaacaaacttacctcaaaaattaattaggatgttatgtatgaaatgtgacattaggaatgtgactaatcttgttccagtgctcctcattcccacttttattcgggttgtactttttctccaccagaggacactggtaggtgtataaagaggtgaaggaggttggaaagccttcttctgacaatgtctgcaactcggggcagttggtaatgtaaagtgtttgcaaagaggtgagttgtgaaagtccatttttgtccaagcctcttagttttgcaaaataacagataccaagatgggtaatagtgggaggcagtagcccttcctctggaaatgattccatatcttcttcattaccatatccatcaataataagagtggtaagatggggtaatgttttccaattccattccatcctcaaaagtacaaaataggttatacaaagacaaggcaaactaacaggcaaaccaccttcagggaaagtctctatcaatggacaatttctcatttccaaacgctccaaagctgagaaggaagtcatcttctctggcaaccacttcaatttaggacaattaataatctcaaactcacttaacttgggagcaataagtccgccatttgggaaagatacaaaactaccacagttcctgatacctaaatatgttagttcctcaagagattgcccatcagacactaagatagctttaaagtagtggctgtttacaatttcaagatatttgagattgggaaataaatccagatggaatgctttgaaggatgatccacaattttctaacctaagagactgaagaggagggtaatggtagagtggagtgagagtggtaggcagacatcctgtgaaagtagaagtgcaacaaggatcacttggctttactgcctcgtacaatgactctgaattctccaaattcttaataatcatttctgtgacatgtggagatcttgggagacttaataagggacacaccttgtcacctccaatttcaatacttattaatgaaggaaggaagcaggcaaatctccgatgagcttaggacaatcattgatccgaagtgttttgagcttctcatatgttgttgcctcttcagtttccattgaatgccattggtcccatgatgacatgtgcaaaaagcttaaactttccaatgatggaaatggctttcccacataactattcccgtaaaactcagcacccactgtcactacagaatcgaatcttgagatggaaagatgcgttaacagaggaagtttcccaaagggaggcaaataggagcaatgcttacacccattaagagttacttgagtaatgtttctaaacgaatcattcccaacccaatttggaaatttttcgccagggtagttaaaaattgcaagttgcttcaacactgtgttaggtgaaagcatttcaagcacaacctccccttgttttcgatcaacaacaacaccattaactccagtccatgccaaacacaatttttcaagttgctttttctccattacattgacttgattcgatgcttttgtaatgttgaccacattttctaacttcttaatggaaagttctccatatagactttgaagttctgccaactcttctattttagcgccgctatccttccccacaacaaaagttgtcaacattttgagatccttcaatttacttatttgacttggcatctctactaggctatttccactgataataagatgtctcaaattaatgagatgatacatacctttgggcagagctttaagttggtgacaattttccaatttcagtgtttgtaaattgtataatacagttatagattcaggcaacgttttaatcttggtgcaagaaagatctaaatagcgaagatgtttcagctcaccaattgaatcagataactcagccatatgaagaccacgaaaagatagaactcttaaacatttcaacatagaaagtaaattctgcacttcttccttagaaatactgattccagaatatcttgaacttaataaaaacgttcgcaaacgtgtagctccaaaatcatggctagctatcttattatcagtataaagttccatgacacatccaaggtgacgtgtcttcttctcaagcctatcaatgttgtcattttgctccaacaaacaactgtatt

SEQ ID NO: 125829 - DNA, 583 bp, Cannabis sativa
  modified_base (554)..(557): a, c, t, g, unknown or other
ccagcatcaaacgttatcttgacctattactcactgttttgcagattatggctcttgtttgttcccatctcctccagctacaaccgcactcgtgtggtcctccctgaagagaggatcaagattaactgtgatgttaaagaagggagtgagactatgtgtgtggtggctttggctaaagattatataggcaaagttttgtaggttactactgattttctcgacttcactgatccccttattggtgaagttagagctcgcttactcgccatgaaagcgacaatttctttgaactactattttgtgatgattgagagcgattccgagataattatcaattccctgaacgagtcctttttctatttggagtattggtaactacttgtatcaatgtaataaactcctttttattttttattttttatttttgagttgtaatttttcttttatttctagactgtaattttacggcctatatggtagctatgtggtagctaaatgggcgtttcctcataacttatctggtttggtagaggtgttaggttttatgccctaannnnaactccatttcaatgtaatctatttt

SEQ ID NO: 125830 - DNA, 882 bp, Cannabis sativa
aatctagatcgtggtaaaatatatccaacaagggcaacaatgagcccatcggatattctgccattatttgtgactaaggtgaaaaaggttgtgaatttggagcctactcctctcccttctagtgtggttgggacttttgtcctagaaacaaattctgttgttggtgtcaatgagaaggtttgtaacaatatagatcaacaccaaacagataatccaattggccagtgttatgggtacaatctaatgtcaacaatgatcctgctgtagatttgaataaggatgaggatcttgctgtagagttgaatatggatgatgatgaagagttcgaagtcgatgaagctgtagaggtaacttcccaaagattggatatattttcaaccaaccatgaagcagagccacaacaaagacctcgtagtgaaaatcatcaaacaccgagcacaagtagtattcgtcaaggtagaacagaaagacatgtgggacttagtactcccacatctttcgtaggggattcaacaaaattcaaaactcctatgtttacaagagaagacaacaaggagaatagatattatacgtcatctttgagtggtacgcagtcacgtgaaatataccttggaaagtttttcaaaaacaaggaagagttgaaacaagtcgtggcaaggttttcaatggagaataattttgagtggatggtaaggaagtctggcaccgacgtgttttacattacttgcaaagatccaaattttcgatggagattgagggggaagaagaagatgagatgtgacatgttcgaggttaccatattccacaatgagtatacatgtaacctgaatgtaaaacaatctaatcatcgtcaagtagcacctgttggaattattttaccag

SEQ ID NO: 125831 - DNA, 927 bp, Cannabis sativa
actttactttttatcaaattgttttccaaactatatagtatatacgttttgacaagtttatcctcaaactgtattttttagtaaattagtcccccaaacttttattttattagcaacatcaagtgtccactcttagatattgatattcttataattttttttttatgtatttttacttattttaatttttttttgtgtaaaatttaaataattttattttttttaaaatagcttgataaaataattatattaatatattttatttatttatttttacttttctagtattcatataatatttaatttttaccaaaatatttaaaatatgttttatttatatattatttaaattttgcatcaatgataaaatttcatgagttcatcattgagtacaagtcaaaaataaattttataatataatttacttcataatttataatatatatatattattttgactacaaaataatatcttactacatatttaagagttctttcatgcaccaaaataaaaaaaaaataacaaatcaagtcattttattttcttaaatacaaaattaattaaataaataaataaaatatcaatatttaagattgaagactttatgtatttaagaaaataaaagtttggggaccaatttgccaaaaaataaagcttgaagaactagcttgctaaaactttatataatttggagatcaatttaccaaaaaataaaatttagagaccaatttatcaaaccttatttaatttaagaacctttaatacaaataaaccttttataaaatcgataaacaatatcaaaacaattagttacacacataaaaaagttgcaattaactatttttaactttattttcagcactacaaattattctatttttttttttttcaaagattataatttatggactataacttttcttata

SEQ ID NO: 125832 - DNA, 720 bp, Cannabis sativa
  modified_base (685)..(685): a, c, t, g, unknown or other
atcccattttacaaattatgtatagttttagattaggataccaattttaatccctaatatgcatataatttcaaatttcccttttatattatgatcgcgcgacttctctatatataatgaattatactgcatgcatgcagttgcatatataatgaatatatagaagataatatatatttgagcattgctataaatcatcaacagtgttttgcaagtatctaaagttgatcttttgtaaataattttcgatatatagaaaggataaaaggtatcagtagtacttaatattttttaaaatattaaattgctattagtataattaagtatcaaattttatataatttaatataatttttttattcaatatcgctaactaatcacaatatatcaattattgatgatattagagaagattggtacttaataataatattcatacaatagttatttaagttaaattatgtgaaacccgattagggatatacacttcaaagctgtggtgtgacttttagtatttctccataatcgcttctaacaaaataaataaataggtacatctagccctagctagcttctgaagtttttactgaaactatatagcttactatatacattcaatacatagttagatacagcatgacatcttttgtttcagcctagaattaggaggcgtttggttgggagnaatgaaaatataggaatagaaatgggaataggaat

SEQ ID NO: 125833 - DNA, 2284 bp, Cannabis sativa
  modified_base (2234)..(2241): a, c, t, g, unknown or other
aagaccctggcacattcgagcctgcagcccctccaagggcctagttagataaaatgagggacatgatcaagggcctagctggtccaaaaccttcagaccttgagctagaaagggcaaggggattagcattcatgacatagataaatgccttgcccgtgcccaaattcaagatgtcagtgtggaagatgtacacagggaaagaagatccctagtacacttgaaatactttgagatccaaacagatccccaataagtatttggagatgtgtgaggttgaatattttcggcaactctttttgaaatagcccaacaatggtatttcaagctggccctaggaagatttaattcttgagaagaattctcccgagagttttatattcatttctccgcttcaagaaatataccttcacgacaagaggatgttattaaaataaacaaaagacaagatgaacctttgaaagactacattcaaaggttcatggctgagcccaccaaggtcaaaggccatacagaagaaggtcgctatccagccatactcgaaggtatcttaccattgagtgaattctagaaagatattagaaggatctccatgggcaacatgaaggagttccttgagtgagcaaatggctttataaagttggaagaagttgtttggaaagcccaaataagagggcaagtcaatgctgaacaaacatagagcatcatattgccccaagtgttgtctgatgtgccaactagcgtagacgatctctgtcaattcttcaaaaataagaatattggaagaaaggagaaggaggagaagtgtgcatgcttcactctcttaccaaaactccaaatgcaatacatgccaactagccattgcgacaggtgtcatcaaaacctataggacctagctgaccactaaagtagaccaccgagtctcagccaatatacggtcacctatcgaccaaacatggcaaacaaaggccaagatctttccaacttcatggctaaacatagaaggatatctccccaaatctctcaaagtttaggagaaaagtaggagccaaagaagaagcgaaagcaagagcaaaacaactcaaccaggaggtgccttgaccacttgcctaatgtaggcttggccctcaaaacacctgggggcaatggttgcacgtggaaacaaaggttagcttcaaagcttctaacaacgaggctaaacatgaagctctgaatgttggcctcaagctagcacacgaagcactgttgaacacctagacaaacaccagaactctcaacaagtcataggtcatgtcctaggtgaatatgcagctcaacacaagaagacgatggcctacttgagctactttcaagacttgttaagtcagctgaaaggatatagtaaaaggaaagtccccaaatacaacgcaacagataacacactcggtcaactagctagttgtgccttgacaaccaaggaaacctttgtaccccctcggttcttcaaagaactaagtatctttatttcaaatggaatgaacatgctggataacaaacatggatacacctatagcaacatacctcaaactaaaaatcttgctagaaagtagggattagaaggatggttgtagggtgtccaatcctacataaaataacgcatagacatggtgtctcaataccatctctaagaagcattaccaataaagaagctgaataactattgatagagtgcataaaggctctacgacaatcatgtcgggggcaaagccaactaagtgtagaagggatcaaactccaacatcaacatgtcctccaaaaggttggctgaccctggcgtcaacaggaaatgctccctcaacgtggctggccacctcggctgtacctcggttggcccgattcaccaacagtctactctcatacttctggtctacagtgaccaagaggtaaaccacatctttctatcaggatcccttgacaaaagggaaagaataaagagaccaagccaactcaaagcaacatgtttgcccacaaacagttaccaggcccttcaaaaaatagatcgaggaaagtaattcttcctaagaaacttactccctgaagagtattccttgacaaaaaagatcctgcagcaagaatgcttggaccatactgaaaagatttgcaccgagttccaagataacaataaaggtgcgtataagcttggcaagtacacgagaacttggagttggctctgttggaatttattttacaaggatctnnnnnnnnctcacaagtatgttgtttaacaccgtaaatatgaactttctaa

SEQ ID NO: 125834 - DNA, 906 bp, Cannabis sativa
caaaaaaaataggccattgtcaattagaatcgcacaaatatcgcacattaatatcgctaaaaaatgtacaacacaacagctaaacatgtcaagatcctgtcaggtaaaatcacacaaacatcgcacagtaatcgcataatattgctaaaattgcacaacctattccatatcccatatatcgctcaaacatcgcacataatcgcttaaaaattgtagaagatacccaaaatgcataaacctaagtaaaaatcgcacaatatcgcatacaaatcgcataatgtcgcaaaaaacacgaaacccataatttccccaaatttttcttgcacaatttatccacaaaaaacacatactaaataacaatttcagtttaaccacagatttatccacaaatttaggcatatttctaagataaattcaaaaaaaaaaaaatacctcttttagtcgattgggatggtggcagtggcggggacggtgctccgagactggtgcgagtgcggtgggtgggttcgacggtcctggttcaacggtgcgagtggggtgggtgggttcgacggaggggtcgggtgggttcgtgggtcgtctgcttcgaaacgaaggggtgggtggttcttagggcgtctggttaaatcgagggggtgggtgggttcgtgggtgggtcgtggttcaaatgtatgcggcgggggagggttttggttccaacggagggggaggtgggtgctggttcgaatggtttttctttggttcgacggtgatgttcgaatggagagtgaaggaggagagggagagggctgttagagagaatggagggaaagtgaaaggatgggggtaattttggaaggaaattgaaaattggcacccttttactatgtgtaaatttttggtataattaaacaccttttatcattt

SEQ ID NO: 125835 - DNA, 1561 bp, Cannabis sativa
cctgtgggatcgacctcactcctagtgagtctactacttgaaacgatacgtacacttgcgtgtgctaaatatcgcaacattatacagcgtaccaaaggagcccttagttgattatatatcaatcctatttgaatgagttattgtttaatctgcaatgagttattccagattctttaagctgcaagagctagcaatgagttattccagattctttaatctgcaagttccaaaggaaataattaatatatagtatattgtttgtacaacgtaatagtaaaatctacaatgtttgtcaacatatgattggtttcaagttgaaaaagtaaaagagggttttgatgataatgaagacaaacacgtcttgttacaataagtgaaaaagaaaaaagattcaacattacaatgcatcatcatctcttaagggacaaattacagtatagtctactcaaccagtagtacttgtagtaattaataaagatgaaaagacgtagctgtacttgatgttcctttcttttattcctcatgctactcattttttcctctcaagtaattttaagaagcttatgagcttcgtcacatgacttgtgtacatacatacaaaaaccctagtacctagtactccaacaaagctaaagatcatcgataaaaggttgtatatacttgtattttactggtctgataaagtttctgaagaaaaaaaatagggtttgcaccgcgtgaagataaagttttctgaaaccaaaacaaaaatgtactgtttctgtatatatctgtatcaacaatttattatcattattattattgatagaatcgaattttgaattgacagagcccttattatttttcttttttgaagccctaattcatgtggcccttctctctccccgtctcaagaagcatctccatatatatatatataaataatttaaattttatatttgtataagtttaaaaataaataagatgtatgtcccctaaactattaccacttacttttcaagtagtgttgtaaatataggtcagattttttgacacattacgaaattggcacaagtccaaaaagcacaagaaaatgtatatttaggtaaaacataacacgatacttagaactagcacgacatgacacaataaatctaaaagacaggacacataaacacaaataaactagtctaaaagaaacgatctaagaagcacgaaaaagtatggcacgaaaaattgaaaaatcctataatataataataataaatatgtatttgttaattataaataaattaaaatagtaataaaatttagatattgtcaagggagaaagttaattagtttcagttttgtacaattaacagtctgatagttgtattgttagttagaagtgattaggaggttagaagttgttagtcaattcttcatctatcatgactacaaaaagagtctttatctacggtttttttttggccttttagctttggttttgaagaaattcgcaaccgtatgcattggagtatacctacactacaagaaatgttacttttaccagcatatttttgtgttagcaaaagttggt

SEQ ID NO: 125836 - DNA, 1054 bp, Cannabis sativa
  modified_base (1025)..(1028): a, c, t, g, unknown or other
taatattaagtctacagttgtttgtcttttttacccttaaaaagtaatgccacttacaacaatccctttttattttactataatgataacatattctcgtgtgatattatttattggatgttgtatcttttattttgagtttaagtagttttccctttagcttgatatgacattctggttgaggttcgtggaaggaaatttccttattctgtgcgatttaataaaaagagaagttgtactaggcttccaggaacacactgtctggccttctggaaatgcggtaccgagactaatttcgggtacgggttgtccttggcgaaagctcatttgagcgaggaacgaatataccttctcagaagttcttactgaacttgtacttgacccaagttctcttttgtgggcccactggttggctttagatgctgacttggaatccacgtgtcccttacctaaaacgcggataatatttacccccaagcttttaaaaaattgtggattgtgaaagcttgcttcgatctgtataagcggacaagtggaggctaaaagtgaaacatttacagtttttcaaacgaaattaactatcgaagataacttttatttattttgtttttaggatctgacgtggcattgtttcattagtttgcgaggtatatctgttcaattgatgaggtgtgtgtggcaatccaagcatttttacttacgcacaagctttgaggagcataacaccatgcacttttgcatcgattctaagtgatgcattaaatgctggatgaaatctttcaattgttagatctgctttgtgcttttaaaaggtttattttatccgtggatttggaatccattcggattgtatttgcgactataaatacatctgaatgccacttttcatcttttttccttttactttgaattttctcgtcttcacacttataattatcaagcctaagactaccaacaataccaatcacaagcttaaggaattcaaaatccattcaaagaaatcctaactgttgggttttatgccnnnnataaaactctttacaatctgattagt

SEQ ID NO: 125837 - DNA, 2412 bp, Cannabis sativa
acctgtagtcagtgtctagatctttgaatcataccaagacccgaacttggaaccatttccagaccagtagctaaacccagactttgaccagagacccaaaatcagaagaagaactggaatcaggatcctagaacacgaattggacttggatccaaaacaggatttcgacacggaaccgaacacggacccagaccaagaccaagattgataccggtcccaaaccctaacccgaacccagacttgctccaggacctgcgaccaaatacccggaacccaggacctgtgacccgagacctggaccaaaacccagaaccgtactagaacctggacccagacccagacccaaactcgaactgaaacccaaacccagacccagacacaaacctagacccggacccagacccagactcgtaccagaactcgaactcaaacacgcaactcaaaacaagaccgagatcaggactaggaccccgactcggacaaggaccaagacctgaacttggactgggacaagaacctagacttggaccgtgtcccggtacctgatactcgaacttgggacttgagaaacgaaccatgacccagacccacaccatgccaagactcgagacaaagaccaataccaaacagggaccgggacctgtactcagactgggaccctaacccaaacaaggacctaggaccctgagctgaatcagggacccagacccatgactcaagagcacagatcgaaacctagacccaaacctcgaattgagaccggaatgaggacccaagacatgagctagaattggaccaggatctggatttggactcgcgacctagaacccaagaccagaggcttggacccgacccatagtcagtgtgtagatttggaaattggacctggactcggacccagacctggaccaacacccgaaccagtaccaaaactcgaactagacttgacctgtggttagtgttttgatttgggacaaagactcagacctaaaccaaaacacggacctagacccagactaggactcaaaccttaaataataccctgtgacccgaaattggaactggaactagaagcggaccattaaaccttaaaccctaaatcctaaactctttacacttacccctacaccctaagccctaaaccctaaaccctaaatccctaaacactaaatccaaaaccctaaaccctaaaccctaaacactaacctagacacaggccaaggcccatatccatatcgagatcataacctaggacctcaatctagacttagatccagacccgaacctagacctagactcatggcctaaactcggacatagacacagactagaacctggtccaagacctagaccgtgattgggacccatgtcgggaccccgaatgggacccaaacatggacttggactcagaccaagactcgaactcagaatcaaaccttaacctctattggacctaaactcaggatccaaaccaaaatctgaacttggacccagacctggaccgaggatccaaacctagatgggggacctgggccccaaacccaaacctggactaaggatccggacatagatgggagacttggacccaaactgtgccccagaactaggaccgagacccaaaactcaatcccacacacgagacatgggactcgaccctagacccagaaccctggacctgactacggcctgaacccgaacccaaacctaaacttaggacccagcccaagacccgagacccaaactggaacaagaccgagatccgaatctagacctgaggcttcaacctgacccatagtcagtgtttggatctaggacctggacccgagtttgtacctacacccagacccggcccgagactgggatccgaacccgatcctgaactcggaatttgaatcgaactatgtcaggaactagaacccagacctaggaccgtaacaggactcaaacctaaacccaagctcagaccaaaatgcataccatgacttagactcggactgggacctgtgacttaggacctaaactaagaccgggacctagacccagactgggacccagacccatacccagaccaacaacaaaaagttacggtcagacccacagtgggactgggacgtaactcaaacccaaaaccgaatcgggacctggacttagaccgggactcgagacccgaacccgaactaaaacacgaacttggacctagactaggacctaggacctgaacatagatgggggacctagacctgagaattgggcccccaaatcgggacaagaacttggtcctcaaaacgtggatcgggatctaggacccgaccgtagaccaaaacctagacctaggacccacctctggacctgggatatgggactcgatgcttggaccccagccatagttggtgtctggatttgggacttaga

SEQ ID NO: 125838 - DNA, 1895 bp, Cannabis sativa
  modified_base (1633)..(1633): a, c, t, g, unknown or other
ctaacatcactgatgagtgcctcgatgaggactcttttattgttggcaaagtctttgtcaggggacaatggtattcctttactgtgaaggatctggctaaaactctcaatctacctatgggaaatgagcaaactgaagtggaactcgattgtcaaaaagtattcgggtatctcattggtgataatgatgtggaactctccgacacaatacatatgtctcaactcaccatcaccatgctgctcttatgaggttcgccctactcaattggtttccttgatcaaatccggtaaaggtttcaaataaacttcccttatctttgtatgtagtttatattggtgctaaaatttatttggttgacatgatttgggagcaaattatctctcttagaaagggcaagaaacctagactcaatctcatttttcctcacttgatttataagatattttctaacaaagaggagttgattattgagaatgagaccatggaaatgcctgctgttggtacaactttcaaagctcaagagaaacctcctcaaggaaaatctgctaataaaaatgctcagtctgcttcccctagtgctagtgatgaacttgctactgcatctgcctccacttctgcttctacaaaaatggctgaattccacttgcgtttagaaagaatggagacaagtcaagccttacttctcacaaggatggataacatcatgaaattctttcgatcaaatgatgatgcataagtgatccactttttatcttttgctttttatctatgtgttttgaactattatgacactgtccaagttaatttgttatctttggctccttgatagacaaaaaggggagtagtatttattttttagattgtttgttacaactctagacccttgttttagggggagttgtcttgtttgtggtttgtgaacttttttgtttaaaaatttgtcttgtttgtggtttgtaaacttttatgtttaaaaagttatttttttatgtgttagagtacgttcatatggggggagtattttctatactttattgttcttttttctaacacttgatgtaggttttctccgaataaaatgttttttcaatgaaagtgccaaagagagagattgttatttctatttttggcatccttaattgacaaaaatagtttattaatttattattaattttggctatggtgttaatgttggttttcatattttgtgtatttaacttttatattaatcaatctatctttggaaggaatgttgtctagctttcctatttatggaaattaaggtaaaaatggtaagtttggttactcaattctttcctatctaaccagctgtgatattctgatcttgtgtgagcttcccattttgttatattagatttcttgaggaaaaaactggagcgaaactttcctttctataaaaggaaagtcacatttactgctcatgattttgcaggtatagaaataaaaattccttggctgatcaaagatccattttggggaattttctagtgcattgtgatcttgttcagaccgtgtgtgagctatcaataaggtgtatattgattataaatacaccttatagtaactaggtcttctatcactttcatacactttgaattgtattcatatcttnaggaaagagtgtctttgttttgtacagaagagatggttggactattactctgtttatttgtatttttcattgtctggagtctgtattcaagtccacaaagaagaggaacaacagtgctaccttcaagagaaggttttacaaagattttgggagattaattttcaagtcttgcatcaggacgaagcaagcactcttcaaggagatcgaagggagttcgagctcttgaagtttcaacaacgtttggttagaaggttgaatacat

SEQ ID NO: 125839 - DNA, 637 bp, Cannabis sativa
  modified_base (587)..(596): a, c, t, g, unknown or other
caaatctaaaagtgggataaaaagttgtaacatatcttttatcccactttttatttttgttaaggataaaagtgggataaaaggtctcctttcttgtagtgataccccttccttagatgcgatgggggtttggaaaattattcttgtaatcaccgtatttagagtaatagaaattttttattttctctctaggttgagatagacacttgaatttatattcaatctttttcttcatcctagttctgcgtttgaagtagagtttgatattacggccaaaaagttagttgataaattctcactgttaatagtttggagccgtctatgagaacgaaaagcttaggccaagtcatttctttaaacataatcaatacaaaatgcctagatactctcgtcgtcttcaggatgtggagattcaccttgatagtaactagttaatcgctttggggcgagacccaccaccacctatcgtcggagaagaaggtactaatggtcacataactcaagtaagacaagagaatgtgatcgttggtaggccttaagtaggaggagagggcacgagcgggctgttagaaattattttaccaggnnnnnnnnnnactaacaagtatgttgaattaacaacctaatatgaattcta

SEQ ID NO: 125840 - DNA, 1109 bp, Cannabis sativa
  modified_base (138)..(143): a, c, t, g, unknown or other
aattattaatatttataacatacacataattctcttttattatattgtatgcttattaatatataggcatggttatataaataataattattagcaaatttaacttaaaaaaataaagaagcattatttatttgaaannnnnnttattgatagcaacaaaaaaaaaaaaacataagataaaatgattattttcacaaatattcacaaaagataaaatgttaattagggggaagcttaatttagaagaaaaagaagtaagtacctagtgtgcatgtttcaattgcctagtttaattttttttataattgaatatacagtgaagactaattgtgtaattcaattagtgaaagctcaaaaagtcattcttatttttatataggttattatagattctacatatatatatatgtatatttttctatatatttttattaattaatatacacttatatatatttttttaatttaattataaataattattattaatttcaatattttaggctaatcaatagtcatcaactttttgttataagcttgatatatcataggttacattcactactcttatatatgtttattcttgaaattacaaaaatttaaataaattatatataatagtgcttattagcaatatttacttaccaattattattttatatttatgaaaatggtcgataggttgaattactaaagtttccaaatattttttttttatatatttatgcaaaacttaacaaaccatgttacttaaataaaaatcaatagaaattctcaaaacctcatcaaataatattccttaaattctattttatgtcatttttttaaaaaaaatatttttctctctaaaaaaattatatgtctataaatttagtgttgttagaatagatgacatgacattttttttattgggttaatttcacaaatgcacaaaaacaacaaaaaaaacaacaaaaatacagtttcacggaattttaaacatttttgcgatttttctgattttataatacgatcattttatgttgaaattttgttcatttgttgttaattttctgttaaatgtatgttattttttgttattattttgatattattttcatgttactttt

SEQ ID NO: 125841 - DNA, 1103 bp, Cannabis sativa
  modified_base (49)..(54): a, c, t, g, unknown or other
actcagaaattctcattcactttctctttctctcttcatcttcttcttnnnnnntctcatctattttatattatttcataacaattctaaatatatcattttttattgaccttcttattctcttacctacttaatttatacatatttagtgtgtaattaaaattctatattggctatcaataaaaaaaatcatggttatattaggataaacaatattttcatcggtgtgaggccttttgggaagatattcaaaaataaatctacgaggaattaagcccaaagcgaataatatcataccaatgtaaagatagatggtgttcgacatcccaacaagtggtatcagaccaggttccgaaatcaaccatatgaatgaatgcttagaatgccaaacaaaggagatgagcctcggtaatctcacgattctatgtaagacgtgtgtcccaacgcattggaagaaaatacactagtttttaaaaatacggccactgaatcaacataaaatgcatgtttgatgttgaaagtctatctacaatctctactataatgacacatataatatagagcaatttgcgacgaaaatccttatggtttaagttttgtacatttaatccccttatgttttttttgtggcaaaacctccttatattttaatttttataaacttaatctctttattttttatttttgtgaaaaacccccttaaatttacttttcgttataaatttaaagtttgagttagatattaccgttgaatactgtctggattattactgtatcgacttcgaggtttcactggtacatatacacaggtgtatacagtggtcatccagttgatatttaacggtaatatttaactggcgtgtcaaatttgcaaaaaaaataaaaaaaataaatataactgagttttgctaccaaaagaaaaagataagaaagttaagtgtataaaaattaaaacataagaggagttttaccacaaaaaaagatatggaggttacatattcttatttttagggaaatttacataatgtactaacttttctccatgtattacaaaaatactgcgacacgcccaaatttacgtttttactgtgtttatatttatt

SEQ ID NO: 125842 - DNA, 2064 bp, Cannabis sativa
ttgataagtcaggttgaacgccacaaggaatactccttgataagttcgaatagttctctcaagaactcaagaagaaaacctctcaaaattttattcaaaaaataatctgattttttaaagtgtttacaaggctttatatagccaacttacaaccaagaaaaaaggaaactaaaagaaagacaattttccaaataaaacaaagacaaaataaaggaaacaaaattaaaaaaggaaagctgccaattgccttagaaaacatgataagctcaacttgggtctaaattgagtccactttgatgagaaacacaaatttttgctctccttcagtgttgactgtggtctcctctttttttaaaattctgttgactaagttgttgagttcttctttgaatctcttggcttgcgcccttatcaccgggccaactaaaactttacttgtatctttagccttagtgttctcatcaggttgcaagtgcacaacttgtacaatagattagttagcaacactcgaacactcatagatgttgcagctagtggggcttttatgaggaaaagtgcaaatgaggcttacgaactacttgaagagatggccatgaataaccaacaatggtcaacagaaagaagccaatctaaaaaagttgctggtattcatgaagtcgatgccatgacaaagttgacagcccaggtggaggccttaactaagttggtgactgctcaggcaaagcaagctcaagttacttgtgagctatgtgggggatcgcacacttatgatacttgtctggtggatctgaacaatttgccaatgaagcaagcttaagccattgggaactatcagagcaacaactatggttacaaccaagggggtcatcaatagaattttcaagggtagtttccaaatcagcagcaacaagggttctaccaacagagaaatcagtctcaacatagtcaacaatagaatcaacaacaacaaggctctaatggagggtctaatcttcagacaatatgttacttcagttcttgatagagattaaatcttccattaaggtctttgaaactcagatggggcagttaactactcaaatggccaaccaaaatcaaggtaatttgcctattactacggagattaatctgaaagaacagtttcaagcaatttccttgagaagttaaaaagaatatgagggaccaagggtagagcaacaagtggttaaagaggaccaggatcaacaagaactagtaccaacacaagacaaaaagaagactactgacgatcttcaacaaaaaaatccttcacctcttaccagcattgatcatcatatcaaaattccctatcctcaaatacttcacaagaataagctggataagcagtttttgaaattccttcaaatattcaagaaactgtacatcaacattccattcgtagaggccttggaacaaatgccaacttatctgaagttcatgaaagacattctatctaagaaaagaaagttggaagatggtggcactgactgaggagtccagtgcaatcctgcaaaagaaactaccgcccaagcttaaagatccgggtagtttcaatattccatgctcaatagggggtttgatagaaacaaaagctctatgtgatttgggagcgagtattaacttaatgcccttatctgtgtttaaaagactaagattaggatcagtcaagcccagaacagtgactctacaaatggcagatcgttctttgactcatcctcagtgtataattgcagatattttggtgaaggttggtaagtttatcttccatgctgatttttttaatacttgacatggaggaagatgagaatattcccatcattttgggatgaccattcttatccacagggagagcgttaattgatgtgcaaaaaggggagttaaagttgcatgttcaaaaggaagaagagactttcaatgtctttgccgcaactaaaattctttcatgttgtcgagtggaagtagtaaagcatattcgagaagtaactaccaacaagaagaaaggaaagtccaaagaacgctttcaaacttttcgacgacgtatgaaaa

SEQ ID NO: 125843 - DNA, 575 bp, Cannabis sativa
  modified_base (519)..(520): a, c, t, g, unknown or other
ggttaatttggtacatatgtcaaagttgggagtaaaaaaatcctaattaaccaaaaatataataccctttggatgttgttggacaatataggggtagtcttgggcagtaattttctctcgtgaataaattctttacaacacaaattacacattgaaggaattatttacaaaatatgattttgttttcttgcttaatttactatttctatttttgtggaagaactatagccatctttacttttttttaccaatataaaattgataaaaattaaccacaatgtatacatatataagatcgttaatatatacaagcaaattaaaataatattaaacaggtgaatccataataaatatatatgtacagtaacatttattggtatacgtatttatgatatattatcttagctagtatagatctaaattattgtgtaaaatcttatcttgttttgttacgtacccattaaaaactttacttatattagctattgtaatattattataataatatatatatatatnnatatatatatatataacacatgcacgtataaattgtcggtataagccaaaatctt

SEQ ID NO: 125844 - DNA, 726 bp, Cannabis sativa
ctatggatatgttaaaagtgagctatgctaaactgctaaactataaataagatatttttaaataccttagtttcgacttgagttcgaaatttttttgttatacctagaatatccaatttctctttaattttttagaaaaatattaaaacaagttgttgtacgtagatcatttacgacgtaaatattataattctttattaacctatatttttttggtaacttttattgtttaccaaaaatatcaaatttctctctaacatttaaaaaagtattaagaaaaattatgtacgtaattactactaactataatgttaaatgacaaacatttttattctaattatttttctgcaattagtaagaaaaatattaaaagaaatcaatgtatagatcataattattataattaccgagttcatattaatattttgcataccccaacttttgtctttaggattaattcaattttattttgtttacctatataatatttcattttttttaaataaagttctattgctcaagaatcaaatttacatgtgtacaaattagttgagtatactcaactcaaaccaaattcttactacaaaattattatttttagtgacaaccttaattagtcacataacataaattttttgtgataaaatgtgacttttagtcacaacaaaaaattattttttgtgactaaaatatagtatttatttgttacaagttgttactaattta

SEQ ID NO: 125845 - DNA, 631 bp, Cannabis sativa
caaaatcatggataagggcctcttcatcattcaaggcaagatgacgaggagaactacgactagagctcgccataacacttaagagaaggtttggacaggtaacaagaagatgacaaacagaataaataatcctcagagaaaaactgaatactttaggtaaaatatagtaggctatatataggaaaacaagatacctgcaaagcaaatacatttgagaaagggtagaagataccaaatccatcccaccattaattttattctggcatgatccctcgataggtgaagtaatcatcacccaaatcccctgagttcccctattgacggcgcgctgagaagaaatgtggaggaggagcaaataagggttaagaagagtctgtaggtttattaaatgaagatagatttactatggtgcattaaatgcctctggttaattagccataaaagacaaaaaattaatggagaaagaagggaaagtcgacggctacacctaatcatcacaaagatgaggaattggagagtccagaagagagaaagggaaaaaccctaatagaggattccagtagggttgtacaaaaaatttcataaaccgcccaaactgaataacccacccaaaccaaaccgaaaaaaccga

SEQ ID NO: 125846 - DNA, 577 bp, Cannabis sativa
  modified_base (464)..(489): a, c, t, g, unknown or other
  modified_base (536)..(551): a, c, t, g, unknown or other
tggtaaaataaattccaacagcactaccatgacgtagcacggggggacaaaatctgatcctgagtcagtaaaaggtataacagtctatggagtgatatttgtaagatgttgatgtggccaacgtctctaagactctcatcgtcttctaggttctttaccaagggaagttaatctcgaaggccatcacctctccttgccttccaggtttgggagtcattctttttcttgcttacctcaaataattcttgttgtggatatatccttacatctgatcatgccatgtgtcttattaatgaaaatttggataatatttacccccaagttttcgagatcctttggatcatgggagcttgctattgtttttggtgttggccgttgacacgtgttgcagatttaggtcgcagatacaccccaacatgagttgtattctattgagggtatatactgttgggttttgtgccctnnnnnnnnnnnnnnnnnnnnnnnnnngatttacttattaataaagattaaaaatcattctatgttgcatggtnnnnnnnnnnnnnnnnatgattatatttaatgtataaattct

SEQ ID NO: 125847 - DNA, 1998 bp, Cannabis sativa
agttcctaagaaatgcatgaattccaaaatcaaaacctcatgcttaaacatcactgaaaaataaatccaataatcagaatctcacacataaactcaactttagaatcccatgaaaagcatgctaaagtcaacacagctaagcacaattcaacaaaatcattccttcttctacacacatgcatctcgagaaccaaacaacacaaaaacattattttatacaagaattcaagccatataaagttataattaaagctgtagaaagctacctcaaacttccaaatgaaatcaagcttcagttccctcccaaatccaagctcaacaaagtaattcctcgatgaattcaacaaaatgaaaagatgaacaaagagagagagagaggggtcggttttgggtacgagaaacagccagaaaatttatatcctttttactcaaaattctattttgctacaaataatccaaataagctaaattacaataatgcccctagggccatataacactcatttaggcattgaagggcaattatttcataatcacataacacaccattcaattaattttcagattaatcacacatctataaaatgccaataaataatcccaaaaatgaatttcagccccaaacccgattcagcttgaaattcccaattgtgactataccgtacccacttgttagaaaacacctaaaaaaggacacaactacactatataatgatatagtccataagcacgcatttaaattaaattcacagtattaccctcctgaggtcaaaattacgaaaatacatgtggctcaccatcgggctcttaacatgtcttttatcaaattaattcacatataatgaattgcataataatataattatataataattcgtattaaaatagttatggtttactaatccatttcattaatcttagcgtattacaatgtggtttgccctatccctcatctacaatgtggggatagagcgtttgaagaacgacacccaccagtactcatagtgtccaatcatttgaacaccacaagaaataaagtacttcttggcatacccaccaacttttaaaatagtagcgctattgggatcacccaaccactggtggccgacctagctaaagtagaagtagaagtaaccctcctccctcctctcactttttacacgcctttgcaaatgaactctatcatgtgaagatgtctcctagaaagagcattaagtgacatatgattgtgttggatctgaagttccagaaagtaaatttgctgggaatttctttatcaaagcaacaatgggttcaattcgtactcaatagtcttccacctgagtataatacattttttgtatcttacatgatcaaaaattttaactcatccgatatagacaagatggatgaaaaattgcatgcttacgtgcagactttgcctataaggaggcctccctcaaattttgtagacttgcgaaaaaggaatcgagtaattgagtaggatgcttctaacattgttgcttcttcaagttcaaatattgaaacaatggacagtcgtactcttcaatgttcgtattgtgatgagaatggacatcaagaagaaagatgtcccagacttctagacaattggaacgaaggtaacgcttttgtttttgaatcatgtgttttcgagaatgacaaatccatttgaattgttgtttctggatctactaaccatgtttgctcttcattgtagttgcttgaaacttggcattatctagttccacgggagttaaagctcaaatttggtaatgacgaattagtattggtccaagataagggaaaagctcgcgtcaagtgccaaaagaaatttatagttttagaaaatgttttgtttattccgaatttagtagaaagttggttagtgtttcatgtttacaaacacaattttatcaattgaatttttttagttttatttacactatttctcgtaatggatttcaattatgtggtgctcacatggaacaatggctttat

SEQ ID NO: 125848 - DNA, 935 bp, Cannabis sativa
agggtccaatctgtaacttttgcaaaacacagagtccaaaatggtatttacctttttttcaatttaattcatatccaccacaattaatttagtatatatctatagttttatctggatttatatacaatttcatgtaatatccaaatatgacatttaatataataacatggaccacctttggtaggcacttaaaatggaacacatgccacacgccataaataataatatatatggacaattccttttcaatatataatatagaataatgatggcgactacatttttgtttctatattataggtacactttttcaaccactcatttatatgacttttaaaagttaaaatggtttaacatgtatttattcgtagtttattaaatttttctttttttttttagagaaatctgatattaaattaaaaaaaaaaaaattaacaaccaatcaaaattaactttatattttattttttaaaaaaaaaccaatttttaatcatcatcatctcatagaatctatttttccatcatcaccatcatcgctggtcttcttccccttttttgcgcattttttttttataaaaaaattctccttgaaatgcctcaaattttacttcctcttctaagcatcagtgaaaaggaagttaaccttctcatcctctcccttgatcttatccttatagccttcaaaccagcggtaaagtccttgtgttgaaatttatttgtgttttgtgtaataataaagtctaataaaaatttatattaatatagttctaatcttaacattaacttttggcatttttctacagtactatcactactaatcatcaatatcagtatatatataaaggaaagcacaaggaagtttaggtggcaacctattttttcttcatattttttctattttatgacacatgctcttattttatttgagaaataca

SEQ ID NO: 125849 - DNA, 838 bp, Cannabis sativa
tatatatgcacaaattagctataaatatcaataaaagaatgaaaaaaaaaaaagatgcagttgctacagtactacagtgctactgtatatatgcagtgcattatagctaaaactgcatatataatgttggaatggtgttatgttggagaggtatttctactgcaacctcaaatttgaggttacattgaagttgttctaacactttattctataacattttacgttatgccacaaccaactaatattgagtaaatttgagttacaatatttttagatcaatatcgagaaaataaagtcttttaaaatgtattttgtcttaaattaattagaaaatatttgagttgcaatatttctagatcaatattgattatttgggactaatttttaggatgaacaattagccatgcaaaactctttttcggaggaggactaatttttttgaaaacccttctcggaaggacacaaagccttctaagatatacatttgtgagcaaatcaataattttttaggaatgatgataacttccggagatttttttatttaaaagaactaaaccacattgtataatacttaaatttaaaatattaattgtatgatattgattgtctatatatatatgagtgagaacatacttcaatattcctaattttttgcaaatggccgaaaaacatactgtttaaactctaatttagcaccattttaaaaaaaaaaagttctctaattataaataattattttattttgggatgttggtagctaaaccacctgaattttacacattgtaacacttaaccataaaaaccaaaattttggcggctaaactacctaaaccctggt

SEQ ID NO: 125850 - DNA, 1461 bp, Cannabis sativa
taaaattcactagtaattttttacttggtcgaacaaataggatgccgaaacttgaatctactccaaaattgattaggttttagctaaccaattttgactaatcaaatttcctactgtcgaggtattgtttatggtagaggaagaatttgatcactcccctactttgcttttggtgtacccgaatgtccaacaagggaagaaacattttaggtattttagattttggccaaaagctccaaatttcttacaatagtttaaatatgtctggaaaaagaactatgtttgttctcttatgttaagactgattcagaaactcaaggcattaaaggtggtgttgaaagagctgaataaaaatgaatttgggaatgtgcaggcaaatgagatttgacttagacagttactgttagaataccaagaagagctaaggaaagatccactcaacaaggagatgatcacaaatgaaaagttagttcagggccaacatgaggtagctcatgagaattatatctctttccttcaagaaaaagccaaattattttgacttaaggatggagataaaaattgtgtcttgtttcattctagtatctatgctaggatgacccaaaatggaacctcttggggaactctcttactggaaggaaatcggttaacaatggggtaatggctcaaggcccaatcgtaaatgaaactcacaacaacctattgttggctgattatacacttgaataggtgaagaaagcagtgtttgacatctcggggaacaaattgccaaggccaagtggttttagtagcttagtctatcaagataattgagaggtaattaattggaaaggatgttggggatgcacttatctctttattacatctagggaagctactcaaagagataaattctaccacctacactctaattccataagataaatgcctgaactcagtcttagatttttgacctattattagcttgttgtaatgtgatttataaaattgtaactaagcttatctgttctaaattgagaatgattcttcttgataccattactcaaaatcaaagtagatttatctaaggaagattcattttgtataattccatgatttgtcaaggcttgttgaaacactatggagaagcaggaaaatacctaaatgtatgattaaattagatctaaagatagcatatgatacaattgaatgagactttatagaagagatgttgattgctttcaagttcccaagaaaatttattgatctagtcatgatttgtgttcaaactcctcgatttagtcttttatttaatagaagtttgcatggcctttttgaagaaaaaaagggtcttcagcaaggagaccccatgtctcctcttctctttatctttgtaatggaatatctatcaagattgatgaggaaagttgggggaaaagatgattttaaattccatgaaagacgtgagcaattgaaactgaa

SEQ ID NO: 125851 - DNA, 502 bp, Cannabis sativa
ctatataaggatacattccacaacagtttgaaacaagccattttcgagagtcttccaagtgtgaaggtgcttcttttgagagagagagagcactttgtgttgtgattcagtttgtatttgcaaaaaagaaaaagagagaaaagttagtgaaaatcaaaaagaaaaactgtaaagaaatcatagagtgaaagttgtaatatttgtacctgataattatgaatgtatatcaagctttgaggagagcttgaatatatagagacgtaacccatcttttttgggtgaactccgagaataattctaggtgtttttctttgcagtgtttgttttctctaaaccctaactttgtgatttttttatatttgtttttgtgtgttgttcttggattcagttttgagttttggccgagagtctctttcgttagaaaaattaataataaacccaagatcaatttgtatgtaatatagacacaatatcaatatataatagggtaaatagcggcata

SEQ ID NO: 125852 - DNA, 1066 bp, Cannabis sativa
  modified_base (985)..(989): a, c, t, g, unknown or other
tttaccgatggaacaatctcaacttatatgatataaaaatgagaattttttttaattagatagaaaaattaagcataaaaactcaaatttttttaattttgctcatttatgggtaatatccattaaaaacccactcatatatataattaataatgagaaaatgatactagcttatcaatattttttattagaaataatataattgttttttcttttctatcattattatgaattaatatattatatatatgaaaggtacagttggggaccattaattaatttaactattaaaaaaggactaattataggttttgccatttgattaagctcatcatggtatttattaattgtacagatggagctctttattcgaattgtcatacatataaaaacataaatggtgtactattattatttatattattatttatattatatattatattatatatgtatttatatatgtatggatatgtatggatatatatatatatataaaaatatatatttcttgttctcttgttctaaaagttccaagatattaaagataataggtcatagtccttcatggaataaaatattaaatataccgtggccatggtattcatgcacattatataataatatgtttacatataattattacaattaaaggctaccccatcaaactttcctcccgaactttaatatttatcgtgcctcactttgttttggaattattaacactattataaaaatagtttttctcagcgtcttaaaacaatcgtttaaagtatttttgttgttttctaaaatcatcgcctgactgtcgtaaaatggacaaaataggcaatgggtaaaaatatcgctaatgtggacttccggactgtttaaaactgtcacatataacagggtataaacgacaattttaaactgtcaagaatgtacaaaaaaaaatgaagtaaaatctgtattttctcttatttttttcctgcattagttttannnnnttacctaaattaaaataaaacaacgagttaattttattacaataacaactaactataaaacacattaaatttataca

SEQ ID NO: 125853 - DNA, 985 bp, Cannabis sativa
tttttttgagcatcacaccaatcaacaaaattcagttttgctaatgtcaacacctcaataacctcaggttgtttagagttccaaaccatttcattcctatgcttccaaattgaccaacatatcatggctgcctccaagcgatccgctttactccaagagtccaacccctcctcaaactagcttgtaaacgtcattgcagcagcatctacgactagcactcgagatctattccaacaattttgaacaaaaacacatcgaactagaacatggagagcaatttctggtgctgctaaatagaacggacaaacgaaaataattggcacataaaagatacttttagatagggtgaatataaaatataattttcaaattaatatatttattttttttattccatataattttgattttaaagcataaatagttttctttttatatagaaataatatatttttataattttttttcttttgaatagaattacaaaaatacttttaattttttgtacgattgaattaaattttaacaatatttatataaaaattgagtactaaagaaaaaagaaaaattaccaaattttatttataatatattattactaaatacggttaaaataaaaaaaaatgatatcttattacctcaaatttcaacattattaatcaattaattttaaataataaaaaataagattttcatcctgaactttgacccttatataattttgcttcctaaataattttttattttattttattttcgtaaaaaatgtccctcaaattttgaaaataattgtaagaattctccttcagttgtattttgctcattttttgagataatttcttgatgtaggacggatttatggttaatttactgcaatttgagaagagattttttctattatagaccaaaaatagatgaaatttacatttatggccctaaaaaaggaaataaacaaaagtggaaactaaaaagttggtaattacaa

SEQ ID NO: 125854 - DNA, 1375 bp, Cannabis sativa
tctctctctctctctctctttggaccactatgactacccaaatctcgaccacaacccaaaacttcagccacaaccactgtcccatcgtagccagattaccgtctcaacttgatctcgcgacttggaccactgtgactatccaaatctcgaccacaaagatgtctaaggtaagttttgaatttctcttttaatttttttttattttttttattttagtatttaattgttcattgatttagggtatatttttgttttgtaatgcctgatttgtgatgtgtgagtttgattagatttagcgtttgttttgggtcgtgtctatgttactacgagaaaaacttgggtttttgcttaggctcgatgcatgtctgactgatataggctcgatataagttcgatgcaagcaggtttgagataataattgaggttgaagataaaagttcgatagagttcgatgtaggtctgaaataggtccgatactaaactgcataagcttaggttcgatggaggaagatgtaaggttcgatagtgagtttgattaattatgtgttttattctttttataaaatgtgtttctgacgcagggcgatagtgggtccgatgatgggctcgattatgtgtcccacatttgtacttttgtattatattgctttatgtccgattgtgggtttgataggggaagattgttgtccgatagtataatagttgtttttaaatttccaaatatacatgtaggtctggtagaggatgattatggtcgatagtggaaccgatagtgattgcgttttcaatttatcttgatgtttttgtgttcgatataagcctgatattggtctgatgttttgctgtagaatttctgagttgtattttcttgtttcttttttctagaattgaagaccactatgccttataattccagtcttagagcattacacaggtcgtgtcacttggtgtggcaaaagttattactatccgaggattaaggtaaaatttgacgaattctaattatgggataaggtgaaggaatttcctttcaaacaattctttgagagaaaatcgctaaatttttcgggggcattgatccatcagttatatatgtacaagatcaaatttgagaagccagatgaggtgtacttttatttcgcaaagaagagatgcagatttagccgggtcgagtttgcgttggtgacggggttgaacttgttacctgagcctacagaacaagaaatcgaagagaaagaaaattcgaaccagtttattgtcaagtacttcaacagtgaatgatatgtgtagtcttgatgtagatgaacttcctagcttgattttcatgttttgatccaaagttgatttttcttgagagttgattttgactttgact

SEQ ID NO: 125855 - DNA, 623 bp, Cannabis sativa
aaatttatttgagagtattttaaagaaaaaaaaaacggtttatatttaatagtatttaaaaaataattaattgagttaacacacttaaattgatttaatacattatgggacatcttaattctccaaatacttacatactagtaaccaatctataatttttgaatgatgaaccaacaaagtatttccaaacacattaaaactaaaattgatcatcatatgaataattatcaaccatatcatcatcacttgggttcatttaataacggctttcattgcttatcatcaagagatgttttttgaatttttttttgtcgtttttatgtttgggaatgaatttattaaactaataatatagtgttccatgaacttctatatgtatatttggagacatttactgtttataaatagtaaaaaaacacatgggttggtcaccaccatacttccttgctaacaatcccatcatgtactatatatatatataagaccccactaattaatttctcttctttctttctttcatcaaccattttagtttgcaaaaaaactagagttttgcttttcttcttcacatgcttatgtcgactactcactcaaatgcatatggtttatcttcaacttctata

SEQ ID NO: 125856 - DNA, 1934 bp, Cannabis sativa
acaaatattttatcactattgtagttgatcattctaggtatacttgggtacattttatcaaaaacaaaggtgaagcacaaatcgctatccctcatttatccaacttatcaaaactcagtaccaaaagaccatcaaagccattagatcagataatgtcaaggaattacagtttgtggatttgttagtaagcttggtattgttcatttttactcttgcattcatagacctcaatagaactctgttgtcgagaggaagcatcaacatttactcaatcttgcccgagctctcttatttcagtcatatgtaccctaagtttactggaatgaatgtgtgctaactgctgcctacttgataaataggactccaacaccaaaattacaacatgtctctcccttccaagttcttaaatctaaaccatcaaattatactcatttgagagcatttggttgtctagcctatgcttccacattgtctattaatagattaaaattttccccaagagcagtcccatgtatttttctaggcttccctactggaatgaaagcctacaagttgttggatcttaattccaacagaatcttttgctctagagatgtccaatttcatgaaactatcttcccttttcattcagatgatttttttcttgatgaatatcagaattttttctctaagtcaaccaccgatctctcaagtgatgagagtcaacatcctaaaaatctcatgtctacactttcccacagaatagtgacatgtctaattttgattctccttcacaaaataatgatatttccaaaaatagacctgttagagtctctcacaagccatcatatttacaagattatcattgttttctaactcagactaactttgttaatgtgtttcagaaaccttctcatgttactccttaccccatctctcaggttgttgactacagcaaactatctcccactttttgagcagaaatattggccatttctagccattatgaaccataatttttcagtcaagctcaaggcatacttgagtgggataatgcgatggacaatgaaattgatgcccttgagaagaaccatacttggatagctgtgacattgcccgctaaacaacatgctataggttgcagatgggtttataaaatcaaatacagtgttgatggttatgtagaaaggttcaaagcaagacttgtggctaagggttataatcagcaagaaggtgttgattacatagatacttttgagcttgtcactgtcaagcttgttcttgctgttgcaacaactaatgactggcatttacatcagcctgatgtaaataatgccttcttgcatggagatcttcatgaaaatgtatatatgactctacctccaaggtatagtcctaagggggagcttccaccgaatgtagtatgcaagctaaaaaaatccctatgtagattgaagcaagcatcaagacaaatagtttgcaaaattttctagtgctttggttgaggaaggcttccctcatttagccacagatcactcattgttcatgaggcataatggagctagttttatcatacttcttatctatgttgatgatgtcattttggcagggaacagcatggctgagatggaagcactcaaagtgcaattgaacagcaaatttcaatttaaagactggaaaattttaatatttcctaggattgaagtagctagatttaccaagggaatcttcatatcacaaaggcattatgctctgcaattgttagaagatcttggtcacttggggatgcaaaccagtgaacacccccatggaagctaatttgaagttaagtcaaaatgaaaatgacaaattggttgatcctaagttgtacaaaaggatggttggcaagttacaatatctgaccattacaaggccaaatatatccttttctgtcaacaagttgagtcagtttttgg

SEQ ID NO: 125857 - DNA, 836 bp, Cannabis sativa
  modified_base (809)..(809): a, c, t, g, unknown or other
tgaaaaatacttctgtttcttttttgatgttgaataaaatagattacattgaaatggagttttatttagtgcataaaacctaacaggaacctgattggaggagggttccaaacacgatctcttcctccctcattagcacaaatgtccctaggagcagacgataattgagaaggtgggactgcattattgcgtgttgtgccccattcctcacgggagtctctttgtggaggatgtggaacgttgttttgaagggcaatagattcttgcacgtccctctaagtctgatgttgcataagaggaggtgcatcattccttttattctcatgacttggggttgttacttgaaggtgttgttgcggagaaggacgtacattctccctctgttcattctcatgaaatggttgttgtggagtcgtgttttgagtggtgtcatgactttgggtcctttatgacctagacctcccttggctttcaaccgggtaatgagtcgagtgactcccacaaggttgtcccctttttactgtatcggggtgcctcttggcacgggctccacgttgtggtggtctcgcgacttcttaggaatcttgactctctttccactctctattgaatctgagagtcttttctaggtgttgcgtaacatctcgttctccatgaacacctcatggaaattaacaatttgtcacacaccatgggatggtgatgacgaatttccaaaatcacagactcgaccctcatcgtcaaacatgggttattttcttggatgttgtgaggtccctttgttggaaattattttaccagaatcttanatctactcacaagtatgtttataaaca

SEQ ID NO: 125858 - DNA, 1087 bp, Cannabis sativa
  modified_base (1049)..(1057): a, c, t, g, unknown or other
tagtagataaattattttaaaccttacttcatagttccagtcgtattaattaatagtgtgaaaaaatattttccatttatcaatatattcgttcttttacaaaatgctagaagaaataacaatggcagttagataataatttattatagaagagttaagagttcatgagagagtgagggagtagtgatgatattattttaatttaaaataatattaaataaaaaacaaaccaacatagttaagtttttagtggggaccgttaaatgtataggtggaattttaattgaggtggcataatattattggctgggacagggagtgggacaggaactagggacaggtattttggctccataatattcttcagtagtttaaggttttagataaacatttaattatagaaacaaaatataaataagagcttataatataatccataataactaatatacataatataaaatatatatgaataaacataataattaatatgtatatataaattataagcaaaagtatatgtatatatttagagatacatatagacagagagattatataagacaaatttaaatagtttggcagaatatcatttgcttacgtctacggtagcatttaagctatatgattatgctcttttaataaatagagatttacatattttaagaattattcttaacaatgatcccaattgaagtggtgtgtaaataagtagtttggtgaataaaaacagtatttaatgtaactttgcttgtgtagaaagaaataacatgaagaagaaaagaaaaaaaaaagacaaaagcttgtctttctaaaagttttgaggtagaagattaaatggatatagatgaaattggtggcttatatacaagcatgcttgttatgctttgaggcttacaggaaccctacatagaggaagagaaaaaaaataattctttgaagattgatgagaggtttaatgggactagataccttttctccctcttttcttatctttgttgctagctagtagcttgggtgaatgtatatattgttggaatttattttannnnnnnnntagatctactcacaagtatgtttgttaaca

SEQ ID NO: 125859 - DNA, 701 bp, Cannabis sativa
gttgctgccatgatagattgccttgcgactcgattaacaccacaatggagaggtattctgcatcaaggccagaaagtacattagaaattaagtgtctcccaggatagggttcacctgcaagtgccaatgaatctgcccacatccttttcatcttcaagtagtcagccatggattgagagccttttcgagtaatctgtatttttgttcttaagtcatccatgttagctcttgagtgtgctccataaagttcttcaagagcattccacagaccaagggcagattgacaacccatgacctcagaagcaatggcttctgtcatagacccatacaaccaacccattaagagttggtcatgtacaagccatgtctcataatctggatttggatccataccagatcctggaactccttcgactggtgtgcctgtgagaatgaactcggctggggctggtcgagaaccatttataaaaccttccaagcgatgtcctcttatgattgtgtttaccattgttttccacagtggaaaattgtttctgtcgagcttcaaggagaagggctggctcaacgtgttgctgaagggtgttgcaaccggagctgggtttgatatggaagaggtttgaaccatgactgaggctggagtctgatcaccaacgttcggtgcacttgattgatcctggggaatcgacattgcgtaggcaagg

SEQ ID NO: 125860 - DNA, 974 bp, Cannabis sativa
aaattaatataataataaagaatatttttttagtgttatggttggagtagaaataatttttgacactaaatttagtaatagtgtaatactaaatttagtgtttccttagagatgctctcaatatattaaaaaaaaattaatatatataaataatttatccgataataaataccctaactgaaaagagtagcgctaaaatctagacccaaaaaaaaggtgcatgacaaaaaccaaccaaatgtttaaaaacaattaaaaaaaagacaaagggcggttgaggctagacccaatatcgataataagcaattaatttgaatttttaattttattttatgcagtaattaattaagctaacgtaaatgttctttatccataaaatatttatttcttattattctaaattcctatacaaaaagaaaatgacaaccaaccacaacaaaaccaacctactccaatattattatgtgtatatacatataacattgcaagggtttgtatatataataataatgacaatattgacgaggaccctaattaaattattaataatttattagagagataaacactattatataactgataaagttaatcacttatgacaattaatatatatatatttatatatatggttcgtatcgtagatcaagtctctatctgattatattattatatatatttgcgaagagccatttcgtttcgtaagagaacaccaagaataagttaaaataaataaattttgagtaagtactagacattattagacaattaattttttattgtattgtaaacccaaaataagaagaagataatattagtaaaattaattaagtagatttgttcacgacgacaaacaaagcaaactcagctcttacgtcaaattttgtgtcagagtcagaccctaacccacacaattatatacaatatcaatatatactaggggtgttcacaaattatccgatccaatccaatcc

SEQ ID NO: 125861 - DNA, 2281 bp, Cannabis sativa
ggttcgaggaggttccagcgccggtggcggacgtgggcgtcgtaaattcatgagtgattttaatcactttgtcttgtcaaaatatatatatatatatcattacaattacaattcacactactacaaaattgagttttagtgacattgtttgtttaatgacctgcacaaaagaaagtgcgggtcactaaagggttaagggagagctttagtgacgcgcacataaggactctaaaaattcaatgttagtgtcttataatttgggtcactaaaaatatgatgggtcactaaagaataactcccataatttttattaatttttttttaaaaaaaaatgttgacgtatagtgacgcgccaggcgcgactgtgtacacgtatcccgactcacttagcgcataaatatatcataatttttttaaaaaataattaattatttttatatgtatcagtgcctttaaaataataaaaaaaatgtagtttaaaatagttgatggtttagaaatgtggctatcaagaaagcgtctacttccgttcccataaaagggctcctaaaaccgtggctcgaaaatcagtgagacccatccgattgccaaaattatccaattcaaagtcttcatcttcaaatggatcttcttctcttggcactgaatctcctcctcctaaactggtgttgcttctgcagcatcaactccgaagggcccttcctctcggacccatgcccaacaagattcgcttgaaaagaaacttcgcaccaaaaggcgtcatgacagatctattcctactgctaaaaagcttaagatgaatcctccctcggcctccacaagttctggtgatgaagaagaacccatggaagggtcttttaacaactccgagtcgaaaactgtgtctttttcttctgaaaaagtacttccagaagatgttgatgtctctactgacagtgaggaaactgatccagagcctgagccacccttgccaaaatttgcagcaaccccttctcgttctgcttctgtagccaaagcctctgcagctaccaagggtaaacatcccatgaagagctccattcctggtaatatctctccctctcaagctgtaaattctaaattttattatcatgataaccagcgtgattggaacctatatgctacccataagtttgagagtgaaagaaattatgatttgcatgctcatcgtgtctatggtattgtaaagtttggtctcttactggttttgaagggtatattgatagaattgtcaaagaattttatgctaatttatctgatgatattcttgatgagaaatctgaattttttggtaaagtttatgttcgaggacattggttttccttcactgaaaatgacattaccgaagtcttacaactacccaaaggtgtagcaaatgctatagtgactatggatcgtcacctcatgattattgatctcactggtgcacgagttgaatggcaacctggccaaagtcttcgcatcactcatctcacttatggccatgcttcactcatgcagtttgttaattggcttccaaactctaacaaaattgtggtgtctcaagacttggctcattttctctttcgcatcaccttaggggcatcaatcaatttgggttcttatatcttagaccaaattgtttcatttcaaaaaggtaaaacacgtactcataagcttgttttttcgaatttaatctataagattctttcatctccgaaggatgtgtttattcccatgagacactcgagcctcccctcactagcaccatttttcaaccctcagagtactttgatggagcctttcccaagcatcctaagtttttcagttggtgcaaatcctgttgttgctgctcgagttccagttctgctcatgcagatgtgcaggaagtcaagcaggaggtcaacttgatgaacaatcttctagtttccatgaaggaggttcagcaagagatgtccaaacaaatgtccactctaatcaagctttacggggcataagtttttctttatttttgactttttgatggatatattttaatttctacttgtctttagcccttagataggagtaatagtctttattttcttgctttgttttctcaactctggatcctttttccagggggagttgagattggtacctgtgttaaaccttggattaaagttagcattatattttggtttgaagttgtgcttctcaggggagttttgtttggtatgtgtaacaccctaactagcataggcgtattacatgatttttaaacgtactgtgcagatcgttgcta

SEQ ID NO: 125862 - DNA, 609 bp, Cannabis sativa
  modified_base (27)..(39): a, c, t, g, unknown or other
  modified_base (98)..(111): a, c, t, g, unknown or other
  modified_base (521)..(568): a, c, t, g, unknown or other
tatacattaagtataatcatgaaatannnnnnnnnnnnnatgcaacataaaatgcgatttctgatctttattatttagtaaatctaattatattgaannnnnnnnnnnnnngggcacaaaacccaacacatttttacgcgcaccttcaaagtgcttccaggaggcttagtcaagagaagattagaaaaggggttactcctaccagacccaaattccctttttcgtttcctagctctgggactcttggagccagtacctctagtgctcgtaagtccccttttaaccttaatttggttccctcgcctcaagagtatttttacttaggctgagctggttttgacatgaggttgtatagattttgaatgccccatgcatggtggggtaataaggaaaatgatttttatttttctaacatgggcggcttcttgggccggtctaaaattggtcctggtctcccaatccctattcttctatatcattctttctacataacctcaagttgtttttgttgggttttatgnnnnnnnnnnnnnnnnnnnnnnnnnnnnnnnnnnnnnnnnnnnnnnnngatcagaaataacatttaatgtagcatggttcacatgattt

SEQ ID NO: 125863 - DNA, 1267 bp, Cannabis sativa
cagttgtattcacatagatcacatagatacaatttatacaattttttttttgacaaatataaaatatttacttcaacaaatgtttactaaaatctatagtaatattataactatttttcattattatcaaatatataataatatatattcatcttttagtatatttcaatcaattatacattgataaatattatatttacataagcttaagggtatatgcaaagattttatagagaatttatatatatatatatatatatatgtgaatatgtattcatctcttttattatatttccatcaattatatgattaatattatgtttgcataatctttaagatatatccaagattttattgaagacacataatcttaactatatatgtataatttatatatattctatatcatatcatagataaataataagagcttacaatatatataaattcaataataaacatataaaaacatatataatatgtaaatatctaaataaaaaagaaaaaaaagttcttaaaataattcagtcaaataagtatatatatataaaattaatacccattaagaagtgttccatataaatatatatttagtgtatcgtgaccttgatacaatccaagaactttaataaaatatttaccttggggcttgggcagagactcgtgctggtaacatgttataaaataatataaaatatataagaagaaaagaaaaagaagatgaagagagaaagaaaaactgaatgagaatttctcaattgtttatttcaatggggtgaacttctatttatacaaaaatatgactaaaagaatgtgaaactaaatcaatgtaataaaggaaaatacaaccagacattaatggtgataattgattcagtaatttggacatcgatatgtaatatttataacaatataaaaaaaaaaattaaaaaagcagtatttatagtaatgcgaaagagaattaattatattgtattttaaatttggtacatttttaacaagggaaaatttcacacaaatttcaacacattttggatcaaatattttctagaataaactaaactttaacaatgtatgtgacagtgagtagtcccgtgatccgtaaggggaaacatcggataagctgtgcaatcccacaccacttggggaaggtcaagtgggatgattctgagattgtgtaggtatgggattgaacagttgaggagagcttaaatggattgattggtactacctacatcaacaaggtgcatcttatttttcggtagcc

SEQ ID NO: 125864 - DNA, 546 bp, Cannabis sativa
gccaactatttgcatgcttttgacggttacccttctccaagtactttggttgcttttgatttcccaatatttacttttggggggaaattgaggtgtttgaaatacaaaatgattgcaccttttcactaatttacatataaatagggcaaaaagtcctaataaaccacttttagcatttttcttgtttactgagttcagagcaagtacacctttctctctcaaatccatcttggaatttacagaaagagccgaccaacgtcattcgagcagcctcagagctttgaacaatgagtaagtttctcatatttttctcctttaatgctttaattttcaattttttgggtttccattgaagaaaattcaatagtcttgacttgttctaggaaaaatatagagaatctacatttagaaatatgaaacttcaattgtagtacatcgtataacttgattctggtttaatcttcacgatattcagttctcactttgcccatttggggtttagtgacgattaacccttaatttgaggttttgaaattctaggttatg

SEQ ID NO: 125865 - DNA, 786 bp, Cannabis sativa
tatttttgtaaaaattaatctaaattctagtatttttgtaagtttccctttatataattacccttcttttcaaaaaagaaaaaggtctctgcttgtgtagcttagctcattttcagaatttgttagacatggagcatgattaaatattactcaaactgcagatacaatgataatgatgtgtattaaatataaattagatatgtttttttattttaatttaaaacaacttgttgcaggtacatatttttatgcagcaagttatttcaattttatttttaaaatattataaataattcatattttttcataaatttataggagatttattatatacagaaaagaatagcataacctaccacaaaatcttcttggcaatacgacttgttataatgttcatcactctatgatatgatatatcatatatataatatatgtctattctacatatttttatttaaattaaagtacatattggagatgtagagtgatataatatttgtaaagaatcttgtacaatgcatctccattaatattaatatgtactttaggaacatttattgtagcgataacactttttaatatagtttagtaatgtaactagagatcaacctctttattctgcttctttgttgaatttaatttggcataattttatcatgtgtgaaatttagtatatatatatatatatatatacaattagaatgttatgtttataatgaataattttttattttgtgtgacaaataaggtatggttccttggtcaatttattattattattattat

SEQ ID NO: 125866 - DNA, 1268 bp, Cannabis sativa
  modified_base (32)..(55): a, c, t, g, unknown or other
atctcaatagttcagggggcatgatttggtannnnnnnnnnnnnnnnnnnnnnnnatcctaattagcctaaaataaattgcaggtgcacaaacaatacattactaattgagaaatgctaaagggcaccagtggtgcctagctagcatgatcctcttatgtgtgaatatcgctattggtccaattaagtattggatcccatatagtttaatataatagtttttagagagtatcgctaattaatcgcaacgcgacatgtcgagaaggtgctaggcatatgcaccactaatgtctaataacagaagttgctttaacataatactataattaattaataatgtttgggtgttggtaaacaaatgattgttagagcattagttagcagcctttgggctttttcattggactaaacacttcttgtaaatgttaaaatactaatataaatatataaaagtcacgaaaaacacgagtccagcagcaaaatttgattagtattatgtattaataatgaagaccgtgtttcaacctcaacctcaatacaatacaatataaacttatttttgtcattagatcaagaaaactaacaattatatatatataaataattaataatgtttaaaatgaatcgtataatttagtttgaataaacaaaattatcttctttgaaaatctaaaatggtttttaatttttcttactgtctacgtttgcattaattattttcattacacttcttctgcacgcgctttctctaaagtgaaggcatcatcttttattattattattattattttataaggaagctattaatgggccctgcaacttaatgggcctctagtggttgagtggcccatttatatttttaagtctaaagcctactgggtctgaatctttcagtttaaagcccgatggtaagaggaagttgaacgtggataacagataagggaacttttcataattaaccaaaggagtttttataccacatactcaattttttaatttttttttactgtacgatggattttttttaaaaaaaaaatactgtgtaagttttatactgtttactgtgttaaattttcactgttgtttcacgattgttttttttgttgtttcactgttattttaattattttattgtgttgttttacggttattttataaaaaaagtatttttataaaaattttatgtgactataaaattgtaaatttttacccaaaatttagtatttttgtaaaaaccccttaaaccaaagggttaatttcacaaatgca

SEQ ID NO: 125867 - DNA, 1297 bp, Cannabis sativa
taaatataaaattagaggtaaagttgattaattgattaataaaagaggcatttttcaacttactcatgttattttattatttaaaatattttgattttatttttatattagcaactttttcgttaattgaaaacatattttgaaaactgataagttacaagaaagtataaaatgttactatatagtttattattaaaattagtgtagttattatttgagaaaattatattgtatacctactttattttatttgttttagtttttacctccatttttatatattttaagatacacttacttttatagctcatatccacattacactctttagattaatgtaaattatatactagacttaagtagagagtaagagtatattggacaacccactcataaaagtaactatattttaataaaatataatatgagaatatttttgattaatggatataaaaaagagatatttttcaatatattccttatttttttggtaatgttactcaaataatgtttacaatatttgttttagtaattatgatattatttaagatactatttagtttcactgtagaaacttttcaagagaattttataaaataagattgtagaatataatattgtaactttttgttttagtttaaaatttgattatttttttaatagaataaaaactaaaaaagtgacaatatatatttctcacatatcaaaataatcaattttgatagaactttttaaaaaaattataaggaaattagtgtacatcatagaattagttatattactaaaattttattttaggtaacatcatgtttttttgtttaaaatatttttgtgttatatctctttgtatggaaacattttcattatcttcaaaatgcttattaataaattggtatatatataagttttcatgtaactaattctatatgtttaagatactattttgttactttataatgtttaaaaaatatatcaatattgttcgtcaaccatatagaaaggttgttatcttttttttaagttatttttaattctgattcatatttgcgaaaaaatatatatatttatcatacattaaaataataattttacaaaatattttgctatgatgtaatttttaaatccaaaggattattgatatgactgaaaaaaaaaatacgcttattaaaaaaaaaaaaaaaaaataacagtatgttaatcttttaccttcatttaatttagggaaaaaacagaataatacaaaaaaggaaaaaaaattacaaaaatattttaggccggcccattaaacatttataca

SEQ ID NO: 125868 - DNA, 767 bp, Cannabis sativa
aagctaaagatctcgctgagtgtctttcttcacagaaaaaaggcatgatcaaagctatgaagaagctcaagatctggtccaaaaagaagagaaagaaaaaggcactccactctcttccttactaccttcctcctccttctagactaccgccgccgccgccaccacctccacttcaagcaccgattcaaaattggtgctgctcttgctcttgctcttgctcgcagtcgaaagccgagccctctgctccgccattgccgtcttcttggtactacgactccccagttgaggcccaccacgagagtgttgtggcaacagggatcgtggaatatccaacatcgtctgctgatgcaggtgaagatggtgattgttgtgatgtggtggaggatcagagtagttcatcgtatcagcaatacatggtgccgaatccagtgtacgggattccagtagtagttgccgaaagagagagatctggtggagtcttcggttgtgttgtcaacttcggtaggcatctttttcgttgtttctttccttgttatcgcatttagaagttacaaaaagtggaactctgctattttattttcatacaactaagataaaagaaagaaagagaaaatcacattacattctgtacgtgaaggaaagaagaatgggtttgtaattagacaaggatattatatttactattattacccgaaaataagtgtaattgtttagaattaaaattgaatctccactgtctgtttattccctttcaaaaaaaaaaaaaa

SEQ ID NO: 125869 - DNA, 509 bp, Cannabis sativa
tcttgattttcttccattgttataaatctctaacatatcacgcatgccacattataacatgcattctaaatctgatgaggtcatatatattctcttgacaaaacacaaccttattacaactccaacgttttttattagggaaaacatatatcgagtaattaataacctatattataagaataataataataataataaataaataaataaattactatacacaatacactagtgatcatcattatcaacgaaaagtggcatgacattgtaatatgagtattgctaaaacatattattagtgcttagcaactttttcggtattatactgagttttatataatttacgaaacttttaagtaatattgctaatcaatggtgagatgccacttataaaaaatatcgagcactaaaaagggtaaatactattttaaaccctgtgttttgtaaaaattactaattagaccatctgctttgttaaatgactaaatggaccttgtatttttcaaaat

SEQ ID NO: 125870 - DNA, 1007 bp, Cannabis sativa
  modified_base (86)..(86): a, c, t, g, unknown or other
  modified_base (934)..(934): a, c, t, g, unknown or other
attcaataataacagtataataaattatttaaatagatataaataatttcataattaaacgtgattaactgctaatttctaaattnaactaagcggtctttacacttcaagtgttagggtgaaaaagattatgaaaatttggaggcaataacgcttacttgagttttgaaccaaacaaggaacacaatctcttgcacattttcaatattgcctacacccctcactagaagcttctccttatgctcactaaaatttaaatgagcattggaatgttcatgagtttcaaggtgaagtcaaatattctacatcattcaattgaatgtacacttatttgatatatgactcaacctctgtacagttattaaatatctaccactctatcttacgctaccttatcattggtaaggtgtcaactgtcgtcttatccaatggttgtccgacatgcttgaatacaaaaaattatcgatctggcatgtttaggatgatgtcattgtttcatttaggatggttgaatcgagtttctacttcctaaaagtacatagaacaaaatgttaatgcctcgttaaccacataacattcatcaatagatccttctagaggggaaagattcctgacatattgtttgtacacagacattgaccgctcgatgggatacatccacctatagtgcaccagtccgcctagtgtaaattctttagggagatgcacaactacgtaaaccattatgtcaaagaatgctggtgggaaaatagtttccaacttgtacaaaatagttagaataattgtttcaaatacacacataactcaataattgtgtcccagatttgtcttttcaagtacttacagatacctgctagcattaaactttatcacaacacatgacaatcatgagatttgagtcaaggaatatattcttatgctatcttacctcgtnccgtgctcaagtgtgtcggtcagcctgagtggaaacgcagctcgatgctttacagggccctaaaccataatgt

SEQ ID NO: 125871 - DNA, 1220 bp, Cannabis sativa
  modified_base (39)..(66): a, c, t, g, unknown or other
aatgaaatatagtaaagcaaataaagacacaagaatttnnnnnnnnnnnnnnnnnnnnnnnnnnnntaatagcctaatcctcgttatttacgttgaataaagagcaaggaaaatggttccttttcttagagctcttacagtagtatctctgaatatgaacttttagacaaaatctctccacccttgcccagtgaatatgaatcactatttatggggctgtaagcttggagaggaagtatttcccttctagttacaattgatataagtagaaagattgcatagtaaatacataatatcctaatcatgggatttggacagcattccatatctctgtaatctaatcccaaagtcatagggatttccttgatgactcacgatacaaaagctaaatttgctaagtgttggcgtgctgcgcagattgctcactgctaggtctagaggacttcatctgagcaaatgtatgaggcgccctgttcagcctgtatcttgcgagcaggtgcctagagttgatttcacgtgtcaccatcatgtgatgcaacgtcagagtgcaaaaattgggatcacagtgtttatttggatggtttcaagttagtttatgtgcatgtttgatgattgtatggaaatcacaatgtatgttgtaaaatattttttgtttcgttctgaaaatatttgtactggaaattagacaaaaaattaatgaatttagcttttacaaatctaatttggattttttatgaattaattatgatttttttttaatttagatgaaaatatctgggtttgggttacacacgtgcgcgcgcagggatgtggtgtcgctcggacagcacatgtcttttgacaagtgcctgaccgaggattcttgaacaaggctttgtctgaagggcttctcacgcctagttccctcagccaacagtggctgcacgcagcctgtccactcgcccattcccttcatccgcgagtgcaggggtatgcattgcatgcccttgtgcccaattttatttatgtcattaaaacaaaattcaaattttggtagaattttgtgtagaatttgaattttcaattaaaaatctaattatcagaataaaattagttttagatattagtagcctttgaagttgaaatttagctttacggctaattttgaaatttttgattatttttgtttatttcatttattttaattataagatcatatattacttatttaattattaaat

SEQ ID NO: 125872 - DNA, 730 bp, Cannabis sativa
aacaagacataagaaaagggtattacaagaaggagattattggtggttttccccatagctgagagaacaataatggggttttcttctggaaaactgagaatgagttgagctatctccttaattctctcagctgaagctactgacgacccaccaaacttcattacgcaagttagtgcatttgcatacgaatcattctcttgttcttcatcttcttcatctaattgtcgttgtccaagcacagcttgaatccccttcttactgcccttcacccttaaagctccatttttagctgcattttccaatagtgcaaagaaggatcgagatgggaagcccacgaatgagagggagggcacgagggaatgttgattttgttgagttggaaagttgcagggtgctgtgaatccgccggaaagaagagaagcctccatttttagggatggatgagacctagggctatgttgaatgttttttctgaatcagaaacagaggaacacaaacccaattcaattggtcttttgattagtcaaattaaaaataaattaccatcacattcaaaatctaatttttaattaattaattaattattattattattattagaaaactaaaataaaggaaaagggaagatagtaatagattgaccaacagagcaaggttgaattatggaattgtcagactgtaatatcatatgattgtttttttttttttttttttgagaaaatatcaatca

SEQ ID NO: 125873 - DNA, 1900 bp, Cannabis sativa
taccataccagtcacattaccgccaaaagtccatttagtcacattatagacagtaaaattacataatttagaaataaacgaaaaattactagtcaaaaggtttaagagcattttacattgaagcacgtaattattaatacctcaaatggaagtagttcccttctaaaaattaatcaagcatgtcagcctcctcctccaggacaattgaagcttaatgttgatgctgtccttgacttagctgctgggattatgggaattggtgacattgttagggactcttgtggtaatgttgtggctgccatttctaagtcgattagatgttgttttcaagtgaaagagattgaagcgcatgctatctcgttatgcttacaatggttgcatcattttggttgtattattcatcttattgaaacggatgctcttattgtatcacaaagtattaatgcctatcaagagcattataactgttttcatgatttaatatgtgatattatttataagatgtttttctttcctagagcttctttgagtcgtgtttgtcgttctgttaataaagcggcacatggtttagttagacttgctttaaggatgaattctgatattatttggcgagtagatatccctgctgttgttgtaaatgaattttctaattaatttataataacgattttcctctcaaaaaaaaaaaaacttctacaaagttttactatttccatttactaatattacaatgtccttgccctacaatagtaaaaacatgtatttaatctttagaaaactccaaagaatttctaatattagttacaaagattataatttgtttaattgaatttggtcttagtctcacatttgtgattaaaacaaaattaggagtaatttatatttaaatattacattttagtaacaaactgatttttattgtcactaaaacttatattttgtaaataaaaaattatcactagtaacttttttgatggtgacagtccggttggagtacataaatcattccaaatcaaaattaaacatcaactaatagatctataattatataacataacttgacctttataagaactatcatattgattagcaccaaacagagacaagtagatctgttctatacatatttagttaataaaagactaaatatttattaagacatggaataaggaagctgcattaacaagcaaaagttaatacaaaagtgacaatcataacaccccaacaaaacccaaaaataaaaatagaaaatcaaaacaacacacatacatctaacacacctagtaaaaccatggcacataaaaagccaattttactatgtttattgtcatattcaaataaaggctaggtagtgttgtttttaattaattaattaacattttagcaatgtttagtgcaaaaacaacggcggcgaaagccacggcagtggccgctgggaaagccctcagttcggcaaacattggcgcagttgctcttcctcacacatggtcccttgaagtgatggctttgtgcctcacatgtccttccttccgccactcttggccccatttctgtatgttcaaatgtatttatttattattaatctaagagcgcactcagatcagatgttttaaaataaaaattattttttaaaatatttataaaattaaattaaaaacacgctatatcagatactctaaactcgcattctaccgtatcaggtcctctaagtactaaaaatgttccattaattaattttctaaaacaattaataatcttttatgggatataataataataatctattcatagactttcattgatttttttgttgtgttaataattaatataggtatgtttgtttaattaaaaaagattgtaagagaagaaagagagtaagtagtataccagtagccaacag

SEQ ID NO: 125874 - DNA, 688 bp, Cannabis sativa
taataaataaatgataaaattttcgttattgaatcttaaaactttaggggttttgtttatcgttaaattctcgttctgttgatatattatatgtatgaaatcattgagaatataatgagaattttaagtttacagttttagggtttatataattatattatgaaattatattttgtggtttttgatctgaaattgattatcaatatctcattatcaattttttatgaatgttcttgcatgatttatttcatatttcggcaaagattggtatcacaatcaattttttttatgttcttcaaattttcggattgctttttccattaaatctatttttttagcctttaatactcgaaattagtagtgtagatcgactagaaatccaatcacaagcaaaacccttccttttcccgttcttttctgtcgattttggtcggtttttcacgtcagactcgactggtctgaaaccgggtcgcgtaacccgcctccaacccggctagaggaagaagaatatactgtctagcgaagcccactgtcggccttggcgtgtgggggtgcgtgcggcaactctgggagtcgtttttcaatgtttaattaattttttgactccgtttaataataattattattttaatgataattatgtagttaaaaaatttatcaaaaataatttttgatgatttttcgaaat

SEQ ID NO: 125875 - DNA, 2291 bp, Cannabis sativa
aatttttaaaaaatttacagagattatgttgtaactataacaaataccgtcatgaaaaaaaataataaaaaatattattctaacatgtgttttcaataataaaaattgactaaaaaaatataataaaaaattaagaatagcactataccataaaaaaattaaaaaaaaaaataatatagctttgtgacaaatatcatgaaagggttaactcattcaggtccggtagggtgtggacagaagagtacaaacaaacaaatgaaattccaagagttccttgaaacaagtgcataacttagaaaacaaagggactgattagtattataacaatattatcactaccagtatttctaataccttctaaaacatataaattaatcactcttacaaaaacaccttttatgttatggaagtgaccaaaaaaaaaatatcatattagaagaaatctatgctctgtacaaaataataataataataatataagagaagaagagagagcctttatattttatttaaactactacaaaaatgaaaggttaatagagaagaagaaaaaggtcaactactatacaatgattctcctttattgtagagtggagctttctgctaagataaataaaattcttattccttgataccctcttctttaacccttctttattttgctcccataagaataaagttggaataaaaatggtagagaataaaatttggtccatattatcttattattcttctaaaattaaaaaaagggtttcttgtgtgatgaatgggaattaaaaaatagtgatcatgtaagaacatggggtacagatgtttccaatccaaagtcctttgactaattagagattaataacagattttggtgaaaacatttcttaaatcgaaattaaaaaaataagaggatccaatggagtttctctggcgctaatcacgatatgattttcagactctttaactttggccaccaatcacagaaaggtgatcttttattgggtttgggttaggggcagtgtagtgccttgagatatgcaattattatgtgtgttttttgtgttatgtctatttttgattttggatttttcttattctgtttctgtttcttttcccttccatctctattatattgttacgcctttaatcttttatattatatagtctactacatagtaggagttgattcccaacttttatttcttttcttagctttctataaaattgtattaaaaattttacagtgtatattaatcaatatagtgacacgtgagatataaaaattgaggataattctatagtacaatgtttcccttggaagatgactgtgctcctttattcttgctccatttgtggctagctccttctttgtgttagggaataggctttttggggctcttttgattttttttgtcaatttatttagttttatcgctagtttttcctgcaccttatgtccatatttcttaaagacaatattctcggttgtcgggatacgtttgcacaatcctaagactagccccgtgaaccctacaaggatgcaagtgtgcatgccttagtgggagacccgtgtgcgagctcacgtggaggtccaatgcaaaccaagcttggagcatacgtgtgtatgtgcaggtatatgtgggagtagtgagatgtgtgtgtgagtatatgagggagtggtaagacgtgtgtacgagtatatggaggagtgatgagacgtgtgtacgagatatgagggagtggtgagacgtgtatgggagagtatatgggggagtggtgagacatgtgtgcgagtgtatgggggctcgcatgcgagccgtgtgtgtgtaatgtggggagtgttgtgtgtgtattaagtgttgggggctcgcatgtgagcccatggggggtctcgcattcgagccattgcatgtgaacgtacatcgacaaggcgtgtaagaagaaagcgttcaacaacaccttctgagaactctgaaagaaaggaggtacgagtagcggcaacaacagacttacgagatctgaggacccgaccaagggtacactacaaccactctcttgcgacctgtaatcagagaccacacactgtaaccactctcttataacctgcaatcggggaccgcttccctgtaatcagggaccacatgcttgcaactagggaccacatacctgtaactaaggatcactctcttgcagtcggggaccagctgataccaaataagggtacgaggtgtcagaccacctccaacacctgccgcatgcagcgtgaaagcaacgttttgtccccatgggaccactttgta

SEQ ID NO: 125876 - DNA, 1417 bp, Cannabis sativa
tttttttttttttttttgcgaatatatcaaacataggggaaattaatctgtatatattatatttataagaaatcaagaacagtagaaaaagggaaatgaaaatggaaagagacgaagatgaaatgaaactgctcaactgaacacttgaactggaaaattttatcaaaaacaatgtagaaaaggttatcaaacgtaaagaagtggttattcgaaaaattctaaatgaaagatttaggataagcaagctatttgtcgtcaacattaaaatctatagagatagaaagcagaaaacattagcacttttttaagcaacttctatcgataaggtgctcgaaagattttcaataaagaattcccaaaaaggacagttaccgtctagacatgaaattgctctctgtaaggttcaatgtctaaagactcctcaaaagatagagaacatgagaaagtacccttatgcatcagcagttgagagcttaatgtgtgcaatgttaggtacaaagccatgacatatgctatattgtagggattgttagtcattactaattgaatccagatttaaaacattgttgaaagaacattctcaagtatcttagcagaacgagagatttcatgcttgtatattctggtagagacttaaattttactggatatattaattctgattttcaattagacaaaggaaattgacatttgagtcagtattcactcttggtggtggagttgtagtctgaataagcattaagcaaaccagtattgcagattcaactatggaagtcgaatatacagcagcttgcgaagcagctaaggataggaagcggtttggttgaagaaattctacaatgatctgaaagtagttcaagaagtagaaaaattattggtgctctactgtgacaacagtggagcagtggccaactctaaggaaccaagaagccacgagaaaggcaagcacattaacaggaagtaccatctactaatagatatatagtggagagaggtgatgtgacagtcataacgattacgtcagaacataaccttgtagatccattcacaaagacactaccagcgaaatcttttatggataatataactaatatggaattaagagagatgcctaatttttcttagggcaagtgggagattgttaaggtgtatgccctaaaaagtctgtaaagatatttctgattataaataagagttgtacatttttatatgtgcttgaatgttaaattattaatatttaatattaaataatttatatataaatatcaaaaaggtctttattcatacatgagtactacaagaaatgtcacttttaccagcacagttcgctactccgctggtaaaaaggtcaaagttttactagcatacatttgcagtggctacaatctaaattttaccagcgcatttacgcgttggg

SEQ ID NO: 125877 - DNA, 953 bp, Cannabis sativa
gtaattaataaattacgcttaattattcatttaatcacatatttaataaaatatacctaaattaacataatcataatttttgggatattacaactatccctttcttacaaaaattttatcctaaaagtttacttgagtaacacgggatattactcccgcatctgcgactctaactcccaggtcgcctcttcaatcttgatgttcctccacaacactttaattagtagaatagtcttgttccgcaatactttctcctttctatccaagatttggatcggtcgttcttaatatgataggtctgtctgaagttcaatgtcctcgtaactcagtatatgggttgtattagacacatatttccgaagcattgagatagggaacacgttatgaactccagataaagcagggggtaaggttagccgataggctacctgacctaccctttccagaatctcaaacggaccaataaacttaggacttagctttccctttttcccaaatcttcaaattcccttcattagtgatacttgaaggaacatgaaatccccaacctagaactcaatatctctacgcttcggattagcgtagcttttctgtttactttgtaaggcaagcatacgagctcaaatcttctcaatggcctcactcgttctttggattgcattaggtccaatgtatctccgttcatcagcttcatcccaataaatgggtgaatgacattttcttccataaagcatttcctacggtgacataccaatagtactctaataactattgttgtatgaaaactcaatcaaaagaaggtttttgttccaagaaccttgaaagtccaatacacacgcctatagcatatccttaactatctgaaaagtcctctcagactaactatcaatttgaggatgaaaggctgtactgaactttaatttggtaccaattgcttgttgcaaactctccca

SEQ ID NO: 125878 - DNA, 2142 bp, Cannabis sativa
  modified_base (2067)..(2082): a, c, t, g, unknown or other
ttttatttttttaagtatctttttaaaaccaataacttttaatatataaagatatgttcagtaatttattttgaattcacagtaaattcttctccattttaattatgtaaaaatttatttaagggtttacttttttaaaatataattaaataatattaatagaatataagttttttattctatttatttttttacgggccttttttatgccataattaacttatcaatactatattttatctttttcattctttttcctttaattttattaaaaacaaaaatataataaaatattgaaaaatagggtctagcctagctatttgcatgcacgaaacacttgagtgttctactgctgttgtggatattttaacacgcaagtgtacgtatctattgtaagtattactcacacagataaaattgaactcatataaattgtaattaagtacgttaaaattacacttttacttctattggtagaatcaaaattttaatagaaaattaaaactaaaagcaataaaaatagaaaacaagtaaattaatgtgtgaattaacaatgattagaacttgggttattgatttccattatatctatttattatggtctaatataattcaattcttattactactttctatgcaataacaagtttactcgagtaatttatagtcttctcaaatatataaatctcaatcacatgtaaattttctactttcgtgataaatttaaacatgtaaaataaacacagaaacctataagctatccaaacaacataagtactctcgtcctatatcaaaatttattcatattcactatagcacaattgacactcactttttaaatctcgtatcaaaattataaacatttaattgatggtcaggcaatcaaaagaattaagaacgaatgaaatagaacacatagaaaattgaggaagaaccaaatcatattaaagttataaacaaatgtcaaataatatccatcaataccctaataactgtttagctactcttatttatcgtaacaattcgacacaaattaagtaagaacataagaagaaaatagattataataaattattgaaaaactccgttgaaaagccttctcggtcactttgtttctatcaaactcgtactctctaattgcttgatgaaaagtgtgaagatccacttctttttatagccgcaaaaggataaaaaaaaatatagaaaaaaaatccaattttcaaaatccaagggggcgggccgctacactgggcccttagtgtcgcgacccgtgtgctatgttgatatttcttaattttttctatatacgggcctcgatactaaccatcagtgtcgaggcattaaccccccagtttttaggcagcaagctccttaagaatctctgcctcaatactaagattcagtgttgaggtgcgcccataccttggtcaaaatcgatcctctctgtcaaattttgaccttttaatgccctgacatggaattgtagtgttgaggggctcctccactatttttaatttttccccttaagagctccaaacacactgaaacttttggattttttcttgaattaatttccttgtgctcttgccccgagagttgatttatttgtctttttttttttatatatattttttcaatatttctctattttttttctacactaaacctgcaaaataataactaccaaaagcgtaaaattacacaaaataagagtaaaactatttaaaaatacactaaaatcaacctaaaaatagtactaataaaaacctaagaactgtcatttctactgccgtttcaccatatctctctttcttctccctattttagtatatcctttcttattccctcctcaattttttttacctttctcacagtcagagcttagggttttgatttctaatttttcagctcagtttctaacctccatcattaacaacatcatcttcaatagcaagtattaagtgtgcgttttgtttgtgtgcaaaatcacaagagtttttcatttaaaaaaacaaacaaattaacaaacaaagagagaaatctaggtgacgtttggtaacacttttnnnnnnnnnnnnnnnnttttaaaattgaaaaagtgaaaatctttttcaaaaacacgttctataaaactgtttttac

SEQ ID NO: 125879 - DNA, 837 bp, Cannabis sativa
cctagtaaaataaatcccaacagtaccacatgtcgttgattgatggttgcttgacttgctcgaacacgtctgaatggaccaactctaatgctgctttcgctttgaactttaattcttcatatggtaattagcgtgccttactgtattggcagccgacacaaacagtctctatctctattatgacctcaagttgaggaagaccctttagcatacacttcttcatcatcattttaagtttatgatagctgacatgtcctagtcttgcatgtcacaaatctgttgtttcgttctttcgtgtcttgtctacataagctaattctgttgacattacatacagactctaaatgccatcctctcatcatcggtgttccagagatttcaagatcttgttagatcttaacatcttgaggaccgaacacaacatgcatggtgacctgatgttgtaaagtgtgtcactaacaataaatttttcttcatcccatgtatatggtagacatcttggagtggaacttcttttcgattgaatctcagcgtgatttttgtattatcgatgtgagtacttggtagtcttgagttcttggttgtcaccactacacaaccacctttgtactcgatcatgtcttgtagcttctcttcgtctcatgtcatatgatttgagcaacctgagtcaacaatccaattattattgtagtcgaacattccaggaacagtagctgctagagctgattcttcttcctccatcgcaaatgatgttactgcgtcccattcttcatcacttgtcttttctgcatttgatgtggctacattacctcttacagttttcttcttgaaccagca

SEQ ID NO: 125880 - DNA, 974 bp, Cannabis sativa
accatcactacttcaggctaattaattagaccgagtacacatcattaattattatttttttgaaagaaaatagaaatatccattaaaatgcacaaagtctataaagtcataagatacaaagaggagcttaaaatattaaacaactaaatccatacaaataaaataagtaccctcttagctagagagtgaattttaaaggcatattacaatgagaaaatgataaatattaattttaaaagagctactttgtagtgcaccacgtgaaattgcatcattcatagttcatatcgggtccggtgttgggtctgggtcagagtcggagtttggtgccaggtctgcagtccaaggctgggactggggacagggcccggggttggtgtaggggacagtgtaagggcttgagttcgggcctggatctgggatctagggtcttgggtccatggccttgtctagggccaggttttggtttcaggtccggcgtccgagcaactggtctgggttccaggtctaggtctgaagtttgggcttcagggcttggggtctggggtcaggtttggataaggatatggggttcgaaacaagatcgagtctagagcccgagtccccaaccccagacattttgtaactctgttaaaatacaaacctatacaaatgatttattatgtattaaatagtatgattctttttatttaaattatataataatattaagacaatataatataatgatctgaataacatattacataatttaaggataaagacatcattactttagtatagtactagtagtaatgtgatcttttgccttggtagcatggcataaaatcctcctcaataataatatcatgatataattattattttattaaagaaatataataataatgacttgatcaattcaagtccttcaatgcatgtaattaattaaggtttaatacaatttcatgatatcaacataagcttttccatca

SEQ ID NO: 125881 - DNA, 639 bp, Cannabis sativa
  modified_base (47)..(85): a, c, t, g, unknown or other
  modified_base (579)..(580): a, c, t, g, unknown or other
aaataaatcatgtgaaccatgcaagattaaatgttatttctgatctnnnnnnnnnnnnnnnnnnnnnnnnnnnnnnnnnnnnnnnatttagggcataaaacccaatataaacacctacctcgtaaatagtatcagtaactgtgtccccctccattgactcagtaatactagctttgaatagaacccctccacctgctaattcctcccttggctcagcattttgtatacctgaatgcactcctcccaccttagccttggcccgagctttatttttagttgaaacacatttcctcctctctttattctgttgacccatcccgtgaacctccataccagtccccgacacaaaactctctgcatctgcctcctccaccatcgtttccccttccagaatataataaatctttgcagcatcaatcacctttctcccacacttcctctttcgaccatccccttcatcctcaacttcagatttatccccacccgtagcaacctcacgactttgaactcccttctctttatcaccattcccgtgtttgtgtttttgtgtactatctattagaaatattttaccagganntagatttactaccaagtatgtttcattaacatcctaatatgaattctagaacaatgaaa

SEQ ID NO: 125882 - DNA, 1408 bp, Cannabis sativa
tggaggcttgaagcggggacgttacactcacaacgtgctacattggtataatgctggacacttgataaagcctattcctccgatgtgggacttgggttgattccccaataatataacgtaatattaagagcgttgctatgggaccaaggtgtctagcaccactatgaggtgaagccctatacttggttatcaattctctataatctttattaaagtaaaatgtatggaacccaatattaaattgcacaaattgagatttttgccctttaaacttttacatatactaattaattatgtccctaaacttttgtcgtcgttaaaaattcccctgttcaattgagattgttagatttaagaatttttgttcaatttcattcaattttactaatttagtgattgtctatgtactaaatcatgctccccaaactttgatatatctactaaatcatatgttcctcgaactttgacatgtactaaactatgcccacttaacttatctatgttagatttttcttactaaaattatataaaaattcttaaatttaacaatttcaataatttaaaagagatttttaacggccttaaaagttcaaaagtcataattgactaaaattctaatcaactataataacattaatcatcacaaaaatgataatattgaagctacgtactttgctctctttaattaggtcctagctagatatccttcttgacttcttgtacctataattaattataagataaaactgtaattattaaatcgactgaaaacattatagagatctacttattgagaaattaatacttagttcccactatatggagacgttcattatatacatatatattattaatatactatacaatttttctgattttatttcactaattaatttttgttaaacaattcgaattggatggctcatttaataatactaattttgattgatatctattttaagttgcaagctactttagcagattgctattaattaaaaaaaatccataatttctttaagaaaaaaaaaatactatgttaattcctatgttgtaatataataaattaaagagagatgtcatgaaagtgcaatactatatatatacatacacatctcaaattaccacctggctctgtgccactggtcgatccatatgcctttaaaattgtcaaccaacacctagctttaccataagactctccaaatataaatttaaaatatctaaatgtttcaaatatattttatttatgtgtaatttttagactatatagaaagcatatagaaaagtaattttttttattaatctttattacactacaaatagttttacttttagtcacaacaaaagttgtggttaaaactaaaaaagttgtgactaattataaattattatttttatattgtgacta

SEQ ID NO: 125883 - DNA, 501 bp, Cannabis sativa
  modified_base (444)..(472): a, c, t, g, unknown or other
tcctgataagcaaaatctcctcccgaaagctttgaaaaaccttctcccgaaggttgtgttgattttttttagacttctctgcgaagaatgcggataattttgatttagttcattgcccatatcttcaatgtggtaacatggagtgtatgaaacttgtttagataaggaaacatttatttaagaacaatatatataggagttataaggtttggtatcaccacagagaaaaaataagaaatttgggtgaggtaccctctaggaaggataagtttgttaatggggattatgaagaagattataaccttgcagaattgattgatgatgtacagtttgaatctaatgttgatcccgaaaaattccaatttttttagaagatgttgaacaacccatttaccctaattgtactaaattatcgatgcttattatgttggaaattattttacnnnnnnnnnnnnnnnnnnnnnnnnnnnnnttattaacatcctaaataagaactttcta

SEQ ID NO: 125884 - DNA, 2531 bp, Cannabis sativa
  modified_base (2186)..(2190): a, c, t, g, unknown or other
aatctgcacaagtgcggatatccgcactttgcggattgaattagattggatcgtgcggattagattagatcagctattttatgaacacccctaattgtagacaaatgactcttttatattattttttactataaaaaatatcaataattttctatatatatatttttaagaattagaagtaaattacttaaagattatggtaaatctatagtagttttgttaaaattattgacctctgattcggtaaactaacagtggaaccttatttatgatcaacaatcaccacgtgtaaacaataaaagtaaataaaaaaattaacacatcgatttataaaggttcgaccgtctagttttgtgggtaatgacctactctccttttagttgtattgattcgagagataacaccacataaattacatgcttttaccttgtaatttctagtatgagtctctatgaatgttacgatggttagaataatgtatgacagatcttgaacaagtgagatgagagacaaacttagtgtctaatgaactaaaggtggtgtgtgagagagagagaataagagtgctatagggctttcgagacttagaacttaggtccttttccatttatcctagcctaatgctctttatatagattagagcttacaaaagatctagattcaaataagttaatatctcttaaaaatagaagatattactctttttattatataattaagctataaaaataactaattaatatccctaaaagataggtagatattttggggttgaaaccctattttttgttgacttaaactcttaagcctctttattttgatgattaacacgtatttgatgattatttgtcactaatgatttgttgattttgcagcacaaattaaagacaattaaacattttctaaggattaattaactctaagggtaaaatggtaattttactaaaattctcaaaatttacccgaagtggatttcaaggctcaaggaactcaagacaagacttcctaaaagtttatttatatttcctagtcttgtacagtaattttcaagtccatacttaaaaatgttttaagtatgaatttttgcctactaacttgtgcgacaagttatttcacaaaatgatatcctaaatttttaaattgacttttaaaatcacatatcatttaactaagagaacaaaattaaaatttctgaaatcgggtaaacgagtaagaaattatgcacgttttagtaaaaaaaaaaagaaaattttgccactataagctatccagaattccatttggaatccaaaattctgattgtaaccaatttagaatttcggttccaatctagaattttggatcacagtagaattctccttgaaatgcgtactaacagctataaacgactatatttcactctaacaccatatacactcaatttttactcaaaaatttaagttgcctgagtatttatttcatataccaaacctattcaagagattttatgagctcccaagtttaaaatctaacaaaacacttttcacatactttaggcaaaatttgtatttatctctttaagtgtgcttgttaatcacactaggtttttcattgtttcatcatacttctagagtgagttaaatttgcttgcaattccaaacacatttttaaattttgattgaggtgaggttgccaccggtattgtaaacaacctggttagagtgagattgtcactacaacaatccgagaaagaggtagatagtccttggcggtgcaaaactattataagaggtttagaaacaccttggtgaaagattcccggttgtaagggttagtcaagcctgttaacttgactcgataatggaactcaaagctaggtctatagctttgaagaccagcgatgtaggtggcttagttctaccgaaccttgtaaaaattgagagtttggaatttcttacctttaaactctttactttacaagtttggttatttgctctatataattgctttccatattacttgcatttacttgattaaggtgattaattgcatagttttgtgttaaaagttttaatttactaaaattagcttaattttccaattcaccccctcttggaaacatatcttgggttaacagttggtattagagcaagtgctcatttatttgattagatttcacaatctagagcatggagtttccaagtaannnnnaaaataacatgttagaaggtttgagcctaaatagagcaccatacttcaatggagtagatttttgttattggaaaattagaatgaaaacttatctccaatctatggattatgatttgtggcatatagtgtccaatggttcttacattgctaacacattttataaatggtgtaaaagttattaagacttatgaggcatatgatgagaatgataaggaaatactttctaagagtgatagagctaaatatgcacttgtttgtggtttggatagagatatatttaaaaatattgaacaagcctctaccgcctttgatatgtgaaaaatgcttgaagttactcatca

SEQ ID NO: 125885 - DNA, 1624 bp, Cannabis sativa
gagagagagagagagagagtttactcaacgccgaggccatcattagagaactattgtcgaatcaccatgtgcggtgctgctcaggtttgacagtgatgaaatgaatagtggatcaagaagctcattccaaggaggacacgaatctgaagcctatttatcagtaggaggtcaagaagccactaaatcatagtcgaatatctcagactccatggattctgatgaacatcacaatccggttctaatgatctttaagcttgacttttagaggggttttgttctccaagagttcttgagctcaaccatattgcttatcgtcagaaatggtgccagaatcacgtcaaaaaatttattaaagggtctcggagtcaaaattttgactaggtagatctcttccttagcagctcgtgtcaagtggggcttgcgtgggtggaggtgtcatctaagtctgctagtgtgtgtcactagcgtgagacgagatgagagacaaagagaggtcaccggcaaaggagaagagaagttgttaaggttaggggtgagcgagagtaaaagactgaagagagagaaagatggtttaggaaattatgtttttttttatgttgttatcattttatttatattattttatatttatttattaattttttggttttttattttttttaaaatgatttatttttagtcttaaattaatttatttttatatttgttaataattaattatatggaccaataaaatcatgccaacgtgtaaactgtgtacaagtggataatctaacatgtcacttaacagatgacattagatggaaaagctcaattactaacaaaacacgagttttggggattttacctccaaaacatgagttttagggattaattactagaacagtaaaagtattgagagttttgccacaattaacccataaataaactagtaagagatatatctatcttatatatatatatataggaggtatctattgtacatcctccagtttttaccctatagtatagggtagtaaagtaaaccaatcagaaatcaaataaattaaattcttctttaattagaatgtactatctgtgtaatataatttaatttatttattattttatataattaaaattaccttatatgagtaggagacatgtgtaatatgtactatggcaccaggtgtggagtgttttagaggcatgtggggaaatggcttggctgagaaacaccttaggagttgtgagtttattgttttgccttaaacttttacattacaccatatatcaacttctttaaaatatatcacaataattctacttttattttttaaaattttaatatattttatttatttcaaacatataatatcaatatttacatgtatcctcatctaaaaagtacaatttaaacctcaaacaattaataaaatatgtttagagcaatgaataatatatttcataaatgtagagcatgaatagtaaactttaaagaagctataaaatagaggagtttaaagcatacgatgtagcgtaattttagtttagttctttaaatattttagagattctctattatacagcatctaatgtgagtgtttgtaacaccctaactaatataggcgtattacgtgatttt

SEQ ID NO: 125886 - DNA, 1710 bp, Cannabis sativa
  modified_base (1669)..(1672): a, c, t, g, unknown or other
aacaaaagaatggaatgaaaattgtttcatttccattccatttcatttcattacctccaaccaaacggcacctaagttttcgacacttgaaagaataatatttaatttttttttataattgtctacttatagtagacattccattaatttttaacaaattataaattaatcttatgataccgaagccaaaattcaaaacaaccaattgaaagtttaaattttattttcggtagaatgaacatgaatcgtttgaaatttttcaaaatgataaaatatttaccataactacaattatacgctatcatattaaaaaataattataattataagttttcaaaaatataattttttctcaaaaagattattttatggaaaaatttagaaaaaaaagttaaaaaaaaatatgagaaaaacagtacaaggtaactggttactctttagttatcctaaaagttattggttacccttacataattttctcatattttttaacttttccttaagtttttctcataaaataacctttttttttccatatttttgtacacataaaaacccaaaaaaattgcaatttcccctttaaatttaaacaatttgacaaaataataagtgtataatataatatatatcatgcaattattatacacacctgtcataaaatgggtcatatggtaaactcatcatttttgggcccaatattttaaaatttgagtaaattttacgaattttgcattgcacatcacatgaaaaaaaaaaaaacctcttctcaacaattatttttaggaataattatataaaataccattttttataaaatttaaattttttttttttttacattttatagtatttttattaaaaacagtaaaaaaaaatacataaaagtaacaagaaaataacacttaaataatatcaaaacaacaacataaaataatatacaaataacaaaaaattaataaaagtacaacatgaaaatactgtattttctataaataaaataatataaatcataaaaatatttaaaattttgtgaaatcatatttttataatttttttattattttgtgtatttatgaaataaacctattttttatatcaaagtctcccttacaaataaggtttaatttgcatagacatatgttgctcccttatgtataaataaccttaaaagtaaagctcaaaactcacttgtaataataaagaatatactcatatgtaccttgtgttttttcaaaaaacaaatttagttttttgtattttaaaataatacatatttagtgccttcaagtcaaattaattaaactactctcaattatatataaataaataattaaataaatttgtagctcttataactgattaaatacaagtttaaaatattaaatatgtacaattttaaaatataggacacttaaaaccattttattttttttattgaaatagaaaaaaattcaaactttacatctctttttaaggagatgtgtaatatcattaaactatatatttataaccacaaagttaaaaccacttaaatggagtattttttttagtgcaaatatttttaagaggatgtgtgttggtattttaatgatggagtagataggttgttgtaatgaccgctctattaatttggattagtaaaggtaattagcactaatttttattattnnnntattatttgtgaattaaatttaattgtggaccccaata

SEQ ID NO: 125887 - DNA, 2545 bp, Cannabis sativa
  modified_base (2303)..(2304): a, c, t, g, unknown or other
tgggcatgtggaaaatagaaaagaagtaggtgggcatgtgggaaatgtggcgagaagtaggtaacgattttttattgggccctcatagccgacggtttaaaattgtcgcctatactgtaggcgatggtagtataggcgatagttttaaaccgttaggtataagggcccaataaatttacgaattccaattaaaaccgtcacctattcttgtaattactgttataaaccgtcaggaatactaatttttctcgacagctttaaacaattacttaatttttttagcaacggtccccccaaaaaagcatttttaggaccgttgcaaattctaacttttgtagtagtgttcccatcatccacatataggttgacagtctaagaggaccatacaaacttcggaagacatgcttcgctcttaggttttggattttggaggtagttggggagaacacttgtcactagtggaattcacatacaacaatagctaccaagccagattggcatcactccttatgagactttatatggaagaccatgtaaattgccattgtgttgggcagaactagatgagcatatcactattggaacccagataatcactagtaccacagaaaatattaagggaatccgaaaaagacttaaggttgttcagagtcgtcagaaaagctatgccgatctccattgataagaagttgagtttgatgttggtgattatgtcttcttgaaagttactcctatgcatggcataacaagatttggagtgaagggtaagctagccccgaggtatattggacctttcgaggttattaagaggattggggaggtcgcttaccgattaaacttaccaggacatttgggacatgttcataatgtgttccatgtctctatgtttaggaagtatactccatatctgtcgcatgttattgagtatgaggctatccctcttcaggaagatgtgacttatgaagagcaacctatcaaaatcttagcgagagagctcaaagttttaatgagcagagagattccaatagttaaggtcatatggaaaaatcacagagaagataaggctacttgggatttagagtctgagatgtatatgaagtatcctcacttgtttaattttcaacctgaggttgtgctttaaaattagggacaaaatttctttaaggaagggaggatgtgaagactcgatttgaccgagtcaaaagttatatatataataatgaataaataaataaatataataatatataaaaaaacaaacagactccctctcatcctcttccgcactcattctctccttttctctctcttcaaaccacacaaagaaaacccacaaactccatcactggtgttactctagcgagccatctctagccactgtttggccctacgtgtcagaccaatcggaaccccaagtgctgacgaccacaacccccaagtgacgctgctccttttagcgtcgttagcctgagatctaaagtcaaagtttggcggttcaaactttgaacagattctctagccacctctggtgtccatttgacgagccgtccttaccactagactcagctcgtcgagaaaaataacctacactaaactatttcacctaacttgctactttttccagtgactttttttgttttagctctgcccttttccgacaatatcgggtaccgttttgaaaaacagttggcatggatgtaatgtactcgtcgaggtagtcgttttgaaattcactacccttattttcggtgacatttctggtacaccaatttttaccaccaccagtagttaatgtgcaccgcttaggtgaggttttggaactccaaacgttaagtataggcatattatacatcgttaaagtcaattttgaatgtagaatgcaatgataataattatttggccatttgatggtataggtgaaagtaatatctaagattggactaaataattagagctcgggacttgagagcttaagattgtcttttggacaaagtttaacgacttgggagaggtagggactcaacttgattttcatatgtgttgaatatcattagacatattccaatttttatgatttgcaaattttttgaaaattaaaaacttaatctgcatacttttcttgactgttttggggcacgtagtgccaaatatatttttgtacaaatatttatgcatgttatgattttaggtttattcaatatacattcgttatgctgccaaattttctatgaataaaaaggaatatgttcttttgttatttttattatttacctggtttggttatactgatgagagccatgttnntcatgttcggtgcatattgttgttgcacgacctagtctctgtgtaaccataggtagatcaggtgtgcactcacttgtacgtgaaagaactagatgtacaaggagtcaattaaatcccaaccgcaatgttatggtggttatcaggtgcgactacccagcttaggatgtcgttttctatgattggtaatattgggagcaaggggtctagtggacggtgtgatatgcatttgacgcttgatttt

SEQ ID NO: 125888 - DNA, 834 bp, Cannabis sativa
  modified_base (54)..(61): a, c, t, g, unknown or other
caacattaaatgttatttctgataagtaaatcagattatattgaaatgagtttnnnnnnnngcataaaacccaacagatattacatgctagccatgtcatattcccacacaatgatcctttggtcatagaggtgtagattgcaaacaagatggtggcacggactatgagcttctttaaatagtttctttaaaacaacttctgagaagatgggactcaagcttaaaacttaaacccttccactcagcttgtatacaggatctccgtatagagtgttgcaccacttggaaaaatctacctaccatttattattggacaagctccgaggagcataattgtcatggcaccattcctggtaatcgatcacccatgagcttttaatctcatgttaagcggaccgaccctatctgatttaaaatttgtcacattgatttttcatctttgcgtcatgttcccaactaaaagtggggtgtgctatcttaatgaaaatcaaaggattgcacgggaatcctataaccttggtctatctaaggtcaacaaggaaaatacctccggccagagtttagataaggggaaaagcattgcttaataggaattcacccaaactagggatgaagacatggatacccgacttgggtaagaaaatacaaatgttgggccaattgaagaattagaagtaatggaaatcaatcaagatatcccaactagaaagctcaaaatcggtaaaggcttgctgctcaaaataaaattatccttaataaaatttttgagagaaaaccttggcatttttgccgggtcacatgaggatatggtcggtatgttgggttttatgccct

SEQ ID NO: 125889 - DNA, 820 bp, Cannabis sativa
atacataataattgtaactatattacttaataattatataattgtagagttttaataattgagtaaatactatatagtgtggatttatataaaaaacccaaaacaataattacataattttttgaaataagtccattatgtgtaattaacacactaaattgaataagcatctggaattacattcaaattagatgcccaatgaaataaaacaaaaccactttaaagggttaattggaaattttcaaagtagacccattaaagggtcgttttagtagaacctcttatttgtttcagcatttaggagagtttttaagttcaattattttcatgattgcatatattgtaactatttaagataacttgtaaactttcaaaaaattcaaaatagtttacagtgctaaaaataagatttaaacagttacttaccacacttataacaaaacagttatgcatacaataaaatatataaatcttatttttggcattgtaaactaattaaaattttctaaaaatttaacagatagtcctaaataactataatgtacacgatcataaaaaaattaaactaaaaatctatcttgtatgtcgaaaaatataaaagatctatcaaaacatctatttagacctatttaagaaattcaatataaacttacccaaaacaataaacccatcatgaaacatagtacaataataattatgcgtatactaaataattatgggaaatttgattttctatacttaaaaaactaaaatattttatttttaaaccaatacattttaaactaacaaaaatatgacacttttctcaaaaccccaaaaa

SEQ ID NO: 125890 - DNA, 1972 bp, Cannabis sativa
  modified_base (979)..(980): a, c, t, g, unknown or other
aatcttatcatggatcaaattgcgaccgtgataagtttgttacagaagctgccttcaaagccgacacaaccatcaaggccgacacatcaatcattgccaacaaatcgatcagactcggtagagccattacagacgatacatccatcaccgccgagagatgattatgatgaggatgatgtctatccagaagattgggaacccaatgtagatgaggttccttctactcctgcaaatgccattgtgattgccctgggtgatacacaatctcaagatgtggaagagttgcacgggccaccagctggggtggacttctccagggttaggagaaagcggaagccagttttcttgaaggactacacagcggggaagaagaaacaatgacatgggccagttgaagtagacactgtgaaaccggcggactctcggctgttgaaatttttccagaagtggatcacttacgctagggacaacggccgtcgtagggatgttcacattggcccagccaatcgatcatggttcgtcaaactgatggtgctgggagaatggctcgacgatgctgtaagttatttcttaacggaaaatttattgtgtttttaaatttttgtgcgagtttaatgcgatttatatgcgatttctatgcgatatctatctaacttgtttcttttgaatctttatatgcgatttttgtgcgacttatatgcaattttatgcgatttattcacttctttaatttatgtattatttgtgcgacttaagtgcgatttatatgcaattttcgtgcgattaatgaaacatttttttaatttctcttgtgcaatttcctgcgataattgtgcgacatttgtgcgacatctgtcttacttttttcttttggaacacaacaaaattgatgccatggcgcacttaatgagaagaagaaggaacctctatccagaagtctacacgcgaaaaggtgtagttttggacacatctgctccanngatattctccatgtattggaattactatgaaggtgacaagagcaagataaaatgggatgaggctgttatgcattatgtgcacgggatggagcatagacacttgccatgttgggagaaccaggattacatctactttgtgttgaaccttcccaaagagcaccacttggtggcagttgaggtggatatcgagaactgggagatcattgtatatgattgtcatatcggtgccacccttaagcagaacatggagtcatatttgaagccttacagcgagctatttgcaaatctaatttgagctagtggttattttgagttgaacaattatgtacttccggttgattgcggtgatctcagccagctcctaccattacattatagaagagctaccactgaggttgtacagcaaacggagacaaggtaaatcttttttttttaacctaagtaatttatttaattttgcactccattatgaattacttaacttaattgttgttgatatttactaattttttaatttatagtggcgattgtagagtgtttgccatggagtacattgagcactgcatgttggaccgatcgtttgagcatgttaatgatgataacatgctcacctttagacataggtggtgtgtggacttattttaccagaacttgacatggtagttttttgtaatgttattcatataaacacataagcttttgcaattatattatattatactgtgaaatgttaaatcgctcaaatgtcccacctatatcgcatagacatcgcaaataatatcacagttgtaataataacttgcttaactcgctaaaaatgtcacacatacatcgcatagaaatcgtaaaaagtagacagcaaagcatattaggcatgttactagtaaaattgccaaatgtcgccagaattcgcataggcatcgcaaataaatgtcgcacaaagtcgcagacccattaaaaatattcatgcatattgttaaatattcaagcta

SEQ ID NO: 125891 - DNA, 1398 bp, Cannabis sativa
  modified_base (1253)..(1260): a, c, t, g, unknown or other
acatttttattttaaatgtgcaaagaagcatttcccagaaattatgccggcctatgcacgtcggtcaaccggtgtattaaaatgaagggtgcgcttgcatttttgagtgagctcgccatggtcataaacagttacagttatattagccagtcaacgcctatgtgccttactcaggtcaaagagcaatataatgctccaaaagaccatttctcattccctccataaatagaccactcttaaatgcttgaaaagacacttcatcattctaaaattgcttatatattgctatcaaagtactctaaccaatttattcaaaaaaaaaatcttttgaaaattattttcgaacttaagccaaaattgatctttccatttgagtgtgtgtgcatttctctctaggttcttacattgtctttcataaatcaagaaagtttattgtgttctgacaccctgaaaagccctttcattgtaacaacttaatattttacctggtataggtgaaattggcacttcaacaattcaaacaaggttgatagttcttgagaggaactattgtataaggtttaggtaccaccttggttaaaatacttgattgtacaaaaaattggtcaagtccataacttgacatgttagtggaactcaaagcttgttctaattttgaagaccaagaacttaggtgacttaagtttcactgaactttgtaaaatcgagagtttgatatttctattgctaactgatttcattttaagtatatactttgattgtacattcgttcacctatttactttaatttcattatttgtgtaaatagatagttcgggattatagtcccaaaaaagttttaaactttcaattcaccccctcttagaagccaatcttggcctactactttctatatttctttcaaaataaataatttctaaggtcgagtgactgaatcttcgaatatcagcaaagaaaagaatgtaaacagaaattgtaaaccagtaaaattaaattgataaaaagaaagtattatgagttcgtgaccaaaactcaccagtccaactttgaattgacatctaaggaaaacgttgattcaataggtgtcatagcctcctcagctgtctgttttagaagatttaaaaaaaatagaaattattcataataaagttagatgctgattttctgagcatgacatattattgcaagcttcaatatcacattcaagttacaaactttaaacaactttaaagtgtgtgtgtgtgtgtgtgtgnnnnnnnnagagagagagagagagagattttgcatcagcagagtttcaaataacaatacttcaaaatgagatacaatgtgaaaaataagttttaggctctttggaaaatatagttctagagactcttagagagagagagagagaga

SEQ ID NO: 125892 - DNA, 1053 bp, Cannabis sativa
atttagggcataaatcctaacagagagacaccttctatagtgatttgaaccctccattgttcttcaaccaattttcccatagtgatagagtgtcatgcccacacatagaaagtgaagtaatcaatcatagtgcagaagacggtcgtaatcaaacccgaaggagagaaagaaatccaggcttagaacttgataatattctatgacagaaaggaacaagggttagcgatctaagcagaaggagtcatattattacgcaacaatcaatgtaagattttctaaacttatgcgtttaatttcattgttttttagatattcatatttaggatgttaatgaaacataattgttagtaaatctagatcctagtaaaatatttccaataattgtcctcagagtcatggtaatgatttacgttcatgaaatagtgatttaaaacgatgaatatattaattgtgttgatttggatgtgttgatgttggtttatgtgttatttgatgatgttatgtgaattgaaaaaattccatgaaaataatttcattttcattctgaaaatattttatttgaattccttgtaaaaacttaagcaacttttgtttttacggaactcaatttcgataaaaaaaataagagagatatggtgttttgaaaatcagatgcatatgggtgtcgagatggtgcatcctgtgcaccaagcactccaataagaaggtgcatccccgagcgtggctggggacaattccttgtctgaactcgtacgcacacacggctccaaacacgagatgctgcatctcgtgcacacggaggctgctggcgttgtgttttaccgcacatctgaggccgctaattcccttccacacgtgcgtaggaggctgcatgtagcctcctcgtgggcagtttgaatagtttcagcccaaaatccattttttttggacatttttcacccaattttggaattttccaatttcaacccacaaatttcaaaataaaataatatttttaatatttaaacttaaatatcaaatttataaattaataatatttaattttttaatata

SEQ ID NO: 125893 - DNA, 858 bp, Cannabis sativa
  modified_base (702)..(704): a, c, t, g, unknown or other
gacaaggagaagttcgtagtctaccgtagcactcttgacatccatttggaagagtttcatcttcatgaagcatgcaatgatgagtagcagtcttatagactctaatcgagccacaggggcaaaggtctcatcaaagtcgattccttccacctgattgtatccttgggccacaagcctagctttatttagagtcactctcccaaattcatccgacttgtttttaaagagccattattacatttgctccatcaggccgagggaccattatccatacatcgagtcttttaaagtttcccatttcatcctacattgcagccaaccagaactcatccaatagagcatctctcacacttttgggctcaatttgtataagatagcaggaaaatgctaacagtttctgcagtttctgtcttgttaccatggtgtcatttggatctcctatgacagtttcctgaggatgagctttctaaacccaggagggtggtccacttttgtacaatttgggctgttggagttctttggtcatagcactattaacttcaggtcccctgtctggatcactgacatttgcttgcacatcacctgataatcctggttctttgtttagagactctgtaggagtgtcaggatacacttgggttggtctagtgataactagtctagatcaagagaggataggggcatcatcctcgacacacactnnntcatgtccttctaagtcatcaaatttaacgttcattcattcgacaacagagtgagtccttttattgtataccctgtacgcacgactgttgatggagtaaccgagaaatgtcccttcatcacttctaggaccaaacttggctaagtgatctcggt

SEQ ID NO: 125894 - DNA, 2063 bp, Cannabis sativa
ataaaattaattttaagtataatattgaaaaaattccataaataagcctccacaaaataaaaattttaggtccgtcactggctaaaaccattttttttttgtgtgtgaatagacatgacagtatatatatatatatatatatcaaacacttgttattgaaagaaaaataaaaaggaactataccttaaatttttaatagccatgattatgtgcctcaataaaggtaatggattgatgtgaaaacacattcaataaaaaagttgacgtgagcaaatcaattaaaggtctttaactacagtgaaattataaaacggtattctacatgtgtaatattaacaaatgaaggaacaacgttatttatgtaattcatttgtaaaaaaacatgttcccaagtaaatttcccttttttatattattaagattgtttttttgtagttgtgcatggtggctagattttggaaggccttagtagccggattgcagtaataaggtacaaatttaatatgtatatatgtatgtattttgtgttgtattgaatatgtattatgtgtatatggattttgtaattgtattgtattgtatttataaaaatattatagttgtattgtatatattttagaaaatttacatgggaacacgttttttgcaattgaattacataaatgatgttggtccttcatttgttaatattatcacatgtagaataccgttttataattttattgtagttaaagacgtttaattgatttgcttacatcaatttttttatgggaaatttacatgggaacacgttttttgcaattgaattacataaatgacgttggtccttcatttgttaatattatctcatgtagaatcccgttttataattttattgtagttaaagaggtttaattgatttgctcacgtcaattatttatcaggatgtgttttcacatcaatccattacctttattgaggcacataaccatggctataagaaatttaaattatagttcctttttatttttcctccaataacaagtatttgatatatatgtactatctctatatattatatagaatattaaataaataaagttatttagcaaagatggtcgactattctatgataatttattagcttattaaatatatataaatgttaataaaatattatttaaataataagacattattagagaatactaatggtttggatttattatacactttggagtatatttttgtacctgtatttgtttttgaattttatgaatttgtttgttgaatgcgattttagtttttgtacgtttaatggtttttttttattttttttagaattttattgaaatttgttcaaatgtgtgtttgatattttatacctaagggttattttttttatgttataaggctgtatagtgtatactatattttttgtatttaatttagtttattgatcatatatttggtgactaaaataaattgaaagttacccaaatgtagattgaacataaactatatgagtgacttctaataaaataaacaatctaaataactaaaaaaaatctattaatatgtgatatatgtatagtaacctttctacatattaatattttaattgtttattgggtcttgtgatggtttgtgccaatcagatcctaaaggtgatttggtagctaagaagctctttgtaccttggcagctgatggaacaggaagcttagctcgcacaatatgctccatcggtaagaggtggtgcaatatgctccctcggtaggaggtggcgcaaattgcttccatggtaggaggtggtacaatgtgttcgcttagtaggaggtggtgcaatgtacttccttggtaggaggtggcacaatgtgctcccttagtaggaggtggtgcaatgtgctcccatggtaaggaggcggtgcaatgtgttcccatgataggaggaatattttataatttcttctccataatcatgtttgaaactcatttgcaaaattagggtataacacaatgttgggctttatgccctaaataaaactctaattcaatgtaatctctatcatttaaatatcaata

SEQ ID NO: 125895 - DNA, 1788 bp, Cannabis sativa
ccactctcagacgactgctcttgaacccctcacagaagaagacgttgatgtgggaatgagaaaaactttggcatcaatcaaaaagatcaatacattaggtatattctattaaaagtacaataatctgtcaaatgcaaccgtttctaagtattgtttgtttttgaaacaaagctaattcttccgtttcgtattttaactttgtagaatgtgacattttatatataaaattccacttaaattggacatacaacaatttactacgatatctcaattgaattttattgcacatataaaatacatatatataatcacatccaaaaagaacactaatgtcgctgcaataactaaaaaaaattctcaaagatggaaatctcaaactccatttattttttttttaaaaaaaaataacttacctaaataaaaaatatattgcactaaacatcacctaattaaaaaaattaattatacgtgcattacatgtaacatcaacttaatatacatatatgtatattcttctcccccaatatatattctaaaaaataacccccaataatattcaaaagtaaaattagcccctcagctatgttcgtgttttacttaatgataataatgtcagttttttttttctgaagacatttatattcaaccactaaaaaaaattatttttagtaacaaagttttagttaggtttgaatatttggactcagaaactcgaaaatccgaccacccgccccaacttgctaccgaaaaaattgaaaaaaacaaaacccagactgttggttaggtctaatatgaaaaatgcattaatcaggtattgggttaggattttgagaagactgctaaataggattcaactgtgaatccgagactcgaatattgtatatactaaattgctaaagtacaaacattaaacacatataatattatatattcttttaatacttataatattatatacttttttaaatattattttatttttaatacttagttagttaaaaccaaaaagcaaaaacttcaacacctaaatcctttcgtatccctattctctccctttctcagctcctaggtttcttccaaatcccaattgtatcccttgttgactctcgtctcctctcctttgccggtgagttcttctcaacccagtgaccggctcagtccagcgagtttttcttctcctcatttcttgctttgatggttgtaaaatgtttagtttctttcaaattgttttaatgaattttccttctaaaaaaagattttatatgtattgtatatgatcgaaggtccgaaatctattttcaaggtggtctattcctagacagctttttctattttattatgagctaatttgatttcgtaggtcttttgatgttccattctgatcatacaactttaatttttgtgcatttaattttaggtaaatcttgatggaatgaaattaaatggtaattttaaaaacaaaatatcatttgggcccaaaaatccttcaatcggatctggcccattataatctgaatccgccctacagaattcggtgcacccgacccgaaacccgcatgaactcgaaaatcaagaaaccaggttcagttagacattttaaatacctgacacccaaaaacccgagcccgaccacccgaacacccgacccatgtgcagccctagttttagttacaatataaatttttatgactaaatgtgaattttaatcacaataaaaaattatttatgactaaaacatagtatttaattagatacaaattgttgctaatttaattttagtcacaataa

SEQ ID NO: 125896 - DNA, 583 bp, Cannabis sativa
tagtagatatctatctgataagagagagtagtataataagaagttcatttcaaagtttgaccgaaatagtgataatgatttaaaaattgaaaaatagagaagcaataccattttacatcgattacttcgaacgaccgaaaagttatacacagaaaatatacaataatataacagaatttacggatttttttaagtaatattcattcaaagaaaagtatatacatactatatagagtggttatataacaatttctttttttttttttgtttaattatacttttttctatttctacattaattttaatatatattctattaattaacagaaactaagataatttttaaatttctacattaactttaacataatattctttattaattttatgatattattatatatattttaaaataaaaattatatagatcttttatattatagatactataaatatttttaattacatttttaaatttattagttttactttgaattaaaataaaaaaaaattaatttaaaatattataaatatttttaactatatttttaattttattttgatttattttatattttatatt

SEQ ID NO: 125897 - DNA, 1104 bp, Cannabis sativa
gtttttcacaaagcaagaagcacaaaacgcccttgaagaactttcaagcacccatttgtatggtcgccatctggtacgtcatcaataactgtatcacaaactgggttataaaccttttgatcctataattaacagctatactggctttcccttaaaaaaccttacaggtactagagagagcaaaagagggtgaaacctttgaagaattacgagcccggacagcggctcatttcctcaacgaggagaatgggtttcaaaatcctaccaagaagaggaaaggcatggctgtcttggatgagggaaaaatgaagttccatagaactgaaagttagggattaaattggtctggtaattattcaaccaactcaaagttttttttttttttcaaaaaatgtttattagggacgatgccagatccggttttgatatttttttttgggagctggtgtttaaaatgctttttgaggttttttatttctttccttctaaccctgtcatgtaaattaaagtacaatcatgcagacttaagcccaatttttgtgttctgaatattgtaccatgtttttttttttacatgaatgaaaaagtcatacaatcttacagatatatgctggagagttttaatttatcattttgaagtaataagatggaatctatttgcttactttggaggcatttatacgattaatttttttcttttttaatggattaaatctcttaaaagcttctttctttcgtttttgcctgtatttggagattaacctccataaatttagtaaatacttaagattaattccagttgtaaataaatacttaggtttaattttcagttgcaaataaatatttaaatttaatttttggtggtaataatacataagtttaatttttagtattattatcgctaaaaattaaactataatgttcgataatcacctcttttacttaaacttttacttaattgtagtcgagtaaaataaaagggaacaaaggaaagtactaaataaacagattcattaatttaggtgccgtttggtaacacttttttaatcagttttttgtttttaaaagtagaaaagtgaaaatatttttcaaaaacatattcta

SEQ ID NO: 125898 - DNA, 715 bp, Cannabis sativa
  modified_base (666)..(673): a, c, t, g, unknown or other
taaaattttaattttaattatttaactacttactcgttatatcatttgtgaacaactagttactaactagttgagttattactaactagctactaatgagtaactagttaataataaaatacatgaataggatgaaaattagtaactattcagtagttgtaactaactattagttactagctggtaaaaaaataaaaacaatgaaaagaaattaaatttaataaacaaataaaaaaaaataaataaagagttagatttttctcatcttatatttacatttattttttaaaaaaattacatatatatataataaattatatatccctaacaatttttttagaacctaatttgtaaacttttatattaatacatgtacacctaactcattcttaatttctcgtttcatattaatatttaacatattcaatctttaacatatgaatattaaataaaaataataatttgtaacaaaacaatatataacacaaacactaatcaaaacattatttcaatctaaaaaattataataaaattattaaagtttaaatttttaccttattactaaaatctagcgaccaataccgatcaaaatttggtcacaaccacacaatcttaacaatctaaaaaaaccctaaaaaggtttacaaaatcaaaaataaaacaatnnnnnnnnaataaaattattagagattaaatttatacattgataagcgtt

SEQ ID NO: 125899 - DNA, 664 bp, Cannabis sativa
agggcataaaacccaacagcaggagcattggttagtccaaaaggcataaccagaaattcaaattgcccatacctagttcggaaaccagtcttcggaatgtcctaccggattctcaactgatgatagccctatcggagatcaatcttggagaagaccatcttcctctgaagttgattgaaaagatcatcgatcctaggtaaaggatacttgttctggacagtcagcttctttaattcctggttgttaatacacatatgtaaagattggtccttcttcttaacaaacaatgcggcagcaacccaggtgaaacactaggccgtgtaaaccctaggtcaagcaacccctcaagttgaattttcaattctttaagcagctagagccattctgtacgatttttacctcactaaagttttaaatagctaactaacataggtgtaaaatggcccaaaactataatctcggcaaatcctgacaatctgaatgtctaactaaattgcactactattacaaaaatactaaaccataagaaaatgtgactctatcgacgaaacgtcgccttccactcttatcgcgttgtaggctgtcggacagtctactaccacgaaggtgcaatatttgaatgtgctctggggggtatccgggcacagggtaaccgggagcctta

SEQ ID NO: 125900 - DNA, 1057 bp, Cannabis sativa
atttaaatataacaaaacaaattataaataatatatatttaaatatatgttagcctagctatacgaacatattcctcatatgtgttttccaacaagaatagtacgaactaattaataatggtatttgattcttattattacactttgaatcaaattctcattatttgcattacttttaacatgtgtggatatgagacctataaatatatatagctatatatatagtacttcaattgcaaaaacaatattctaataacagtacatattatataaatatattaatttatattataaattctctctccaattattaattttttttctcttcatcaccaaacttttttgatgttttagtagaccaaattaagtggaatgcctaatattacaatcactaacttttcaaatgaaaggatctgattggttcattttcatgaacaagaatatttcattgaaagtaaaatgcataatttatttttataatattttagttggtttttccagtcaaaccattagcatttactttaattaatcaaatatttcatcttactcttattttattggtgtactttgtttaatttgttggttcacagattagtcaactatgagattttttttttttttttttttgagtgtagcataatggtattttacaatcaattaatagcttgtagcttaaaagttttgggttcgaactcatgactttccccttttcccatccctccctcgccactaagctagccttagtggctttagtcaactatgagattgatatatcctaatgatcactttgaatcaacggctggaaattatgggaatatttaatttgactcatagcatataatttatagcatatttaaaattttaaaggatgacccaactagccatttaagtaagaatatcaatgtgactctaaagtggtagtgcaagtgtaagcacttcaaaagagaagttgtgttttgaattggtctcttttaaatattttcttgatggttttagatttaattaagaagtttcggtgttgtttttttttttttttttatcaattgtaaatttaata

SEQ ID NO: 125901 - DNA, 1023 bp, Cannabis sativa
aatagaggcttgaagcggggacgttacattttactaccaaaaaattagtttatgtggttaagtgttactaatcatagagttcagatagttttactgccaatatttctactaaaaatttgtcacatatacacatgtatgtatactatggtatgtctaccatgacacttaatagaaatttagagatttagagagttttactactaaaattttgatttatgtaattaaatgtccctaattgtagaatttaagtaattttaacacaaataacccattaaaatatagtggagaaacaaaatgttaaaagatggatctatgtgaaatgaaggaacacttctcaatgagtattacccacccactgatgaaaactaaaaaaaatttaactataaaaattaattttaaaaatattatactattagattttgatccaataacgaataataaaagaaaaattttaatttctacgcttaatttagctacttaatttaaaaaatatctctttttacattatatcaaaaatatattaatatacaaaatacttaagttatatcaacattttttttttatttatttttttgctaaaaaaaaattttcttaatttttttttcagctgattgaataatctcagcccatataatatataaataattttttttaattaaataaaaaaaattaagtataaaaacttaaatttttttaatactacttatttatgagtaatatctattaaaaggcaacccataaaacccataagaatagaccattggtcaaagagaaacatagatgaaatgattccaatcaagttaatccatgacttctgcgggctcctttttgtctaacgtgcatagcagttgactaagattacgtgggccatttgggcactctttaataatagtcacataatttggcaataatgacaaagctcaaagctaatgagcatagttaataaaattataaatgacattaaaaataggtcatatctttatatattaaaagtgtctatctaacggcatttcttggtttaac

SEQ ID NO: 125902 - DNA, 1737 bp, Cannabis sativa
ctctctctctctctctaccccttgcacacgccactctcacctttgagtgtggtgtgagtttttttcaatctcaaccacagtgtctcataagttgtgaatacactatattatcaaaaaaatttgttcatcctgttaaatcaataagcctactcttattttgagtactgaggttagtttggaagatgtggtgtgattcttcaacaagcccatcgttggattggatgttcgaatttttatacgataagttgtaagaaaatcttgataggtagcaagaggtaattttctattctaattagttagatttagattatataatattgttttgagatttggggtttaaggttcatatcagatttaacaaaataattttttaaacctaaatccaatttgtactttcgctgtgactctgatatgaatcctaaaaacaaaccgttgcttcatgggctctttataaactgatttttctcacaaaaactaaggttggttgagtttctttttatcttatgatatcattctaagtgttttaagctaaagaattatcatcttttcataaacacactaaccacacacacttgagccaaactcgtccttatcttctctaatgttcttgcaattctctctaggatttcatattgtatttcatcttattagagagagttttctttgtatttcaaaattacatatccattgtattgagaggtgaggttggcaccgatagaaaattaactcggttgtaggtgaggttgacattggttttgtaaacaacctaagtaaagtggattgtcactacaacaatctgagagtgagattggcaattcaaaaatccgaagaggtttatagtcctttgaaaaactatccgttgaggtaaagttggcaccggtggaaaaataactcggttgttaagattgacactttaacaatccaataaggtcaatattccttgaagaaaactattgtgagaggtttgggaaataccttggtgaaaaattctccaaatgtaagggttagtcaagcccgttaaattggctcgataattgaactcaaagctaggtccataggtttgaagactaaggatgtaggtggtttagttctaccgaaccttgtaaaaattgagagtttgtaatttctatccctaagctctttacatttcaagtttgctatttaattatacttgtgtttatctatgtgattttattaaatttgaatagcccagcccgaccctggactccaaacttggacccgactccaaacctcgaacctaggtaagtaagagaaaacataaaaaaaaaaacaattttcgagtaacaaaaaataaaattgtttttgaaataaagaacaatatttttgaatttttttttttggtttttttaaactcagttttcataaaactgctattaaaaaatttagtcaaacgatcctattaatttttaaaaataatttttttattttaaaagtatgaaaacaattttttagttatgaagtcaacatctttttttctttctctctttttgactttctatcctaatttctttgaactttccaaataatgttaatgtcatggttctgggctaaggcgggactaggacacatccaatccagggacctaaaatataatttttcatttaaaagtaggaataattacataagacaccgttttttgtaaaatatttacatttttacgtttaaagaatgttttttttttacatttttacggtttttttaaaaataacacgaaaa

SEQ ID NO: 125903 - DNA, 3656 bp, Cannabis sativa
attttatgaagagaactttaataaatgcctaaaggtacttcatcatatatatacatagttgtcttcttacttgttaatttgacaactgttttatattaatgatgcatattggaatcgaagtgttcaaataattccattaatcgtaaagactatacaggtgtcgatcatgtatcaccatgtttatttacaaaaaatgtagtgtcaaaaagctatatggtctataatttgaatgtatttatgattttactgtttttcttatcaattgtagatgtttgtgtcggttttaaccctagaaggtccaccatattggtttaatacagaagttaatatgatgtcaaaggtagactcatttttagactccctacatagcacaatggatgaaaaatatcatgttgacgctgcgaaaaaaatagtaaagttacaaagtgtcattgtttgatgtgaattcattcttgatggaatctaactaattctatatctttgcagttgtcgacgttagaccttttatgcgatgagaataagtcaaacttgtgacttttggggattttagaattgacaataaagatcatggccttcctcaacaagataatgaccgagattgcggtatctatgtgatgaagtacatggaggctgtggctaatgaagaagatccagttgctcaggtataccttgtttagttcagaatctattacccaagtttccttggtatttgtattgtgtaattgaaatttaatttagttttctactgtgggtaatatgatacgtactgaagttttgatcacattttattatattttgaatgttgtttcctaaaagtttgtctgcatttgtttgctaatcaacttgcttcacatgggttatttgatgtgcatgttaacatatcattttttttttcacagtttgacccgattgagtgaagtttggaaatcactgcaaggttaatatctgataaccaaaatgaactgcattcaaaagtgattgaagattggaggactatacaaggcagctcatttgcatcatcttcaacccctttgcgtagtccgtccaagtctccatgtgatcctcagtttagaacgctgaagtttcgtcaagcaaacatgtttcctccctcaagagcctcccttgggtttcgatctagcaagaataagatttcatatggtgaatagtacttagaagacctatattattattagtttatgcagtttgccttttggaaaatttgtcaccatatggtgattctcatttagacttgtgttattgttagtttatgtagtgtgccttttggaacttttggtgattgtcatttagtttgtgttattgttagtttatgtagtttggcttttgaaaaattcgtcaccataccactatagggtgattatgatttagacttgtgtttttcttagtttatgtagtgagccttttagaacatttgtcaccatactactatatggtgattataatttagacttgggtgattgttagttaatgtgctgggtcttttggaacaacttaattttgtagttatagtaatgatattatttttgtacttgactccaaatttaccatatcgtggatgatattaacaaaacataatatgaccttttgatgtgtaccataatattagaaaactaaggtttcaaatcaacaacataattttagttagaatccataacaaaagattacttaaaaaatattttaacaaaataaagttaaatcttagttttaacttggtactcattgctcgttgtaagcttttctaaaatttggatgtaaactttggatctcaatctgaaactgtcgattttggggcaccatgaagccaaactatctccttaatgtataaatcagcatacggatccactgtatacgttatccacagtggtaaaaaaatgtggtgactttgtatatcgatccacaatcacccaaatagagccatagtaccccaccgttcttggcaatcccacaacaaaatccatggtgatgtcttcccacttccactcaggaatcttcaagggctgaagcaaaactgtcggtctctgatgctctgtcttgatttgctaacaagttaagcatttcgacacgtactcaacaatatctctcttcataccttgcaaccaatacacgaccttcacatcaagatacattttagttgtccctggatgtaaagagtacagtgtagtattagactcatcaagaatctcctatctgatatttttgtcgaccggtacacaaatcctgttcttgcatcgtaataacccatcagatgaaagtgaaaagtcttttgtcgatctggcttctaatttttccttgttcccctgtaactataattctttccagcaaattagactgcagggtaatgttagcaagttttctgaccacaaactcaattcccgctctagtcatatctttagccaattctgctaaaatcttctttaattcataaacttgccctgggccttttcgacttagagcattcgctaccacatttgcttttccagggtggtagagaatctcacagtcataatctttgaccagttctaaccatcgtcgctgcctcatattcaaatctttttgcgtgaaaaagtacttgaggctcttatgatcggtgtagatctcgtacttttcgccatatatataatgacgccaaactttcagtgcaaaaataactcttgctagttcaatatcatgagtagaataccgctgctcatactctttcagttgcctggatgcataagcaatcactttcccagactgcataagaacacatcctaatccctgtttggatgcatcataacaaatcacaaacttttcatcaccgaccggtaaagttgacacatgagtggtaattaatctttactttagttcttggaaacttgtctcagacctattagtccatacaaacttgcaattcttttgagtcaattatgttaagggtgtagtaatcttagcaaacccctcaacaaatcttctataataccctgctaattctaggaaacttctaacctcaaatgatgtcttaggtcgaggccagtcccgtaccgcctcaatcttcactagatccaccaaaatgtcatctttattgactacatgcctgaagaaacttaccagaggcaactagaatttgcatttcttaaacttggcatacaacttatgctccctgaggcgttgcaacaccattcgaagatgtctttcgtgcatctcttctgtgtctaaataaattaaaagatcatcaataaagacgataacgaaatcatccaagaagtctttgaagactcggttcatcaaatccatgaatgttgtcggggcatttgttgatctgaaggacattactagaaattcataatgtccgcaccgagtatgaaaggctgtcttagggatatcctcttcttgaatcctcaattggtgatacttgttcttcactgttcttcactgtcaacttgtttaattccctataatcaatacgtattcgtaaagtttcttccttctttttcacgaaaactggcgcaaggtgaggtacttggtcttgtaaactttaaatctaacatcccctgtaactggactttcagcttctttagttctgcaggtgccatcttgtaaggagctcttgatacatgctctgcccctgttattaaatcaatctcaaaatcaatttcacg

SEQ ID NO: 125904 - DNA, 946 bp, Cannabis sativa
taattaaataactaaacaaaagaataaagaagaagaagaagaaaagaactcttaatgatgaaagtttatgatgatccttcgaatctcttctctcttgctcttaaatgtattttctataatctcaaaattgctttttctatctctgtagtcgtacctcaatacgatttacatgcttatttatataggccaacaaagatagatcaatcctcttagaattaggattttttttttcttaaaaatgataagtgttgcgctatagcacctacaccctgcgctatagcacctaagagaaaaatcctgaaataaccacgtgctgaaattatcttttttcctacacgcgatattttttttttcagtcatgcgctatagcgcctattccctgcgctatagtgcatggcaccaatttttcgtaattcagcttgtatctcaactcgattgctccttgatttcggcacttcgctcaaatatgcaaagttcacttctaagttatcacgatttcatcattttatgcataatactgcgcactatagaaaacacatcaaatttatacaaagtttaagaaataaatgctaatttaactaataattaactctgaatgagtgtacaaatgtgcactcatcacatccccaaacttaaacttttgcttgtccttaaggaatgaaaaagaatgaaactaaaaacttaaaaaaactaacaagtcaattattggatgaaaaatcaagagacttagaccaaatgtaatttatctcaaaatacaaactctctttccattattcaatatgcacttcaaacaaaagactagaatttcaactcatttaaacataacttccaatattttatatttgataaaaatgtgtatatgtcaattctactaactctatatgcatgtaattcatgtgcataaagaccacccttaccacaaaacattcaagataaccataggctt

SEQ ID NO: 125905 - DNA, 738 bp, Cannabis sativa
atttgtaaaaattatttagtcttttaacagtttctttttatttgaaaagattttaacaaccactaatctacacacaagtggaccgtggaaaacctcaactcgttatttacaacaatttgtgatttagaagtgttcaattgtgagatttccatttaagagttcagtgttaaattagttttacagaaaagaatcgaagaaaaataatataaatatagtctttgcatacattctttggtggtcctatagctacaggtgttatcgtcgtatagggtaacttgtctgtacttagtatgtaccttgcgatggaacacttggaaaggctatttacgatgcgaacatgcaacaaagtggacttttatttttatttttctttattatattttttgggcaatatcctaagtttttattttcaattttcattcaggggaaatcataagttatagagtagtggatgattattgatgatttattaattattcaagggtctagttttcaaccgaataaaaaattgaaaagaatttcagataaagcaaaaaaaaaaaggaaaaatagcactcccaagagctcctgtataatagtaatatattagatttttacaaaacttttacagtatcaacgtatataaaaataataaaaaatttatttatttttatttttgatttcttttacatgttatttaaaaaaaaaaaaaaaatttggaggggccacgtacggcacccctagctctgtcattttaat

SEQ ID NO: 125906 - DNA, 549 bp, Cannabis sativa
tattcacaaaactatggtaaaatgtctataaatatttaccagaaaacagtgactttaaatagcaggagagccaaatttttaatcaagaattgatttgtttgatatatgctgattgcctgcctttaatgaattccaaaatggtttttgcatctccatgcttgacaactctcccatcttccatatagactgcaccatctgcatactcaagctcctccaagcgatgtgtcacccataatgctgtaacctcttcagaactatctaaagagttccttactgctttgattaccccaagctggtgtcataaaaaataataaataacacacgtaaaaggatttggtcatatatgaagattaagaccatgtatgaagagagcactaaactgagctacctgttaactaagaccagaacatggacatattataacaggccatgacactacattcaacatagatttatacctgatcagtttcatccaaaaatgttgtaagctcatccaacaagagaactttacatgcttcagctaaagcaccagcaatagcaaccctttgc

SEQ ID NO: 125907 - DNA, 1958 bp, Cannabis sativa
attataaatatcccaagtattcttcttggcagcaggttcctgtcctaaccgacgaggaggatcagaattatgtggctcggacacattaccttcagaatgtcgtcccttgggaagccgaaaaaggagcatcccgaggcaatcaatgttgttggtcacccacagtgcttagagccgagcgtaacactttagtgtcgtttcaagatagtcattataacttttacacctggaatcccctcctcatagatcgcattacacataggtttgatagttggtatccaaagtttcacatccaaattagctgtactgactcttactgtgggagagtcgagcagtacgtgaccatgctggatagggcaagtcatttagatgcgagctgggatttagaaccaattaactcctatgatatattcaagatcacaggatgtaggggttttagtggatattatagtccttcctcttcatcttcttatgattatggtaaatcccttaggtatgagattatgccccaatttccccttttgcttgtttttaaacgagtactaacacactattttatctcatagaaatgaatcttgaggatctctttcatacatcaggcaagaagggcaagaagaggttgaccatcacggagactccattagatgtcaacgtggagcctctcaaaatgcccaggaagacaactgcgaacaagaagtgagcctcccacactgttaatcttgagatccctaaaattgagactcaggctccgacccagccttcagcccccacacatactgacgagcccaattccaaaaagaatcaagctttcgcttcttcgagccaggccctcgaaactctgcctatcgaggctgcgagtactggctcggagtatactggggaatttggagcagcttgttggtgtcatttcaaggccttcctccccaatgaatgggatttaatcaacaataaggacctggaggagatgcttgaaagaagtgtcgcccatggcctctcggtaaattcccctatccttatcttcttacttcctttcttaacatccttaaaaaataatcacacatttttgtttgttggttttcagcaaactttcatctccttcgtcgcccaacagaggggcatggaaaaaaggaagtacatggagagcgagattcaaacttaataggtcagggcgaggctgtgaccagagaatggaatgatgccatgtcggagaacactcgcgtaatcaaagaagctgaggaggtgaagagggcccacaaggttgagcttgaagctgctaagtaggaggcaaaagataaggccgatgcatgctagaaacttcaagaggaataccagaaactccaagaggaacatgcagccaaagtaacactcaatgggaaagaagctgaaaccattgagcgatacaatgttgttggactacgttccatctaccaagactggatggcaaatccaaggatggatacgagtttcttgggaaagtctgagggggaagtccttgcttactgcgagaaggctaagaaagaagacgagaaagccgaggcagaagaagaagaagaagaattgtccaagtttcctaccatgtaggcttggtttatatttattattattttttttatctaggaaaatggccttaaggcttagacaatggtttgccccttatgacacttttgtaaagacaaatttgtaaggttggatggccaacttttcttttattttctcttttatcgaatgcttcgtacttttgaacttaatatatttgtttgttttcgttttcattcacaactcaaacaattatattttgatcagatttaaaatactttaagcctttccattgctcgtaatttcctttgatattatttaaatagttaataatctactatgtgcgcgagcagttattatctgctatgcttttgatttgcaagcagtcattaattatgcttcgcataaacagttataatctgttt

SEQ ID NO: 125908 - DNA, 1571 bp, Cannabis sativa
  modified_base (1268)..(1271): a, c, t, g, unknown or other
  modified_base (1299)..(1302): a, c, t, g, unknown or other
  modified_base (1328)..(1331): a, c, t, g, unknown or other
  modified_base (1446)..(1451): a, c, t, g, unknown or other
  modified_base (1515)..(1516): a, c, t, g, unknown or other
tatttagggcgttacaggaagtttggatcaatgtttagtgcatgggtcatcatggaaggatctattctgaccatatcttcatgtgaccatgcaaataggttaaggtttttgtttagaaattttatcaagactaattttatttctagcgctaaaactttccaaatctttagtttcctagttggaagagtgggatcaatcaccatttcttccagtttttccataggtccaaagctgtctgcagaatccccaaagcaagaatctatgtttgcctccccgctttgggctagttgagtggcctttcttgattgggttgtagccctgattggccaggacctagccgcccataccttgggaaaggttatgttcaaggctggccagccccaagcttggcatttagctctggccggcaagccctaggccaggcaactggccatcgtcggctagccttaccctgggcagttgtacatagtcaactagttctatgctaggtaatgtctggctgcctgttctcccttgattggcggtatggcgtatgtgttggcaaagggtagatcacaccaattgctcaggtttggtggatccaattatcggaagtgattgttgaggatcgggggtggcgcgtctggttctaaccttgatcgaatatgaactagaatattaaggatttaagttacaatgctggacattcaccagaaaaagccttggggttgtgtctttctcaaggaattttctctctcgaaaaaaatttgaatttagaggatgaaatggcaaaaatggtaactagttgattttactatatttataataaaagtggaaactcgcgtgcttttgaatgaaatggtccagatcaagtcttacaaaacgcaaagaagatccaacagtttgggaatacggaaaggttgcatttaatgctgcatgcgagatcgaagtcattcaatgatgatattcgtcttgaatatcccactaacataaaccagccgtcatctcgcttccctaaacctcacgtattttttgaggcatatagtatgttgacacatgttctctgctctatgaagatgaaaagattgtggacttccaccatctattgctctaaaattccaaaaaggcacatctgttgctaattcttcatccataagtgaatctgagagtgtgctgcaagcctcatcgactctcgagccccaaagggttagggggtaaatgttattcacattagtggagtagtgacataagcacttcaaaaggactatatgttgggaatattttaccannnnctatatgttgggaatattttaccaagannnngggaatattttaccaagatctagatnnnntaacaagtatgttgaattaacattctaaatatgaattctctaaaaaaataaagataaacacataagggtttaggaaaaccttacattgatagcagtggaatataatgactccttnnnnnnaagatctctagcccttgatttcttgttgtagcagagcactatcaaaatctgaacctggatctcnntctctccttcgagtttggttaccatcgtcttactcactatgattaagtacttgac

SEQ ID NO: 125909 - DNA, 1357 bp, Cannabis sativa
taatgacatctcttcaaaccattgtattaattcaaaactatgcaattacatttcatattttattctttattataacaatacacgatccttagtccttattataacacattataatgttcataattaaagagcacacacataaacacagatcaaaactattatgtaattaatgaatgatattattagaacaatgcatcccctggagtcttgtttttccatttagcagtttcacttaagcgttgtaatgttgtggataacttacgagacaagatctgacagcatgtcacatcttttaaacttacaaatctttattttaacatttcaaggactttgttttcacatccaataattttataacccaaatgggcgtccaagaataaaattctttagattagatatagatcgaatactaagatctcttcaatgccacgtaggaagaaatgccagtacttaagatgatccattgtgatgtcttcaaacattagttctacacattcggtcaatgactgtacatagtataaggttgagaagacactcctcattccaattgtcaaacgaggttgtttattaaggttgatgatgaatgttctgagaataggggccaatgtcttggggtctatgatcatgtattaccttctttccctaaatacttctcatcttctacttatacactctcttcacttgattaccataactactaagtataatagtcaaattacaaaaaatctttaaatttgttgaaatttttgagaaatcacaactcatcagattaagaatttaaacttcaataataattatatatgcctttagaattactaagatcaaatggttcagccaatgtctatttttcttctgaggttagtatgttgattatgtgttgaagggtctgatattggtggtgttttgcttattcaatattactgtgtttgtctctctttttatttctttcataatctgatagacacatatatattatatcaaagcacgcaaatcaacaaatttcaaattgcaagttttatttaaagatttattgtctatatagtactaattaatgtatttatgtattaatttataagattatactattatgcatttatttgttacattatatatatcatgatgtgaactttattatgggaattataattatgtttcgacaccattattttataatgtatttaaagatttatcgatctgtcattttaaatataacagtcaaggaaattaagaaaatctaggggaggaattaagaagactatgtaaccaatagacttttgtgagaattattgaccgccggtgatgaataatagtataaaaaaaatgataagataactattaaagtcaggtttaatccttt

SEQ ID NO: 125910 - DNA, 1493 bp, Cannabis sativa
ggcctatgacgaggtcagatctccattttatctcagcaatgtcaatcatctaggctcagccctcgcgacccttattctcacagatcgaaactttcagccatagaaacacgattttaagctctccattgccaccagaaacaagacaccatttcttgaaggtacccttcctcaaccccctcccaatgattccctctatagttcttgggttagatgcaatcaaatggtgatgtcgtggattctccactctgtatcacttgaaataaaaagcaatatcatgtatcttgatagtgcctctgagatgtggactgtcttaaacaatagattcaaccaaggtaatggtccaagaatctttgaattgaatgagacaggaaaacaggtccaaaaccccactcaatacagaagtctcatcggcaaactcatctatttaaccatcaccagacccgacatctcatttgttgtcaacaagttgagccagtatctttacacaccttgagaaccccacctccatgtagccaacaaaatcctctagtacctgaaaggaacccctggccaaggtctattcttccatgcctttgcactagcaccacttcatctccaggcctttgcagttgatgatttgggagcttgcccggacactcgaagctcatgttattgcatcttccttggcaattctctaatatcatggaaattgaagaagcaacacactatctctcattcctcagctgaagccgaatacagagcaatggctaatgccacatgcgaactaacttggcttcactccatcatgcatgacgtcaacatcaacatcaaactcccttcaacactattctgtgacaacattgtagctcttcacatctctgaaaatccaggttatcacaaacgtacaaaacatattgaaatcgattgtcacctcattcgtgaaaagatcaacaatggcaagatcaagaccaaccatgtctcttccaaatccaacataattgacatctttacaaaacctctctttccaacacatttccataatttagtctccaagatgagtgttaaaattttttccttaacttttcagttttcttttctcattttatttcaccaacagccaaccacacgcacacagtcactgagtcacacactcaggcacccaccctcccaccatctcttctccaggcagatcgacgacaaccaaaggattgacgaccaaatcgatgacgacagcacgcctcctccatgcacgattgcatcacaaaactcctccatgacatcaagtcgtcgacctcttttgctcgctcagttgatcacggctcacgctgtcctcgttaaggtaaggtctttgactctccgtttcacagttttttttttctgttttttttttattttctgttaaatatataaaaataatatatttttttattaaaaattttatatatattatataatatatttttatattctaaaatataaaataaattttcttataatatatatataaattttat

SEQ ID NO: 125911 - DNA, 948 bp, Cannabis sativa
  modified_base (879)..(894): a, c, t, g, unknown or other
tgttcccccagtaatgaaacctcgatataagaggatgtttgtgtgctatcaaggtgtgaaatctggttttctagctggttgcagacccttctttggtcttgatggttgccatcttaaaagcccttacaagggtattttattggctgctgttggactagatgcaaacctccacttctacccgatttcctacgccatggttgaggctgagaacaatgacagttggaaatggtttattcaacacttaatggagcaaattggagagcgacatcccaatggtcagccttggtgcataatgagtgacaggcaaaaggtaattctttcttcctaatacttgtgcttttttcctcactatctgttttgggtgaggtctaatacattctttttagtgtaatgattattctttttatatcgatcttggtcaaatattttattatactaaactcaatggttatattttaatatcatggtgtagggtttaattgaggttgtgactcatatacctgatagtcaccatcgctattgttgtttccacattgaaagaaacatgacgaaagaatttggcacttcttagcttaaaaacatgttttgggcagcagctgagacgggaaatgttcatacgtttcagcaaattatggaccaaatcaaggaatttaataaaaatgcatacaactggttgactaacattgatgcaaaacattggtcaatgagttgttttgacacgtcttcaaaggtagagcatctaacaaataaccatgttgaatcattcaatgattggattgatgaggtacgtttcaagccaccaatcgagtaactagaaggtcttcgaatccaaaacacagaaatgatgtactcaagaaagtgttgggttttatgctctannnnnnnnnnnnnnnnatataatcagatttatttattaatatagatcagaaataacatttaatgttccat

SEQ ID NO: 125912 - DNA, 862 bp, Cannabis sativa
  modified_base (812)..(813): a, c, t, g, unknown or other
aaaacagaattcaacataaagaaattaaaaaggaagagagaaagaaactgttggtggaatgactctggatcttcactttgctcctctagccgctcctcactgcgttttaggtctcaacatcgcttcccctcatttacaatcccagttttctttttatttctcatttttagggttcaaaagacgaaattaccctcgcttgtacgggctctcaccgcggcgagtgatgacgtggccacggtggtgaaacctctcgccgcggctactagctccccccaaaaccgtttcactgttctcgagttatggctacggtcatggttaggctcgccgtggccaaaagttcaccgagcatcaattttgcatttttcttggctccacttgtcctttattgcacttttgtaactcgggacttccataaattcgagaaacctaaaaacatagaaaataagcgtaattctgtcctaaaacgtcgaaaatcgaacataattgtgatccagaacataggctaaaattagcctaacaacaaggggaaagaaaaagtaggtgaccctcagaaccctgctccccccgtacctcctcggaaaagtacgaatctggccaacaagccttctcaggcgtagaagaccaccgatgcctccgggctcgggcagaaaggccctgttgcaccaaaagggactagtacgaaagtaccaaagcccaagggatggaaaaaatgccctagtgagtctgctaaccaggaccttggtaccaagggacaatattccgatgacaaccgtgttggaatatgtttttccaagatctagatttactaccanntatgttatttaacatcctaaatacaaatctctaaaacaatgtaaataaa

SEQ ID NO: 125913 - DNA, 1511 bp, Cannabis sativa
taaggtgtttttgcagctgctttacttggtactctaatcagaatgtaagctgctgtctttaatgcttctccccaaagagactcaggtaaggtagaatgagcaatcatgctccttaccaagagtcctatttcatctctcaacaacaccattcatgctaggtgatcctggcatggtgtattgtgggacaataccacattccttcaagaatttagtaaatggtcttggacgttgttcacctgagccatcatatctaccgtagtactcaccaccacaatcagatttgacgttcttaatccttttgttgagttgattctcaacttcagctttgtaagctttgaacacgtccacagactgaaatttttcatcaatgagatataggtacccataacgtgagtaatcgcctatgaatgatataaattattgttgaccattccaagatgccgtagggactggcccataaatatctgtgtgagtcaattttaagacttctgaagctctgttggcacctaatctcttagttttggtctgttttcccttgatacaatctacatagacattgaaatctgcgaagttgttctcaattaattaattaattctttaaatcttattacaagaaaaattcacataataataatactatattctcaatctaataaaattttaattacaaaataatatatactttatatatatcacacaaattcataaagtttaatactatctaattcttgtaccaaggaacaacttttgagcatttcactataaaacaaacacttaagaatgtaaaaattaatcataataacatatataactataaaatatatctaactacaattaataaattaatgcacacttcgcataatatgaaattctatgcattcatgtaatcattggctctcaagactatttgagaaaaattgagatctcacagcggagttcataaatctagcagccattggaaaggaggtcgaatagttaaaagatatttcggttgagataccaataatcaaagagaatgtatttacaattttgatacattatggtagccaagcaacattggcagatcttatagtgaagtataaaatgagaagtctagacatattagtctaagacatattagtctaagacatgggtatgtgagtgagttgattcaaataggagttatctcaatatcctatatgatattaagttaaaatttggcaaatccgtttacgaagccaccagctagagatctagtggaaaagacttttaaagggatgagacgaaaacttcctaaagtggttcacaattgagggtaacatatatatatatatcttaatactagtaactttattagtgttaggttcaataggtaagaacaaatcaatatgtggacaaatgtgataagtaataattatcccatcctaaaatgatgtgtagtacctagtgagttaccaattttaagggttagacttttaaagtctttaatattagaatatttctaattaaggaaataaaataatattattgat

SEQ ID NO: 125914 - DNA, 1856 bp, Cannabis sativa
tctcatgtatcttaggacaatggctaagcagattgaccattagattttgatgggaactaaaattgatgcgagatggcgcacatgatgtcaacccgggcgcccaacactgatactgaacccaagttgagccctaggatgtccacgtaacatcctcaacttcatggttcatcgttttaagttcactgggacttgttctcttgaactttatcgaatgatggcagctaaaaacgttttcactgaatcttagtgcgtacatgggtgcccactaaggtcaactagggcagtgacatattttccaagcccaagttgaccaccattagtcctggtagctggggcctagggttgttaccttcttgccacatgtcaaaagtgttgtccatgtcatcaggtcaaatttctgagtaaacatatataaatatttatttgaatttgaatttaaaagttagttatagatatttattgtggttgagatattctctcaaagtggttgagagattctctcaattattaattagatatttaatttaatttaaatatttaaaattaaaaataatatctataacaattacatatatttatgtaaatactataatatgattatttaatattttatatgaataaatattctttaattaaatatttattattattttattgattataattaatataccagtataatcttaaatctatatatacgatatatttaggagtattctcattttctttctagaaatcatttttgctcatgtgttgagtaaaacccaagaacactttgttttgtgtatcctctcagcccacactaatccttgtgtgtgatggtgatttagaagatcaatgtatgagttccatactgtacttaaatacaacttacaaaaagaatgcgaagaatctttatagttcatcaagaggtaaatgttttatgttcatcttttcgttgtttgatttaatatatatatatatatatgtgagattcttgggtggtaaaaatgataatcatattaaaatatttttgctgtatacttgatttagaactacaaaaactaacaataccgaagtttcatttacaaagaactcaatgttttaaggataaaatactttgagaaataacggtaaaatagtatcccactcatgtagatcacctatagaaggttgattgattgttgatggttataacaatggataaggtatccatataggttggacagtgttctgtgaatttaagagtgtaattctaaatttatagtggagtcacaaggatctaataaattaataaatttacaataatatttgttggagcttgaatttatagatccataattcctacgttgtctttgaatagttcttttaatcaagctcaaactaatattttaagtgacaaatagaacaaaagaaactcacaaggtcaatttcgagatgttgaactgaaaaaagaaaaaggaaaaagtataaacatgatatgtttatagagaatacatcaactttgattatgagatcaaattaatttataattatttaataataaattaattaactatgaaaattaataaagataatttaattaaaattaattggacttaaaaaattggaaaattcatctaaaccaaactcacatgaggttttggacatgctagtattttttttttattaattttagctaattatttatttatgaaaatatttaattagttatagcaaatgtaaaaatattttgattaaaaagtaattaagcaatttaattaagatatatggaaagatattatatgcccaaccacattggggatttcggctacatagttatttgggaaaaaaaaaacagaaaaatacaaaagaaggaacaaaaattacaaaaatac

SEQ ID NO: 125915 - DNA, 876 bp, Cannabis sativa
aatgttttatggttttggtacaaattgcaatgataatgatatcaatggctgaaatgaatcacacaacacaattatataggaaaaaaaatagatgagatcgatccacctctaaataaatgagaagagataacaaaagcctatcttcaaagaatgtttacggatgtaataaaatattaaatgataaatagtaacacgaatagctaaagttttaagtttgtaagtaacataatttaaaagtttatttttagtggtatacctaatgtttgtaaaactgtaatttttctctaatttcgtcagtacatactttgttattattttaaacatgacacatataagactcagaaacatgtaatatcaattattttcaaatgttcttttaataaatttaaaacgaagtttgtactgactaaactgaaagaaattatatagttttacaaatattaagtattatgctgttaaaaataaacattgagttaatatcacttataaacttaaaactttaggtacttatactgctatttgctcttgattaaaatataggtgttctatataaaaaggtaagatctaaatttaggactaaacttatttgattgttatgtcaagtttttcaccaaaaaaaaaaaattcaaaatatgaaatgaaactatacccttaatgttgaaaaagaagaataacgaatttattgattaataatagaataaatagtatttttgccccccgaaatttttaccctaacaaattttatcccctaatatatactgcttgttacagataatcctcaaattataacgaatgcagaaatgtagtccttccgttcacttctgtttaattttgccgtttattgacttatatggcagtattattttaaataaaaaa

SEQ ID NO: 125916 - DNA, 1346 bp, Cannabis sativa
  modified_base (34)..(53): a, c, t, g, unknown or other
tagaattcatagtaggatgttaatgaaacatacnnnnnnnnnnnnnnnnnnnntggtaaaatatatccaacaccaacacccttattacaactttcaacaccctaccaattgctgcacaataaaccaccagcctatgcacacttacgaaattttggatgtcttgcatatgcttcatctttaccaagcactagacacaaattttccccttgtgcacatgcatgcatattcattggatatcccaatggcatgaaagcatacacactactcgatctggcttctaataaagttttccattctcaagatgtggtgttctatgaacaaatttttccactaaaaggatccctcaacacacactccttggatcgattatttcctggtactgatgcagctactcaacctgctgctcttcaacctatgaccactactgcaccttcatccaaaattgcacctgtcgaatccacactagtgcctactgctgctgatacaacattatcaaaggtccttgacacttcccagccagcaataaccaaacatacaccagcagttgtcactgatgcttccccaactactgatgcacatcccattattccacagcagcctatcatcactaaagcaggtagaaaaacttctacaccatctcatttccaagactatatttgtcaatcttccactaatcatccattgattaaatatttaaactatgacaaattaagtgttcccttttgaaatgccattttccatgcatatactgaatgtgaacctaagtccttcaaacatgcatctcaattcattcagtggttaaaagcaatggatgctgaattctttgctcttaagaaaaataacacttggtcggttgtttctctacctccaagttgtcaacccattggtaacaaatgggtctataaaataaaatacaatgaacaaggtgaaattgacaaatataaagcacgccttgtcgctaaaggatattcacaacaacagggcattgattacacagaaacatttccccctgttgcaaaattcgatacccttaaactattcttagccttggctgccatcaataactggacactccaccaaatggacattgataacgcctttttacatggagaccttactgaaaaagtatatatgacactccctaaaggctatgttcatgagggggagttaccccccaatccagtttgtcttttgcataaaagtttatatggccttaagcaggcttctcgacagtggtttgcaaaattaagcaacaccttgattgacaatggttttgttgcgataattagcacacgcaagtgtacgtatcgttataagtagtaaactcaccaggagtgaggtcgatc

SEQ ID NO: 125917 - DNA, 1294 bp, Cannabis sativa
tacaagagaggatactccacgccactcctgcgctgcataaaagaaagtgaagcgcaacgagtgttgtcagatatacatgaagaagaatgcggtaaccacgaaggaggatatttaatgtcaaggaaagtatcaaaacaataatactggcctactttggagagggatgcgatggtgtttgtaaagaaatgcgataaatgccaaaggcatgctagctacagcaagcatccctcggccgaaatcacaagcatgactagcccgtggccttttaccatgtatggaatttccttgattaaggccttgccaacaggaagggtcagccccaagtacgcagtagtggcaatagactacaacaccaagtgggtagaggctgaggaactagttagcataatcgttaagcaactttatcaacaaattcctgatatgtagatttagagtgccttacaagatcatcactgacaatgggacccaatttgaaggagacttgttgagttcttactgtgtggagagtggcattgagaggggattctcaggggtagtataccctctggctaacgggcatgttgaagtagcaaacaagatactcaagaggaacctcaaaacaaagttggaaaaactcaagggctgatgggtagatgaactgtcaaatgtgtataggaccacgccccgctccaccacggctgagacgcccttctccttgtcatacgaatgcgaggctatgctcgacattgagattaagctcaactcgttttgtgtgaagaactgtaatgaggagtcaacgaaaaagccattgtaggaaatttggacctcttggaagaaagaagggacgcgacccaactcaggttggcagtgtatcaacaaagggtagtgtgatactataatttgagagtttgcatgcatgccttcaaggtcgaagacttggtactaagataggtccttcaaaatactagggatctaggagcaggagttttgggagaaaattgggaaggcccttatcaaatcgctaaagtcatcccgctcgtgacttacaagttggccagcatggatgacacggtggtactaagtgtgaatgttggaagcaatttattattattaatttataaagagcctttatataggcgtgtacatttacaagaaagaatactgatatacactacaataaatggaatactgatatatactacaaccaaggaaaatattgactaagttattaacaaactaataacaataaaagagagagaaaagaggaatatacaaaacaaatctaacgaatatagctggcagtattatccttcta

SEQ ID NO: 125918 - DNA, 972 bp, Cannabis sativa
aataatgtgaggaatttttttttaaaaaatgttaagagtaatttttaaaaattatttaagtttatatattttttttaataatagagtgtatatatcattttatggagtgcaaatagcactccccataatttttaagggtgtaaatatatatttcttaaaaataaatataaactttaataataataataatgcaaatcatttaatgtaaaaaaaaatatattaattaaaatttaataaaaaaatattaaaaataacataaatataaaaatataatatttattaattatgacttaaatttaaattactttttattttgttatgtgatatatttgtattataatatttagtatattattagaataaaattttaacaaactaaaattatattttacatttatatcacttatttgcatagggtgcctacacaacacatgtttttatatttaattctctagacttaactttgtttgttttttctttttctttcattgatgaagttttggattacttgtgatgatagggaaagataccctaacaacatgaccctaatagatatgtccatgcgtggaatcatatatcgaaatatatattttcgaaatgagtatttgaactgtttcaaaaaaaaaaaaaaaaagaatatttgaaagatattatattatgtagttacattattgctcaatttactatatgtacattatgcatcataagtctacagaccgaacacaaaagaagtactattgctgcagtttacgaaaatattaaaataatgataacactaatccaacagaagctttcattgatttaacacatgtatagggatcctatatatatataaatatatatacttaagtatattgttacatgcgatccacgtatgcagtgacgaagtcagaaatttagttgagtgagggcttgaataaatattaagtcaaaactaataaaaataatgataaatgtatctttcaaattttc

SEQ ID NO: 125919 - DNA, 1353 bp, Cannabis sativa
aagagggagatatggctcctttaccactgtcaagggagctccctctatctacaaacccaaaatacttctttatgttaacactattaactaatcatagttagttttctattagcgtaggttagttaagtgtatttagttaattaaggtagttaatctttttgttatgagcttaatgctctgtttttctggcttcttcgttatgtataaatacaatggttatcaataataatagtgagcttttgcaattaattttctctgtgttttgtttctccctactttctttctctacatggtatcagaagtcttgacccaagaccatgtcttcatctacctccgatcctcaggcccttgccatgacacctgcaactcaagctcctcaggcccctgtcttacagtccgctgctactggatcttgaaatcctttttccaattctttgtctacctctcttacgatcaagcttgatcgtgtgaacttcctttcttggaagtcacaagtaattcctactataattggacatgatctcgatgagatcttgttcaccggagttcctcctccaacaactctgcttaatggtaattcgaatcctaagtatctttaatggcgacacaaggattagttacttctctcttggctgcgatcctccatatcagaaaccattcttgcatcagttgccaactacactacctcgttctttgttttgcgcgctcttgaacaaaaatttgcctctcaaaccaaagctcgacaacttgagcacaagaggcaattctcacttgttcataaaggcaatctcccaatttctaaattcattgataaggttcaagccattgcagcgtcccctattgatgatcaagatttggttctttaagttctcaatggcctaggacccgagtttgattttgttgtctcagggattacctcaagaagtgatgccttaactattgaaaaagtccatgctctacttttgtctcacgaaagtcgaaacgaacatgatttggctatgaatgatctcactgtcaaaatgcaagctaatgtggctcttggaaatggcagatctagaggtgtttgaccttttgccaacaataactccaccatctctactaaccagccaactccaccaataggccaagcagaggcttctctaggtttcctaatcaaaaagttatttgtcaagtctgtatgaagattggccacactacagttgtgtgccgataatttgacaagaactggacgactcctaaaccaagtaatgttggggatcattttactatgatctagatttactaccatatatgttatttaacatcctaaatatgaatttctaaaacaatagaattcaaacacatataaagttc

SEQ ID NO: 125920 - DNA, 2255 bp, Cannabis sativa
tagccgtcactagactcatcgattgttgtgtaatcgccgtaaaaaggggcttacgccatctatcacatcttttatggaggttcttatacgtttttccccatgcggcattaaatgtgaagtgattgttcaagtaatctctttacctcccgaaaatgccttgacatgactctagcctctcggagagtaaagatgtgtcttatggtctcctccgggaagcccactctctgtggtattctttttgtctaagacttagttatttttagtacgtgggtgttcttacagatccacgtgtcgcccttatccgcgtctacgtattttgagaaaaatcaaaggcatcaggtatcagagcttatttctatttgtgccttgatttacattttaatttttcgtatgcatatatatacatggtcagattggttacgttttcacgtgttatggtgttctacatattaatactataaaattatagaaatattagagatttttttcgatatggaagaaaatttatgaaagtttataaatatcatgaatatttatctaaaaaatatgaaaaataaatgataaaattttaaaaatactaataaatttaaataattataataactcatacaatcgaataacaaatagaggtcgtacttaaatattataatatcattttgattacaccattataaaaaataaatatgataatatttgatacactccataagaaaatattaatactaaaataaacttctaaaaagattagaatattagttaaaattctctacattcatcaattcaatttactttcaacttccttcaaaattattatttaaaatatctatgaaattaacaggtgttcacagattgtataagtctagatttttaattttttcaaaccaaactaatagtacgattttttaaaaattcaaaaaccaaaccaatcaaattaaaccatagtttgtatttcgtagttgttctattttttttttacagtaattattcattttttcggtaattttatttacttttaataagtttataatacataaataacaataaaaaattattatcataacaatcaggggcgaaaccataaataaaatttagatgggcatttatctatttttataatgaaatatttagggcatctatgctgcctaatacaatttatgaagtatcataagttattgatgcaatttaatatcgaatctcatttattttacttttaatattaattatagaaaataataactatatatagggcgccacccatatggtactaagatcatggtacttaatcgcaatgtttattcttatattatgtggatttcaacatttaataaaaattataaaatgtggtatggaattttgaacttatgaactccttaaactttatatatagatttaccactacaccaaataatataatttaatgatatttgaccagattaatatttatataaatgccaaaaaaacaagattatttaagtttaagcctcaaacaacttagaatcgaatgtgatttcgcttatgataacaatattaaatcagtattaatattctacttaaagttaatatttcgtctaaagaatatatattaaatatatataaattaattacacaaatttatttggtttgaatcgctaacaaaatttttaaaactgtgatcgaactaaagaattttaaataacctagactaaccacaacattcaccaacagattcatttggcatggtctcgaatggtttaatttagattgattgaggtttgaaacaataaattatgaattatatacacccataatgaatatttttcatgaatattgatatccatgaatatttcatctcttatttttaacgaaaaaagatatattgtttaagaacaaatctgtattcaaacaaaactcattgttatgagttttgatgtatgtgactagggctgagcatttaacccgctgggttgactaacccggccaatccaaaccgaaaatgggccgatcaacccatataattatgagccgaagtttatttggtttgaaaaaattacaaactgtgaactatgggttggaaacggcctgggcaaattacaacccaataaacccaacccgggctggccttataacataaaatatatatattaatatgggctttaaatattgggctgctactttcactcttacctttaccttaacactagcaaacatatacacctaacacaattcagtacacacacatacaaatgagaacggcaactctctctctctctctctct

SEQ ID NO: 125921 - DNA, 1717 bp, Cannabis sativa
  modified_base (1663)..(1666): a, c, t, g, unknown or other
acccaaactcaaaatattatttttcatgttgggcacaaagtaaacatttgagatgtccatttttcaagcatataagaatgttacttttgccttctacgagtatttttgattcatctctagaagagacgttccattttaccatttgattgagctccacaaatattcttcttcctttgcacatatgattgctagcatcgatgtcaatataccatttattttcttgaccttcatctttgtctttacaagcaagaaacaaagttcattcttctccacctttgtattcggcaaaattggctctttctttgaccctccttgatatacattcagaggcagaatgattgtacttgttgcaattgtggcacttgatatgagatttgtctctccttgacaatgagttgcctcttctgcgccctcttgatgcttgtgaattttgacttcattctctattgttgaaattattgttattctagccaccccttccttctcctcattgtcctcgaccacgtccacgtcctcttcctttttgatttttactgttggcattttattcatttttaaaggggaggattaggtagctgtatgtgtgaatggcagcttgccatttaattgttttcagccaaaagattaattttaatcaattaagtaattgatttgagaaataaggaaaaatcaagagaatttccatttttctttcactctctctttcctcgacctccacaaagccaagaagaaccagcaaattcatcccactttcctagaaattcatcttaaattcaaggagtaattggtgtaggtaagccctagaactcttaatcttgttttgttgaagctttatttttttggttgaataagcaaattgatgatttaggggctgttagggtttgagtgatgtgtggtttggtttttatgtttaagtgaagttggaaataggttcttgcagctgtatttgaggtttgttgttgtggatgaccaagtttaagcttgaaaactcaaacttgggtcataaatggtatgttttaattttgtgcaattttctagattctgttgattggaacatattgtggaaggtcattataggttttttagagagtttggtgggatttggacatattttgagcaggtttggaattgtttggggaaacctggtgcaaaccagttaaacggtttgccatgacctataaaaccggttaaacggtttcggtagattccccgaacaattcatttcctcaattcatgtccattcaatgccttggtttggtgatttcctgtttcttagggtattgtagtttcagttagtaatgcagaaccttaagttggaggttcgagtttcccgatttagggttttggcgagttatttaccaagttatgttgtgtgattaggacatccatcgagcatgagactttccgttcaggtcgaccaactcacttgaatttggaaatgtggtaagaatagcatagaacatattgatatatatatttgcgaatgtatgtatgtgtgaaatatatatgcatgcttatgttgattgatacactaccaatacttgtatggtagcggtaaagagtgcattggtaaagtgtacgatgtctgaagagtacattacgatattaccaccactagtatgagtatgtacatgatgtaagtgttagaaatattttaccaggnnnnagatttactaccatgtatattttattaaaaacctaatatgaattctaaaac

SEQ ID NO: 125922 - DNA, 1720 bp, Cannabis sativa
aaagtaattgacttatgcataaatagactctatcttattgtatgttgcaagcttgatgtattccattctaatcaaatcttgttaaaatttcaaatgctcgaactcccttcgatcgccttgaagagtgcttgcttcctcccgagacaagacttgaaaagctatctcccaaaagcttatagaaccttctctcgaaggtagcactgttgttcttcttcttttctagacttgattacagactcaagacaatacaaaatacataaatacagagaaagaggtgaacaaactcttctctacaaaacaaagactcttttctaaagatatgaatacaatctaaaatgtatgaaagagatacatgacctaacttctataagtgtatttatcgatatacaccttattgacagctcatacatagtctgaacaagaccacaacttacttgaaacctttcctaaaataattctttaattaacttagaaatttattgttttgtacctacaaaatggtgagcaataagtgcaactttccttttatagaaaaaaagtcttgcttcggttttcttcacaagaaattttaccaaatattttaaaaaactcacaaaggatcagatatacacaactagatagataggtattggttgaaccatcaaacttaccctttatggcttgcttttcataaatagaaaagctaatcacattccataccttatataagtcaatcactataaaaacacaattaagaaaacaacctaaacaactcagctaaaaataaataattaaattataaaatatttttgtcaattgaaatatgcaaacaatagaattaaaaatttccccattttggcactttgattgacaaaatattttataaaaaaaaacctacatcaagtattagaaacaaaaataataaagtataaaaaatactcctcttgcatgaaagcatactaacacattaaacaagataatttttgtaaacagaaaagttcactaatcataaacaaaataactccccctaaaacaaaggtctagagttgtaatcaataaataaaaaaaatactactccctctttttgtctatcaagaagccaaggataacaagcaaaataaacaaagtcataaaaactttaacaaaacatagataatgagcaaaagagaaaaagaaccacttaaacatcaccataggattgaaagaatttaatgatattattcatccttttgagaagcaaagcttgacttgtctccatttttcccaaatgcaagttgaattctgccatttctgtggtgtagaagtggaagctgaactaacaacatgttcatttagagtaccaggagaagcagatcgagcccttttccttataggtttagcaacaataacatcagtattaatgtttttgataaaaggtgttttatcaatatttccccttatatagtcatgagaaagcaaaaattcagttagacgctcataccaagcaagtggtacttatttcaatcaatacaatgttaaaaaaattaataataaacccaagatcaatttgtatacaacatagaacacaataataatatataataattaggtatgcgtacctgattgatccatagcaattaccacaatttgatagtgtaaaactatcaaataagtcttccttcctagatctctaaatcagaagcaatttatttatttgattatcaagagtatacaattgtgatgagacaatatgtatttatag

SEQ ID NO: 125923 - DNA, 853 bp, Cannabis sativa
  modified_base (30)..(49): a, c, t, g, unknown or other
atctatattaataagtaaatttgattatannnnnnnnnnnnnnnnnnnnggcataaaacccaacactaatctctttcaaacatgaagaccaatacgagatgaaatgcgtgaagcaagctcaagcataagagaatgacgatcatatgggcatagcaggtagattggaacaaacagaaaaatgcgagatgggagcagatgtcgacgtaattttattgaccaggagagtataactaactcatgtagtaaccagtctaaaagctactcaaggaccaggcccgtaagtaattatgagcaaaggcatcgtgaacctgatctccacaagagattaaactgaaggcagccagccctttgcgagcacttgaatcgaaatgcacctgatttgcgtaaccaacttaatcaaaatgcaaattagcaacctgtggatcccattcaactgcgagtaatacaattagaggacaaatttaggaaatatcaatattgagaatatggcaaactgcaaggatatgacttgaacgaagaaactgagccattccaccttgacatcctaaattcaaaatttccttagggatttaaaaatccacatgtctcgcaatatgatggaacccctaatccagtcacccatttaaataattttaacaccataatgcgagcaagcaatgtttcaaacaacttacattgcatactattttgtaacttctataacaggagctgcaagaagttggtttgataaattcaccaaccattccataacatcttgcgaacagttgtcgagggatttcaaaaagcagttttaagctgcaagagattgtcgaccagaggcgtcatctttgacctgttggaattattttaccag

SEQ ID NO: 125924 - DNA, 772 bp, Cannabis sativa
ctttacacccctcctcctctaattaggattgttttgtcaatgtggaaaaatagattggtttgccagtagttcctgtaattggagtactttcagacaagaaagcattcattccagccccaaatgcagcagaagtagaagcagtatttgatgctcccttggaaatgtttcttaaggtttcacctctattctatccagttccatttcaatacatgattaattttttaaaaaaatatttccttatatcacaactcggttttgtgaattggatcgaacaaaggacgaaaatagaagagcagaggagaaggagtggaagggacacaagtacttgttacattacttcgattttgaagcagaaagtaagaagtttgtgatctgggctttaacggctggaattttgattgaaacagcctcacttgtgtaccagcggccacctgcatttcttgagcagaggccttatttctggaatggctgtgctgacgaacagactgtgatgccttaagactcaaagtcaaataacattgtaatgttaacttttctcatgtactattgcttaatttcataatcaatggaagatgtatgtatgtatggataataaataacaaaaataataaaaactcaactcaatcttttgaccattattagggcttgttacttggaggccgtctcaagtcaattagaagttttggaccaaaaaatttaattaggtctttattaagtaaattttttatgggaaatttacatggtatactaacttttgccatttttttacaaa

SEQ ID NO: 125925 - DNA, 1482 bp, Cannabis sativa
agaggtatattttgttaatacgggaataaaaatttttataattaattacaatttagaggttatttttattttgtagctccaacttattataccacaggtgattcaccacaagacatagtccctttagctccatctcaccctatggttactagagctaaggaagggattttcaacccgacgtctatgtaggtcaatctcaatggaactgtgtgataattaatgaagagcctacaagtgtagaataagtattcaaatacagtggctagaataggaccgtgtctactaaaatgatagctctcaagaggaatggaactaggattttggttctaaatatttaaggaatgaaaatcattcgaaataagtgggtatacaaggttaagttgaatgctgaaagtacctttcaaagatacaaagctaggttggtcgtaaaggggtttaatcaaagacgaggaattgattttggtgagacttatagccctattgtgaaggcctccacaatttgaatcacacttattacagttgttgctaagaccgaggagataaggcaacttgacataaataatgtatttctaaatggggagctgcaagaagatctttacagggagtgttgtaattaagacacatgtgaattggtagtttgccacatcatcacaaaatatcctatccaactaattcggttggcatcgaaatcagttgcagccgtacacctaaatatagatttcttgctcactgatttagcgggaacttagttttatgatttgttattgccgagagagagcttgagaaaacaaaaaacagagattgtaagagtgttttatggagggatgttaaagggagtgtccattcatgaaatggcttccctcatgtgaggatttactgtaattgtctctgtattgtaattgattcatcttgctggttttatctctctctctctctctctctctctctctctcattaattgtaatcaaagctaattcagcaataaatattcttcttcatgttcataatccagtcttatggtttcttggtgaattcgatttcgcattcattctttacagtacattattcttgatctctgttgatcctttatattgttctgttattgtttgttaattgttgttttcagcattgttcttgcacaacaaatggtatcagagccaaggttggcttaatcaatccaagaactgctcgatttcaacacagagaaaccaagaatgtcaatggctaaattcgagatggagaagttcactggtaaaaatgacttcgggctatggagactgaaaatgagggctatgttggtgcaccagggactgtatgaagctcttgatgcaaaagccatgaaagccgttaaagatgaaaaaaagaagaaagagattcagatcaaagctcacagtgctatcttgttgagtcttggggatgaggttctgggagaagtctctgaataagagactgcagtgggccttttgttgggttttgtgccct

SEQ ID NO: 125926 - DNA, 1017 bp, Cannabis sativa
ttagaaaatacagagtccattttgtcatttaacaaaacacatggtccaatctgtagcttttgtaaaacacagggtctaaaatggtatttatccaaaataatatgacaaaacgatacctaagaaatacaacataataaaaagtaattgggaactgcggcacaaaaacaaaattagggtttcaccttcattaatcttattagtgtttttatggggttagaatttttagtttcatatgttgaaactaattaggttttctcattagtcttgtcttttgacatggttctatagtttctttcattggttttggtttattagtttctggcgttagttactggttcttggttttgagttcgttcgggtatccatggcgtcgagtagttatcagcgaatggaggtagcggaaaaaatagcaggaatttttatgtcgaaatggcaggtgcaacctgaaatagatgtatttgttggcataaaagaagctttaagctggattgaccgtcatttgtgaggacaattgattttaaaaactgatagtttagttgtgttcaagccatgcaaagccaaattactttgtcatcctcttttggtcttttagttcatgatgttcgtactcctctcttatctttaaataatgttgagttgtgtttaatttattaaacgaattgcaaacaagttggctcatgttttagccaggattcttgtttctctccaggtcgtgtgcttcagttggagaattgttccaacaagtgcgttttattattattaacgattgctaattaataaagttgctaagtttattaaaaaaaattaattatacatagttttttttttttatttatgacttatatatactgtctatagttaattattgttattagtaatttttttatataaataatagttttttatattattaatctattaaattaaaatttagaaatttttacatgaaaaatccattttgcacaatttattacctaaatacctctacacgcttatgtctacatttttacttacaaa

SEQ ID NO: 125927 - DNA, 947 bp, Cannabis sativa
gcaacagtgacttgaggtaaaaacgagggtctcgctaaaggaataaaagataaagcttagggttcaagccaagctgcatctcgtagaatacaacgtttaccatcaattattcttgcaaaaatcgcctacaatgacttaaaatctagtcctgattggtttttatttgatgatctctaatcttggcatcgtatatctcaacaatggttttaggaacataagttttggtttcgaagggaactttttcccttttttgaccaggagggctccctttctttcaactgccgctttgagttttgtttttggtgaacgaaagtgagtgggcaaattttttagggcaatcagtttctaagaattatggtgttgtaatttctagaaaagagtgggtcatgtttgtgaacaaatgttatcccaatttcttgaaaatctaaatacaattcaacctaagaatttatgagctgaattacctacacttttccttaaaaccctaaaattattcaaactaccaaaacaaaattacctaaaactaaccaaacaacacagataaaaagatatcaatcaagaaagagagaatatgagttcaaaaaggaaacaattaagaagatgagaatgtatcacttactatcttggattgaattcgtgggcagagaaaagcttgatgtttgagattctaaaaatcgtgagattgagctttgaagatctttgggacaatggttgaaatcattgagatacgcaagaaatatgtgaaggacaatgagggcatgcaaataataaggaggaaacatccagaatttacagagaagatttgaaggttcaaagtacaaaaatggtgaaatcgattgtaattcccagcttttacacccaattactgttaaccgttcgatcaagagaaatttgatctaacggatgggaacattgtaaaagagaacggttagagcaattaatgctaa

SEQ ID NO: 125928 - DNA, 1177 bp, Cannabis sativa
catgcaacaaccacctggttttgtaagtgaagaacatccagattatgtgtgcaaactcaacaaggccatctatggtcttaaacaagctctaagagcttggtttgaaaagctctctacagttctaatcaaaatggggtttcaatcatcacaagctgatccttccctcttcatcaaaatcacaagcacttactgtatctacatactggtttatgtagatgacatattagtcatgggcagcaatgacaaagctatcaacagcactatcactgatctgaacaatacatttgctctcaaggatctcgggttggttgattattttttaggaattcaagtaactaaaactgagcagggccttcttctcacacaaactaaataccttcaagacttacttacaagggctgccatgcagaatgctaagactcaaaacacacctatgaacagtggattaaaattgtccaactatggaagtgagccaatggaagatgtcacactttatcgatccatagttgggggattacaatatgctactatcactagacccgaactttcatactgtgttaacaaggtatgtcaattcatgcaaactccattgcaacaacattggatggttgtaaaaagaatacttcgatacatagcaggtacactagactatggtctacatctccaaccagcacctgacttttctattgaggcattttgtgatgccgattgggctgccgaccctgatgatcgtaggtccacaacaggttattgcatttacttaggtggaaatttggttgcctggaagtcacaaaagcaagtaaccatctctagatcctcatctgaggctgaattcagaagccttgcaagcactgtaagtgaaataagctggattcaaagcctgcttactgagcttcacatcaaccaaaccagtgttcctactgtgtggtgtgacaaccaaagcacagtccttctcgctgcaaaccttgtccttcatgcccgcacaaaacacatagaaattgacttatactttgttcgtgacaaagtgctgcaacaccaacttcaagtgtgccatgttcctgctgttgctcaaattgttgattgcttaactaaacctgtttctagttctaagtttcctgatctaagagccaaactcaatgttgtttctcaacacaccttgagtttgaagggggctgtt

SEQ ID NO: 125929 - DNA, 2297 bp, Cannabis sativa
ccactgcaaatgtacgctggtaaaactttgatctctttgccagcgcagtttacaaaatgcgctggtaaaagtgacatttcttgtagtgataccatcaccctctacttaagtcgaacacataatttgaattaatttaagagtataatgggaacatcatctataaaagtgagtatattttaaaaaatatatagaaatgaaggtaaaaattaaaacatgtaaaaataaagtagttatacaatgtaattttctcccctccaggatgtgctatgagatttagtagactacagaaaaaaaaaacttttaaacccttctttttttaaaaaacaaaaatttgtatttttcataatcaataaaaaattatgcatttttaaaggggataatattttaggagaagttgaagaattttttatacattaattaaatttacctctaaataaaattaaattcaaatatacttctttttatgagtattgtacccaaattatcctcacatactcacataactaagacataatttcaagcataatagatttgtattcattgtagatgaatgtgtaggtttgtagaaaagttagggtaaaatttcgattagagaagaataaaaactattgtgaagtgatagaggtaaaattagtatgaatgattgaaaaaaaaagtaaacataagagatattaaaaaagatggtaagtacattaaagacatcaagttaaaaaatgtatgtggtataattgcttctaatattttttgggctcttgaactaaatggaccctaagtacaagcctaactcgcttatgctcataactgggtctgcactcacaacaatgtgaaatacatttttctctaaaatataaagaaaataaggaaaaaaatactatataaactcatttattctatatgtattttaaagaaatatactcttacctaccttttagagaaaaccattcattcaaattatattttaataatttatttactcaaatgtcttgtctttatttttgtttttgtttgaaaattaattaaaatatatttatatgatataaaaaaaatatagaagatctaatctatgaatatagtgattattttataaatacataaaaataataaaaaaattacacaaatacgattgtacgaaatttagaatatttttacgatttttatgattttatttatagaaaatatgggtttttatatattgtactcttgttaatttgttattagagttagtcccacattgctcatgtgtggaaatcaattgtgatatataagatgaatgagctactcctcctattgccaattggttttgagatggaaccccatgattcttaacatggtatcagagccacttgttccgttgtgagcccaaattgccaccaatccaaaaaattctagtgttggggtctttgacctgtttcaaaatctacaaatttcctaacgtgtacacccataaatttcctaatatttggcgttgtacccacactttctaggcccaaatgtgtggaaggtgtattagagttagttagtccgtggaaataaattgtgatatataagatgaatgagctacaattagttttgagatagaactccattcatcttatccccaaattctaatatttattgttgattttttgttatttgtatgttattttctatctgttgttattttgatattattttcttattacttttatgtattttttttttattattttcgtgttattttcaaaatatatataaaaaaataaattcttttaacttaaaattgtaaatcttttttaaaaaatagtgaagagaaattattgtaagtactttaaaaatatatataagaagttgttaagtggggcataacttaatttttggttccaaataagaattttctaaatatatgcatgaaagatagattatggttggtcatccaacaagtacgtaaaattcactactcattgcagttatcgttagcaacctgatttcttcactaaacggtctcttctgttggacacatctctgactaataatctatcattatagatttacaacttcttattccttttcatttttctctaataattatataaatatatatatatatattaaaataataatttatatcttcacacacagacatataatattaatacaaggcacttgggttggaaaatctataacttttcaaaaaagaagcaagttaaatagttaataagatctttaatttccttcatgatcaaatatatatatatatatactaagtgaatgtacgtgccgtgccacgtattgctagtttcatttaagattttggtctt

SEQ ID NO: 125930 - DNA, 1234 bp, Cannabis sativa
tacatttatgtaagcgatgcgatatgaatgtgtgtctcaaatacataaatttaattataagaaataaattgaaagtgattagtttggtcgtgaaaattttgaattgagaatgttaaataaaaatgtgatattggatgtttgaattttaaacagatacttgcagtatttttcccactgcagcctcggtcgtttgttattctttgccttctctagtctaatctttctgggatagtggcgtgttgttctagttatttgttttttggttggtgagtattcattagagcaaggtgcacggtaagaagtatgagatttatattaaaactaattgcagttaaaacattttctcctcgagggagtcaattttcacaaacacatgtttttcaccttcaagcggctaagacaatcccctcaagccagagttgttcgttgctgggtttatttatttatttatttattttttgtagagagtaattttgaagttattgtgaattctatttcattttttctttctgagagtgtctccaagtggggttgttttttagatcttttagaacattgttatttgtctttccgggtgtatgtcttcaatatgtaatgtgaaatggtaataccgcaatacatagtaagtatgatatgcactacagatagaaaacgaggtatcttggttgaaagaaattccttcttgtttaataactaatgtattatttgacttttagcaataaaattgattattatattaaaaaaatctaattgtagatgagtagagtagcctactacactctcttttgttattaagttaggtctctttaaaataaaatagaaaaataaaaaaattagagtgctcaaaattgattttttcaatgaagaatttacgcatatattgtattttttgccttttcctttcaatattgtttcacattttctatttatacgatttccttatgctggctttcattcactttcactcttcattctccaatagcattacattgtgtacaaccttctagtctaatatacgtacttggaataactgttctgtattattattgttaagattatggtgtcacacttgtgttgtataactaccaaccagcgccacttagttggaagcttaccttgaggcacatttcatgcttagcataagcgtgcaactcatgtttttttaacataaccaacttaaaactagtttcttcccggaatagatgtaaaaaatgtaatatcagagtactatttt

SEQ ID NO: 125931 - DNA, 1799 bp, Cannabis sativa
  modified_base (1232)..(1232): a, c, t, g, unknown or other
tatatatatatatatgaagaagacattttgataacacctcttattttagtcaatgaagttcattaaacgcaaagtataatgttagatgtgtcatccttcttcctcaatgagctaaagtgtctaggaattaggatatttagtgattctgtatgtaatgcgtgttactattgaattaatgaactagccacctactgatattcaagcatcgggaaatattgttgcttgaacggcgcacccaaaaagggaaatatgactttttatgcttataattggtcaataatttaaaaataaattcagattgaagactaagaaattttaattttttatgatcaccaagtaaaattaacaaacaatttaattaattcggatctgttataaaattgtttgaacgtaattaaattttttttgttagaaaccgaacttgatagattagaaatctacagcaaaaagtaaaattatagaaataaaaatgacacaatgttaatccaaaaactttccttcgtaatgtggacatcaatgattgacacatggcatgaaggatgacgtcacggagttgagtagactagagtcatagcagtcgacctgggaggggaccctagtcctgcgtccaggttgacttcgggatcttcgagatggatgttgggacttcaataacttaaatccaacccactatattttagtattctatatcatgaagatatggagcaacctaatccaagcctcgggacctaaaattacatgaacctgcaacctgaaagcctaggcactaagggtttcacctagtgcccaagttgacatcctcaagtagggtttcagtttctgggaccgtctctgtgtaaagtggtcaaaacttgcatttggacatcaactagacataccatagacatatttgaggaatcaaaatcagaattgaagcaagttaatttttgagcacccggggcccccatcacccagcacccaggttgacaatctttcaatctaggcgccttccaagcgtctgatagaagatctcacttttgcattgtactcttcttcataaaaaatagggaaataagtccttttcgagaaaaaaaacaattcttgggcacaaataaccgagcccaatgacagacagacacttggggctggtcgtgcgctcaggttaacattttaccaacatgggctatttataatggagttttttgggaatccagtagagcatcgtctccgtcttcagaaaatattgagattcnactatttttggggaccaaacagaatttttgaaggggaaaaagcgggacccaatgtccagagcccgaggttgacattttgccaacctgggctgtttccgatccaattaagcaaaaagtattctaggaatttttttcatcattagaaataacgaagatttacgtaaactcaaggagaaaaccacaatcccaagtccttagaaacaaggcccagcacctaggttgacctagggctgggcccaacgcccgggttgacaatcaaccctggatgctgccttgaatttctcaaatgccaaatccgatgcgaccattgaattcagcatggtcaaaaatagggtaggaaacctcatcctcaagtttagaagccttgaaagtatccaaaaaaatcccaagagatcggtgaaaaatcccgagaatctagtccgtctagtttttcacaattataatgatatatgaagttagagaaattaaattcacaactttgcatttcccacttccagcacacctggcaatgaagagtttcgagtctcccatttccacaaaatagcaacatcttcgagaaccagtgac

SEQ ID NO: 125932 - DNA, 1265 bp, Cannabis sativa
  modified_base (39)..(65): a, c, t, g, unknown or other
acagtatttttgaaaaaatttccgtgtgacagtattttnnnnnnnnnnnnnnnnnnnnnnnnnnnttttgtaaatttccctatatatatgaattttttttatagctatgttgataaaaatgaaagactaaattaaactctgactgaatttaaactaatatttatttttattgtgtattctattagtaaatttattttcaacatttgattattaaatctttattgcatttttttttttcaattttgaaactttgtctctgtttttttagatttgttatatatatatataatgtatacaataatattatacataaacataaatgtatatatatgatgaagcagtatttgcaagaattgtttccagaatcaacgaaaggggatcttgcatatgctcgtggccagatgatgagagagaaataatgatcaagcttattgagattaaaagggtaattttaaaaatttaaattgagttttgattggtaggtaatatcaaaattttaaaaaaataaaaaaggaagtaaatgttgattttttttttgcggttgatttagttaaattgtatagaaatttttttctttcatttttagtggttaattttttttattattgatgttaaaaagagattttacaaaaatatatatttttttttgttatttttatatttttactatcacattttttttacatattttttatactgtactaaatttttaaaaatattatgttaaagttttaaaattgtaaaaataccatgtttcagtaaaattaaaaataactctaaaacaacttaacaaataacattaaaacaactataaaacaacaaaaagataactataaaacaacagaaaaataacaaaacaattacctaattgcaatgtacaaataatatcaactcctcaacatgcttttgtattatgattttttttttactcagatttgacaatttgatttatctttttgtaagaaaataaaagattatcggtgatagttcttgacgaacgagaagcagacaatgtacacctgagatttttaaagtgatactagttagtaaactagaaaaataaatatgaataaataacacaataattcctagtaacaacgctaaaaatttgatgtgtgttgtatgtggtatcaaatttattaattgcaatatgcaaacaatatcaataggaaattagaatttctatgcatgcattaggggataattttttccctaaactaataatttttaacattgaaaacatatgactacttttccaaaacccc

SEQ ID NO: 125933 - DNA, 1333 bp, Cannabis sativa
tttttcaaattagccatatttttttatttttttgacaaagtagaaaagccatatttaatatgattccgcagtagtgaaacaaaagtagtttccaagtaatttctcatggtcccactaaaatgggccttcttagcttgggtactttcttcgaaccatctctacgagtccatccactttgggccgttccgcaattgcaagatcttctaataaacatataggctatacgttttctttttgaaaggacattaggctacgtttacaactgtccaaaactcttttcattttcatctaaaactcataataccatagaatgacctcatctctcacctactaaaagaataccaaattttaattatttaaaatcaccagtccacactccctcgaaaggtgtatactctctatcatcactatcacattcacatgaatttcctatagagtgtagtgccacttctcactgtagaattagacaattaaaacgagttacgtgataccgggtgtgacttttacctaaaataactttttcagggaaggcacgtttgaatctattatgagtaaaataaatagaaaataaactataaaaatataaatagaataagtaatagacaaacttattattattgattttactctataagttttatttttaggtaataaatttgttttactgattaatgaatatttttattttctttcaaaagaaatgtatatgtgtttcaaaatatttttttttggttaatcctattttagactatgtattttgtaaatgttagagtttttgtttttgttaaatgataaatggatcttatattttttaaaatagtatgtataagacattgagttcagttttcgataatttttcttttaatataatcaatttgaagataatttctgacatgaatagatacaataaatgtaattaattttgtcataacacctctaaatcaggttattattaagttttattttgaccgaaaaaatagtttaaagtactaattagtactattgtagaaaatatatggtctaatttatcatttatcaaaataaaaagtaattaataatttttgcaaaacacatagtttaaatagcatttttttttactaattttaaaatagattataaatcaagtttctcacattttaattcgataaaaaaatcccttaagtttatgaaaattaaagagataatttttttttttattttgaattgttagatgaaatgttaaaatttgaaaaaccaactgatattatatgagtaaaataaatatgaaaactataaacaaaaatagggattgttcacaaatatataaaattaataaaaaaaaattacaaaaata

SEQ ID NO: 125934 - DNA, 1052 bp, Cannabis sativa
ctttaatacaattatgttgtttgaggagaaaattattaagataattaccattataaatagtattattcttaagtccaggaactgttgacactgtcatagaaagaagcctcgattagccaatagttttcaaacataaaccttttattgccattttcactcatactattatcgtaaagaattagcttaagaactctatagtcagaaccataaaaactaaggtgatagagagtggccttaggataagagaacagttagcttttgttggcaattccccaatccaaacactcacaaatagaaccatgttaccaagtgaacttattaccaacataattaagaagatataaagaaaatttattaacaaagttttgaaaattaatcatggcataactaggaggattggagttacttctcatatcactaatagagaggtagtaattaaaatcacctaatataagccaaggaaggagaggagcattatcaaaaagtttctcaagtaatttccaagtatgaatcttatcatttaagtacggagaactatagaaataggaaatatgattggttatattatcatcaaaagtcacaatatagtcaatatgattagaggaataatttaatttttttttatcgacgtcttgctttcaaaatagcagaagaactccccctagtcccctcctaggcacttcaaaagcaaaatcaaaaaaacaacttagccctaagattatcacggctactagcccaaaagcttagttccataacaaaaagaaacataggattgtttttctttacaataaaggaaaggttacgaaatgctcggggactccccaacccatgagcattctaacacaattgactcactttttttaggtggggttgctcaacaacacccgcatgtacaatagaagtgttgacaatagataaaacatcagtaatacttgaaccagccctagatctctcgagaatgctcttgatagaatccccaagcacaattgtaacgccctaatgctaaggcacgctacagtgctttttcgattaaagtgcaatctttgctaatc

SEQ ID NO: 125935 - DNA, 977 bp, Cannabis sativa
aaaatatatagaaatgttcattttttttatcaagaaagaagaacttcattaatcaagaacaaaaccaaaacaaacaaacatacaagataagaacaagcagtccttatccgaaacaactcaacaagagtaaattacatttgtagcagctgtaaaactctactctcaaatctatccaatcttctatactttatattttggactctatacttcactacgtttttaatatcagcaacaatatgagtatcaatatgcgagtatccctcaaaaacacatctattacgattcatctagaggtagtaacatgttgtagcagtagtagcaatattgattttttttttcacccggttatccatattcattgatagccagcctatccactctttaaaatctaaaggccacattcggttaccaagccacttaaacactaactcaataactctgcgagataagcaccaggagaaaaacaagtgctcatgtgattcattgaactcatcacacacagggcacttgttcgactccatgggaatgtgaaaccttgccataatgtcttttgttaaaagttgagagtttaccacttgccatagcacaaatctatactttggtaaagtaagagaactccaaatagttttatggtaaggaatctaagtttgatcaagcaagttgttatataaaagaccggttttgaatttacctaaaatctcagccgcctttatgtcttgctctgtgagcctcttcctcaagtgacaaagcttacactaataccaacttgtgtcaggctttaaatcacatagccagtaagaagtttggtttatgtaaatgatattgatccatttaacccaaatcaagtctttcttacttaaaagagcccaacagtaaaatacaataaaatatatttctttaatgaataattattctatttttatatataataaacattaaatagacataataaaaaagggggctattatagtagggat

SEQ ID NO: 125936 - DNA, 1567 bp, Cannabis sativa
aaattatggaaatgacttttgaaagtgtgtttggcaactgaattttattttctatttttttaatttaaaatcaaaattgaaaacataactttgatgcttttaaaatttttaaaaacacattttttctctcttccctgctttatttttatgttattttattttgtattggagttttggatgtgatttgaaggtttaaagtttttgctatgttttttattgaattttgctacaataaaatcaggcataaataataggcttttgtcgttgatttggagaagtttacctgctgtagtaattttctagcaaaattttagcataagtagtacatgttaaaggaacaatcaacaatatttttgctggatttttgcagaaatattgctacagcaagcgtaagttaggattctttacgagttgtgaaggattttttagaaaaaagaaaacaaaacaaaaacataatttctcaataaaatccaaaccaaaacaatctcaaataccctaaatttccttttctcagaaaactctattttctcatcttcttccttttccatcctaaccaccatagccacctcgtctctaccttccccatgcctgaaccacgaccaccctgaccaccatctacccttctccacctccatttttcagaaactccattatcataccccaatcacatttctcctctcttctttgcccatgatcactaaacccataatttgacctgagcctaaaaaacccttcgcccaccttcactctcatctcatcatcatcctcaacttctcttcacttgaaccatagcttcatcaccatcttcgcatgaacccagttgtactagttccaaccctcctcgttcttcatcatctcattaaagttagcaaaaaataatgataatatcatatatcgttttagagaaagaaaaaaaattagatcatggctaaaaaataggagagttaaaaataaataaataataattctatatgtgctagtgctacctcatgataacaaataaactacaacaaaccattaccatcagattaaaaattaaacgtttaaaaaatgtccttacatgtgaaagcaaaagtaatgctctcacctaaaaaaaaatcctaaaaattatattttaaaaaataagtaattttgaaaaaaaaaattaaattttttatgcacaatgttatttctgattagttgtaatattatttaatatttttaagttttaaaaattttaatttgtggttcgtcagaaatctcaaaataaagaatattttagaagttttggatgatgatttgaaaactgaagttttatttttggaaaatttacacttacacacattggacttaaaataattatatatttgttatgcattttttaatatatccatattctaaaattatttagcataagtaatacattcacaagttagttatctaactttattatacctattctttcataattcaataagatatatgaatctagggaaatgattttgtcctgttattgtactttcacggattataatctatgatgtacgacagccgtcagataatagagttatttgatctgacaactgag

SEQ ID NO: 125937 - DNA, 3749 bp, Cannabis sativa
ctcgggttggatgatcaccatcttttgcttacagtcaatactagcagagtacatggacaagaaattcattccaagtatgatatcaaaatttgttaaactcaattccactaagtcagcactcaactctctacccttgattcggatcgacatagacctaacctaccttttggagataactaattctccgcgaggcagtagggttccaaaccctttatcataactgtcaatcggtctacccaatttatcaaaaattcaggccgccacatacgagtgagtggccccagagtcaaataaaatagagaaataagagttgttgaccgagagctgacctgtaacaacagagggactagtttttgcattagcctgagtaagagtaaacacccttgctggagcgagctttgcttttatctttgactcttctttctttagttgcggacagtcttttttgtaatgctcaggcataccacactcaaaacatccccaccatctacactcactcagatggtgcttcttacagttgggacactctggatacgtgtatcaggtttcaaaaccaccttaacggttgccatgaccgtggttccttcgaaacctcttcaacttactcgagctactagatgcagatagtttctttctgttctaatcagaggttgagtcacgtaccccccctaccataactagaggtaggaagagtagtggctccaccaataatctgtgtccctcgggactcctgaacgcactcaactgcgccctctgctcacagtgcttttcctaccatgtcgacataggtggtattatcatctgttatgatcatcaggttgtgtttgatcttgggaacccatccaaatacttttctttcttactgaaatcagttggcacaattcttgaggccaacctagccaacctatcgaactgggttgtatactctttaacagacatattctctttttaagttagttgagtaaattcttttcattttgccctacggactgccttgttgtagtactttgcattaaataactcccgaaactcttcccaggtaattgtagtgacatctcaagaaagaggcaccatatcccattagaccagggcatcctcttggaattggaaggttgcataagctactctatcattaccggtgactcccataaaattcaaaatttgagtaataacggtcagccactattcgactttcataacatctggacctcccaaaaagactggaggtgcctacttgcagaactttttgtacagtggtcccatccgattcataacaacaactggccctgcctgcacaacagaggcaggagccacctacaccacaggagcaggcattgcaagagcaccctgctacctcagacgtctgatctccctcatcttgctcattaattcttccttgtatcgctgcaaacatgttctcccaatcctgagtagcccgcggtgggttaacatttccccaaccgcgtgctgtgcctcttgggcctctgcctcagccacgaatattcacgggaaactgaactccatgattgccattggatccgactaaattaccctggcttctcgtgttttgcctagcgtccattctaatagaacatcatgcgaaaccaagaaatagtctggtcagatcgcgatcaagaataaattactaattaccgcttacttcagaaattaaaatatgtgcctattcaactatcgggctataacatgcttcctatcaggcttttcttataacatactaataaaacaagctactaaatgaataaaggcttactgaaccttgagtcgagcttatctctgatgatgattgtacatgtcgtgactatcttcagaagataacctggtggctctgatacaaaattgtaacaccctactagattaggcgtgttatcgtgattttatattaattgttcaatccgttgctaatcaacgagtttgttaaaaaacgtgattaattaaaagtttgctgaattactctttaatttgaaagtaaataacttttatataaaccgggatcccgtatttaaaatatttacaactatgatacaaaatgttcgatacaaaagttgtcgcctgacaactatacaaaatacagcctgctgtcccaaagatcgtatgctctaggcctaactgttccgacatgtacaatctttatccgctcgcactcactgctgttcagttttagctttgcccttacctacacatgtaaacaataactgtgaattgacagactctgtaagaaaaacataatcataatataaatataactcggattacaattaggcaccatacacctaatcataaccctatccccgcatcccacgagatactgagtttagaatgttcatacgacggtactattaaccataatatcagcatatattcagtactctagtcgtactgatgtgatagcgtcaatcaatacttataccaaacatacattcatcggtatccaatataactctatgtatactgataccgctatttcaatgtaatctagcaggcaaacataaacatgtatgctaaacatataatcacatatgcatataatcatactaatcttaccgcgattttgaattcaagtgtgccagtcatcttgagtggaacagctgctcgacaatttacaggcctctaagtcacaacattcgtaaaattgataactgatacgctaaattacttttcggggacttaaaattaaaactaaaagtttccctatcgatggataacatggcaataccctaaatattgtaaaaacatgaaaatctagggtaccctaaactgccccaaccagtaaatcggttcccaaccgaaaaaccagttctgaagggtctgtctggggaggaactggtagaccagttcgacagtaccaaactgaaccggttgatcggttcagtgtctgtaccccccaaaaccacataaaaacctcaaattaaccccaaatcgtaccaaaacttccagagtacctaaaaggtccataacaaacctaatccaagcaaaagaaacaagtaatagcctctgaaattgaaatcaccattgaagagcaaagtttgagctctaaaactcaaactttgttcaaccaccacaaaaagcaacaaatcaaacttgaataaacttaaacaaccacaaaataccctttgaaaacataatcaaaacaaatttaaacctacagaaccctaaccttaaaaatcatgcaacaaaacttagtttttctaccttaaactcaaggaaaaagagagaagagtcttacctcacaacctacttgagctacatcagctcaaaacttcaggaattgatcaacaaagaggaagaatcttgttgggtttcttggtgcccttgtgactgaccaaaagagagagaaagagagacttggattttcttaattttttctaacttgaataaagtgaaataagctaatatttacttaatatcaatctcaataaatcagattataatacttagtattactttactaatttaacaaaagacaaaagctaacataaggcaaaaggctattttgtccttatttcaacaagaagtaatcttgccacccaatggcattttggtcaaatttaaaatcacaaatattctcgatattttcaatatcaatctaagttgtcccactatttttaaagtactataccataagaagaagtgactctactggccaaacatcgcattccactgttaccgagcataaaatatgaaaaacatgaaattttacatattgcataattagcacacctaaaattcaa

SEQ ID NO: 125938 - DNA, 1278 bp, Cannabis sativa
acggcgtcacggatgacgttctctagaaagatcttgagtacgccacgtgtctcctcgtagatgagaccgctgatacgcttaacaccgccacgcctggccaaacggcggatcgccggcttggtgatcccttggatgttgtcccggagaaccttgcgatgcctctttgctcctccctttcccaaaccctttcctcctttgcctcttcctgacattttcaaatgatcttggttgtcttcttcttcttcttcgtttgaagtgagagttggtattgcagagtcgagtggtttggggaatatttatgtatgtggggatgtgagaaattgaccgttggattagatagcgatccgcgtctgtatttacttttgcttgtgaaccgttggatgcgttattcttgagttttattgggtgattagattgtcctttggctgtggcgggaatttttatatatatatgatttttaattattgtatatttaatgctttcttctaggtgctatgaatatgtttgattagtttagtatattatatgaaaatcaacatcccttatttattttagcaaaatgtttaaagttttgtttttttttaattcattaattcgaaaaattacaaaggaaatggttcgtcaagccgaagagcttgacgaacacatggaatgaaaccccaatctacatagcactagcttcaaataacaatgcttgattggctaacatgtacgccacatgattggcttccctaaaaataaaaaacaaaccacaaacttggacatgttgcactagacttttcatctcaataaaccagtccatccacctctatgcagcaatcttcttgttcattgatcaagtgtatcgccttttgacaatttgtttcgactataaattgttgaaatcccctatgaataccaaccttcagatcttttggaatagcaaatgtttgaacttaataatggagaattttactatttgaaaaaaaaaatgaataatagaaaatttttatattaaaaaataggggatgcctacactacacccctttaaaggggtgttttggtagatcccctatctgtttcaacactaaaattagttcaatttttttttttataattgtgcatgttatagttatttatgaccatttgtaaattttcaaaaaatttagaataatttacaatgccaaaaataaaatgtatatatattttaggctaattaggatttttgccccctcaactttaacatgtaccaaattatgccccttgaacttttaatgtcgttaaaaatgccccctgaac

SEQ ID NO: 125939 - DNA, 972 bp, Cannabis sativa
ttaccatacatgttttgggcccaaggttttggttcgacctaagaatgggcctagcctattttaacatagggcctttttgtgttaatttgcttgaacgtattggattttttggatattgagtaaaagtttacaattttactgtcacatagaatttttttaaaaaatattatctttctataaaacaaccgtaaaacaacaaaataaaacaattaaaacaacagtagaacaactaaaaataaccgtgaaaacttaacacagcacacaatataaaatttaaacagtattttttaaaaaatacattatttttaaaaaaattccgtcctacagtaaaaatataaaagagttcaaaatttgagtatgtggtgtgaaaattcctataatcaaagttaccgttactaatcattacatgtataaatagttgtatattgtaatgggaacttttaataaaataatacaatttaactagaaactatttatataaaataaaatgatttgattttaatttaaagtagaaatagctttgatattacacattttatgtaacttcattattctattagagattaactttaagtaattctatatatttttcaatcaatttgttttttctaactataaaaataaaatactacatatcaatctcttataaaataaataaataaataattctccatatttaatgctacatattaatctcttactattgtgagattaatgatattcccaattaatattgtaagatcaatgaaagataagtttcaaaataattttgtaattattaaacagtgtaattagaagggtaataattatataatatggtaattgtactatatgttaaaatgcaatgtgtttttaaatataagacaataattatttgacaaaatagttaaaaattaaagagcaaaatatacattttagtagctaatatttataaggctaattaaggatttttttttctccgaactttgacat

SEQ ID NO: 125940 - DNA, 1611 bp, Cannabis sativa
ggggattagggtttcttaatcatattgggtagcgtgcctaaatcttagggcgttacaacaataatacctaacgtcagtttaattaaacagatttcttaattaaattaataaataataaaaaataattattttattaaataatttttctgtaaaaaataatatagtgtcacaccacaccaacctaacccgcccaggctcggacggctcgcgcgtgtgtggtgggtcaagtgtgtgtgtcctcacccattcacacaaaaccaaacccaaatatcaaagttgcactctttatacccttgtaaatgagggttcatatcccatgtgagactttttccacttcacacactaggacacttacatatttttcttaaaatattcataaactttccaacaataaattatgcttaatttgctcatttcgtaaaataagcctattatattaacttagtaaaattataatcttactcattttattctcgcaatacccatattatttcatatttcataaaatatgctttaattaattataattaattattgaaatattacaaaataggtgttctatatttttaacatcaactccacacatcaaacatatcgactcatcaacacatatattaaaattaaagagcgtttcttttgtttgcaatctatctaaaattgctaaccacattataaatctctgtataataaccctgccccacactttgccataccacctcactgggtactgtgttggaagtagagacttgtagccttgactaatagtacttggtcatgaaattttcttgagcatttaccacctgcttgaattgctctttacttttactatttgctttcaataccagttgcaatgagtgatagagttatagtcctaccagcttgcatctttaaatagacaatatgtacccaattgactcaaagattgtcttgctttgaaactattgtccatacatatttctcaagaatgttacttggttccattgcaaattgaaacttcttgaaccctaatccttcatctttacatggtttacataattttgtccatgaaacataattgggaccaacatattctacacttttccataaaaaggaaagtaacataatctaagtctaatgtgaatgaatcagaattaggactaaattaattaaagttactcttctaccaaatgatagattcttggaattctatgctcttatctgagctactattttctcaatcagtcatgtacattcagcaaaggacaatcttttagagtaaattagtattaatactcctatgtacttaaaagccatttgactccttacgaatccagatgcatttaatattctttgaatttcactttgatggattccacaatagtaaaccaaaagtttgtgaaaacagtttgataccttgaagcaagcatgagatagacctatcaaaaattaccattgcagaataataaaatatcgtttgcaaaataatgatgtttgagttcgtttggaacgtcgtattaggtcgtattgtattgtattataataaattagattatatatcatatttttatataatatactatgttaaactttaatttatactaaaacattatatatttaggtgcccataaaagt

SEQ ID NO: 125941 - DNA, 1125 bp, Cannabis sativa
agagagagagagagagaaatgattgggacacactcaaattatacacactttttactaagggtgttcatcaaatcgcttaaactgtgtaaactgcccgtactgcaccacactgcataaaaaatacagtttaaaatcttttgtggtgcggttgcgatttgcatttttaccaaattgcgcggtgcagtgtgatttgtgcgattttgaatttaataattgcgcttcaaaccgcatcgcaccatatattataaagttattaatttttatcatataatttttatttttttcatataagaccaaatatatataatatatgtgtatattactttattttgtagaaacagttcaatataatgacttgatgattattatacatgttatgatattttttaataagattttttttgttttgtattgttaaaagtttattagtttgatttttaaatttttattataatgtttaataattatgatagtataaactgctcaaactgtatcgtaccataccatattttcgcagtttagtttttgcggttttaagatctcgcggtgcgattgctgtttgagaaattataaaaactgcatatgcggtttagtttgaaaaaataactacaacacgcaccactcgtaccatgaacacccctacttcttacacacaatgcatgatgtgtaattaatctcaaccgtacaactaaaagtaatatggtcacacttaaaaatataaatagctaatatttattacaaataagtattgtacaatttgagtatgcatctactattactcataaaataatttttgggagaattagtttgcttttaatacatagagaggtatattggtggttgagacttttctaaaaaatatatatatagaggtattttttattttaagcatatgaagaaattaatttttgtttatatagtgatgtatattatagctaaacatttcatattatatgtcttattctgtgaaattccgtattttaatattcacagtttaattatttaattaagtcattaattaaacacggaataaagaaactggtactgaaacagttttttctgtagttacagaatacaactctgtaactccagagaaacccagaaaaataaacagtgcataaaagt

SEQ ID NO: 125942 - DNA, 1219 bp, Cannabis sativa
tctcttgaaaataggtaaataaagtaataatttatatattaaattaataaaataaaaatgactaaattgccccttaaaaatagggaagttgctgatattttccctctattttcgtggattgctaaggctcaattcgtggtctgacttactttccacgtatgaaagttgcacaccaaaattatgttaggataaaagccatcggccatgcacctacagagtgcatgctagccggccatatggtgtccaaaagctggttggcctatgctggccatagggccagccagaggtggtcgaccagttcccttgaggtggctggttcgtcatttcgtcgtccctctcaagtactcaaacccctcgttgtttgaagtgttgaatagatagcttggcctacttgttggcaagctatactcccacgtggcattgatgttggcctagtagacatgctacattaagtggacaaaaatcaaaataacataaataattaaatattttaaaagtttttttaattattttttataatataaaataatttttaattatataaataattataatgaggtggacctataaaaatatgtagtgtacacttatatacacattaacagtccaccttaacactttaacacaccaaaatagacaaaacactaaagaccaccacaaaaccatagtttgaaagattttaccctaaaaaaatttttgtctagaagctagtcctaccaaagttaaaagtataaatagtttagctatgaattactatttttcaaatttaaagttagatttgcctctcacttgagatttgctctaatctccgtccgattattttcccctcctactcaaattcaaaattcagctagctacagttcttccatcgaaatataccaaatttaaagttttttttgttttcttaaaaaacttgagttgcggaaaaaagaaaatccgactccaaacactttttcattaaaggaaaaaaatccgacctaaccttatgccggaattggagcaaagacaaacttcaacccaaatttttatattagtccagctcttatattatagtataaattttaacactatttcatctccagccacactacatatcacactaatttttttcttaacaaataaaaaaaatttcttattatttatattagggataattgcggcaaaagtccccaaaaacttgaggttgatgccgattagtcctcaacctcaaaaattggcg

SEQ ID NO: 125943 - DNA, 2138 bp, Cannabis sativa
ttaagtatagaaatttaaatttctcttatattattcgttattggattaaaatctaataatttaatatttttaaaattaacatttatagttaaattgtttagcaacatcaatgggtaatacccattgaaaaatattccataatttttcataaatatggaaatttttagtgccatttactttattatgacagaacaaattaacttaataagatatggaaaaaaaaaagtaataaatggaaaatatatgggaaaccaaaaagtatataaataagcttaacttaaaaaaacccatattttcaaaaaaaaaaaaaaacaaaatttggatcctctctcttagattttctttgcgatttcctttccgatcttctctcttagaatcgcacgagcagctaaggcgattgaacattatacaattgaatctgcaaatcgatctcaaatgcaagcatcatccacagaaaatcaatctcagaaaccagaaatttcatcgattgaagacagtgcttcagcaacaatcgtcgcctccgatcgtcttctccagctttggtaaattcttcaattgcttctgatcctcttcctcatctgtatgaaccagaaaaataatgctcaaaaaatcgcacaccagaaaatgaaaaaaaaaaccgaattgtacacagaaccaaaactttgacaacaattctcaataaaaaaatattataggtatgtaaactcaataatcaaaattgtatatgctgataactatatacaaacatattatacaagaatatatatatatatatcatctgggaaaaaaatgaaacttggcattttaaagaacatatataaaaaaaataacagattaaaccaatagaaagaatttaaggacaaccgtatgaatacaataatcaaagacataacaggcaaaaacaaaatataacagaacaaaaataaccagttaaaaacttaaattaaacaatgaaacatcaaaattaaatgaaactagttctgaacacaaaattaaaatcagattctaataaaacattttatttaacatcgcaaaaagtaatcaaagttataatagataaaaaaaaaaaaatatatatatatatcaaaaaaaaaaaaaaaccagttaaaaacttacctaaaacattgataaatataatttaaacataactagttccaaataaaaaatataataagattacaatattacttctccataaaacagtaaaaaaaaataatgaaagtcacaaatgacaaaacataatagaaaaaaaaaatcggttaaaaaaatagtcaaaaacttgaatatcagttaaagacagaaacaaacatacaatcataaaattagaaagaaaccagttaaaaacaaaattacgtttatattataataataattttcctttaaaaatgtaaaaaagtaataaaaaaataaatgacaaacaaaaaataaaaaactagttaaaaacgtaaaaccacaacaataacacctataattttaaaaaaaaaaacggttccaataaaaaaattataataagattctaataatattactttttttttctactaaaattgcaagtatggaacaaatcatgtgtgtcatcaaatatagggtcaatggagaaaaaatacaaattatgatgactacacaatgattgaattgtaattccaaccaactcatcactatcaaacttgatggagctgataaaaatagagataaactgcaacagaagcaacatagatatatcctaccagatatcacccggaacaacaccggtaaagctactgactgacaattccctcaagttgtacattgaactaacaaaaacacaggatggaataactgattctgcactatgcatcaaaactatagaagaaatagctatacaaaaaatggaaaattaatcttctaaacaaccaatacaagagtaaaccaagacagtggaggaactggttctacaaatacacaacgaaccattcaaccaacaatctaatattgaaggacaagattcaaattatgataatagtcagataacaattgccccaaacatgttggcaatggctgaacaagttgcaaattttataatagggcaatcaaatgaagcaacaaaaaagagaagggatgaagaaatggagatcatcacagattacatggtgcttgag

SEQ ID NO: 125944 - DNA, 1849 bp, Cannabis sativa
agattgctttgaatgcccgggtgggtataacggatataaagttgtgagttttaattattaattaccttaaatattatattaacaaataatctaacatatgtactaataaaagtatttatttctttttacaatttgggggaaaggctacattccatgtaaaaataaaattattaccgttacaacgagagtggttaataaaattacttgtggtgattgatgagtagaataattgtataagatttttttttctttatttttttatgtttaattcgataacttataaacagttagactaatttaaaatatttgtatactatatttacttagaataatatatatatatacatttatttacattgttatctcaaaaaaaattatttacattattaatttaatttgtagttatataatattaatattcaatttaaataaattaataaaataacaaaaaaaaaagtataaatatagaaaaaataaattctatatcaatatcaaattttaaatatattaactataaggtgtcagttatttgctaataactgacactataaaaatattgtttttaaagtgtcggttagtagctaataaccgacaagagtgttttatgccgttggttaattctctcccaatagtgtcacctggaaaaatgtcaattacgaattttgtcaaaatcgacgttgtatattctgaaaaatttctctaaaacccaaatttctactaaatttttttcgttcacataataaactgagaaaaaaaatgatctaaatgtataatatatcaaatctggtaagaatctattagatctttttacaaaatcagtacctactataattttcaaatagttaagtcatgatattggaatgcatcaactgcagcatgtactatttttttcttactatagtttttatcccattggatttacttggcccgtttggtacacaggattgtattagattggattggattggattggactagataggattatgctgaatccagtaatgtgtttggttatgagttagattggatttttttattgaaaaaaataattttaaaaaacttaatttaataaaatttatattttattggtaaaatataaaattatctatacattaaaatattttctttaaaaggaaaaaaaaatattaaaatattttatatgcagaaaaaataattattattatttaataaatttatttacataatttacttgtatatattaataagattatatatatttaagaacacattccttataagaaaaaaaaaatacaaaaagaataaatccatccaaataatgacgttgatgttgggttttgggagaagagtggtcagtgaggtttatcccacttaatcccatatatattgttgggactacttatcccataggagttggattatttttcggtcaaaggattatttgtccagtcaactattaccaccaaacataggattgaaataatttatcctaaccctagtccctatcccactggccaaacaggcccttaaggtttagggtaattatagtataggcgacgattttaaatcttcgggtataagggcccaataaaaaatcgttacctacttctcgccacatttcccacgtgcccacctacttttttctatttcccacatgcccacctattttttctctatttcccacaccctaaaccgaaaatcttaactctccaaaatcccacccacgctttcgcaccatcaccctcctgtctcgtcgttttcctccctctctcgatctcccgttgttctcatctctctcgtctatcgatctccacccacccctcctcccgtcggtctccctctcctcttcgtcgcatacgtcggaccacca

SEQ ID NO: 125945 - DNA, 752 bp, Cannabis sativa
  modified_base (689)..(701): a, c, t, g, unknown or other
tccttggcctaaataacggatcaatcggtacttgccgaggatgattgtagccggacgaggtggtggtgatggcggcggttgaggaagttgcggttgcggaacccgagcctccatgaccaccatattggtcattgggagaaaaggctttttttggcaaaaccagagacagaccgggacaaagcttaatgaaaggaaagttcaattatatatatagcgtagggctcgtgtaggtttatactttttttgtctttaccaaactaccctttctcttttatttttttaatactattaatttctttcctcttgttcagatcctatttttctggactatttttcttttttttggtctgtgtttgtttcatgttcgagaataatgtaacaaatttacgtttagtttactaataataagtgtaatcaaaatcgaaataaactaatgataaaatgaaaaagaataaaatatagaataaataccttaggccatctctaatcggactctaaaacacaaaacatagtgtagtttcacgatatatttactctaatggaacactaaaatcatactcataaatagctttgtctacaatgtttcaccaaatttagtgggggcactataaactacactatttttttaaaagaaattttttaataattaaataataattttaagaggaaaaactaaataattatatatnnnnnnnnnnnnnatattcttattatattaataaaataataaagtataaaatttggtgtaattt

SEQ ID NO: 125946 - DNA, 1225 bp, Cannabis sativa
actaggttttgtattttctattttaaccctttgaagaagctcagttatgtacttactttggaacaagtatattccagtgttgtccctgtaaatttcaatacccaagaagtattgtaatagtcccaaatactttaaagagaaagttctattgagcttggtgatgaaagtgttaatttggcttggataacttcctattgtcactataaacttcaatgcccaggaagtattgtaatagtctcagatcttttagagataaagttatgttaagcttggtgatgaaagtgttaatttggcttggacaacttcctgtaacaactatatcatcaacataaaaaaagagtcatgatgacaaactttgagtatttaagtgttaagaaagatgaatcaaccttggaatttttgaaaccccactgaataagtgttatccttagctgctcataccagatccttgaagcctgttttaaaccataaatatacttgtgcaatttgcacacatgatgtggtttttgagtgtcttcaaagtaaggggctgtatcataaagacattttcatcaagcactccattgaggaatgcattgtttatgtcaacttgtctcacttcccagtcataagcagcaactaaggtaaggactaatcgcactattgtagccttaacatttgggctaaaggtttcaccaaattcaaggccaggtctttgagggaaacctttggccaataaacgtgctttaagtctttgaaggtttccatgagcattgcatttttctttgggcacccatttgcaccgaacaacattaatggcatatgttctgggaacaagagtccaggtgcacaatttcgaataagtgctgcaatttcatctgacattgcatgatgccacccctcatattgaagggtcgtggctactgaagctggaagagaattgagactggccaataaaagtgtaaggttttaagatgtcggccttacccctagtgatcatgggatgagtgacttgaagtggagcagggacactactagtaacaggactctcatgggatttaggaagagatgagggagaagcaataatgacttctgtaggatcaacagtaggaaaagaaataggggagctaatagtggagaaagagtcacttacaaaggcagttggtgaggctggggttggtgatgctacaacaacacttggagatggtgtaggagtaagggaagaagaagacaaagaaacaataag

SEQ ID NO: 125947 - DNA, 1685 bp, Cannabis sativa
aaggtccaccagccaaaacttaaacaagaggcctaaggctgactccgtcttccaaaggatgggacccaggcctggaaatgacctttaaaatgacttaaattgaagaagaggaaattgggacgaacattttgtcccctcgcataataatcagcctattaacatggataactacatcccacagaaagagataacttcgtacccttcaaattcccaagggaccaacaagtgacacagatcggtcaacaagtaggccaagttgatctagggttacaagctcaattgtatcaacttaagagcctaatataaagcctgaccgccccaaaactcactgacctataacacaatcagatgagaggttcaccatttattgcatagatcaatgccttagacctaccgaccaagtttagaatgccaacttggaagatgtataccaggaaggatgatccattgtctcacattaagtactttgagatgcaaacagacttgcaaggagtaaagggcgacattaggtgttgaatttttccaacaacattagtagaggcttcccataagtggtactttaagctaacttctagaacgcccttgtctcagagttctacacccaattctcctcctctcaaaaactcctcgctcacctagaagacctggtaaaagtgaagcgaataccaagagagcctccaaaagattatatcagtcgattcatgactgaggcaacaaaggtgaaggggcttaccgaagaggtaagattagtcgcagtgctaggagatatcaagcccagaggtgaggtatggaaagatataaataggcttactacaggttcaatggaagaatttctggatcgagcgtatggatttataaagctcgaagaatcagccaggcaagtggacaatgtcgggcagagcaaagtcaacccgagtcacaaaccctccacaattatatcccatacatccattcagcctaaccagaccttccagccttaaactatcaagaacaacaataatggtagtaaaaggtctaataacgagaataaccaaaataatgggaagaaggggaagtataatgtcgatcagtgaaacccccaagaaaaaccttcaaagttcactaccttcactattctcaccaatgctcgggagaccgtctttattgaaacctagtcagttgtaccgtacaagagatctcctccaatcaagaaagatatgagcaagagggataccaccaagtactaccaatttcacaaagattttagccacgttgctaatgagtgcaacaacctgaaggaggaaattaaattcctcattagaaaaaataatatgcagatacatcggtatattaagaccgaccgtgattgttcaaaaggccacccaatagaacaataaccagaattacttgatgcccccaccagtggacaggcatttacaaatgataattgggcccccacaaattgctatagacttgagaaaagtaagagagatatgctcagaccatccagtatgaacaaaaagatgaagaagtattggtcgtggaagaatgaaagccaaaacagccgcacaaagatgaaacaattgtatcattcagtgaggaagatgatgctcgtgttgtctacactcataacaaccctctggtcatcgagtgcagaatgccaacatgatagtggctcggtccatgattgacaaatgggcaaaaat

SEQ ID NO: 125948 - DNA, 1626 bp, Cannabis sativa
cttaggtgactcagaatgcatgccacagaccttgtgcctagagtaataagctttggcgtcacttagatctactttacacccctcaacctggcaccggggaggttggcccgaatggaccgggctccccctgaccttcttcggcggggtggctccggaacacgaggacgacccagcaccggatttgggtgtagctccgatacccacatcttcaaagtaaattttctggccgaattttaagccgttgagtgactcagtagacgagttgggcggcgaggaagacgaagagccccctgactctgtcattgagctggaacccatttccatgagcgacctctaaagcccattcatgaaacttcccgaggtcatgaatacatttttttcttttttttttttctcttttggctctgctatgttacagaaaagagagagagagaagaagaagagatgaatggtgaatgtggggagcaagagggagggtttactattgaaaagtagacacctgacagtggcccatgccagctttgagggtctgtgtgatgtgagtaataagaggtgtatatttttgtgtgcgtatatatatttgtatatatgtttatgtgagcgtatgtgtatatatttgtgtatggtacggtgtccaagacgaaagagagaagaagagtggttgtatgaaagaagaaaaaggaagagaagagagagaaaagagaagtacttatagagaggttcagaggcagctttaagaagctcttttctctctctctctcactatcaccaaacccaactcaaccgtcgttttacaaaacaatttcggtttaatttttctctctgtgaagtctctctaaaaggtaattctccttttttttgccagatatgtgtgggtgcccatatgcctgatgcatggggcacattattttggactcacttctcttctcttcttattaccctcattatgtctaaaatacccctttcttttttctctctttgctatgtaaaaaactaggaaagatttggtactattttttttctatttttttttaatatcatattaagattgaatcaaaataaaattagggtaatttaaagtataccattttaaaagaattcattcaatatacctttttatgttttggtacttttttaatctattttttatgatcacgaatattagtaatttcttaagaccatttataaatttttaaataattttgaatagtttataatgttaaaaataaaatttaaatattttattgcatgtttgtgtttttttacacaagtggtaaacagcttgttatatccgaaattcggctaacactttagaggagaacacgtgtcaaactaggagaatacaaactaacaaatataatgatatttatatttgaaaatagaataacttattaaatgcggaactgacagagtatgtttacaacttgctgactgtaaggtcttacgcaagataaaaaatatacaaattgttgcctcatacattaatgagaaaccatacaacactattgtgcaaggcgaggcattcgctacgcatgaagagacataataactgttaagacacttaacgtataatacacattatacaaacaaagtataacagtcgagtaaatccaaacaactaatagc

SEQ ID NO: 125949 - DNA, 827 bp, Cannabis sativa
gtgattctaaggtaagcactaactctagttcttctttgattttagtatgttttgtttaggcttaaacatgcaattcgttgatttagttgttgtttaggttagatgagttttgttgtagttttttgaggttattttaaggttgtctaagcttgtttgattggaatttgatgattgagtgtagtgttgagcaagtttgagtttaagaactcaaacttggtttaataatggtgatttttgaattactatgtttgtatagattctattgcttatttttggtctattatgacgtgaataggtgctttggacagtttggagaagtttagaaattaaatggttgagatgtggggttttggcctatttctgctgtagaaacacatgtcatttttgagaaaacggcctatcgttttaccaggcaaaaaaatctaaaaaaacaacctcccatttttatagtgggggattgccatttttttgggtacttttttccgaaattctatttttcaacgttttctcaatatttaggttttaatcacgctatttatcgatagaaaaacttttagtttcaagtttaagttgccaaaaagtagtttagtatatcgcttattagttttgcgtatgttatgacttaggggcttgtaaaccgtcgagtaacagttccactcaggttgaccggcacacctgaattcgaaatcggggtaagattagcataatgatatgcatatgtgattacaagtttagcgtgcatgattatgattgcttgttagattacattgaaatagcagtatcagtatacatagagttatattagatactgatgaatgtatgtttgg

SEQ ID NO: 125950 - DNA, 1042 bp, Cannabis sativa
ttgaaaaatataatatagcactatatgtatctacatgtgctataatagctatctcctcatgatttcaaagtgggcacaatgtttacttttcatttttcactagtactgcatccatatatatctctttcatcaaaccctaacattccatctatatatattattgaaaattttggtagtagatgtaagtggttgttttgatagatcttttatttattttggtattgagaaaaaattgttattctaattttttttcatgattctatacgttgtagttatttaagattatttgtaaatttttacaaaattctgaatagtttacagtactagaaaattaggtttaaatagctacttactatgcgggtaagaaaaaatagttacacatgcaataaaatatgtaaaaaaaaaattggcattgtaaactatttaatttttttttaatatttacaagtaattctaaatagctataacgtacgcaatcataaaagaatattgactaaaaaatattttcgaaatagataaaaaatttactgaatacccttttaagagagtgtattgtaattccaccctatattatatacataaaaatatacagtacatataaacccgaaggttagtattttgattagcttcttatctattttaatatatataaaagttctttaatatttttttatagtcatgtattatttaatattattcgtaaatatttaaaaaattattctaaataatttataagatcaaaaattaaagttcaaatattttattaaatactcaatttacccttacatataaacactgatttaaaattaagtgtatattacactgtctttaattaaaagagtattgctattaggtaccagtggtgcttagtaccttctcgatatgccgcgttgtgattggctagcgatactccctaaaaactattatattaaattatatggaaccttacttaattggaccaatagcaatattaacacacaggaaatgctagcaccagggccggtcctaaagtatatggggcctaaggcgaaattaaattttg

SEQ ID NO: 125951 - DNA, 692 bp, Cannabis sativa
acgtaattataaatatatgtattattgcagatcataaataaagacaaggtggaagaaggagagggggaagaagggaagggatatgtgatcagagaggggatagtcattgttcctcgaaatgcaatcattccacatcacaccattctctgacacatcaaaataataacacttttccttttcaattataccttcttcattcattcattctcctttttgtaacattattcattttcaattctgcctttcaaataaaaaaataaaaaatctttatatacatatttgggaaaatttgtgacagcattcacccattaattaccacttttatttataataaagcaagccaataattaaaagtaattgggtttatttgagatgagaataaccaggccagggcatctatcaaccaaaccaaatgagtgcaacaattttttttagatagaaacagagatataaaccataacattcaatagaatcaatagcaaaacacatttttcttaacaaaaaaaaaattaaattaagaattgttttcagttatttttatatagttttatttattttatatattttttcttgaaaaagattcattttatttaatttaaaatctatttataattatgaataaatgtattaaattcaagaaataaataattatcaattctaatttaatactaggaaaaatatacttaacttga

SEQ ID NO: 125952 - DNA, 1983 bp, Cannabis sativa
aaaccaagacaagccttactttgtgaattgttttctgcttatcattcctcaaacactgatgtaatcccttcttgtacttcaaatgatattaataaaaaggctaatgattcctcttatgtgtctagtagtccctctctttttcactctgcagttagtaaacatataaatacttggcattgcaaattgggtcatcccaatgctcaagtaatgagcaaattattacctcatatttcccacactggaactatcaaagatctgcatttttgtaatgcttgtcaacagggaaaaagtcattctcttccctttcctccatcccatacccgagcctctcaacctcttgccttgattcacactgatttgtgggggccctctcatgttctttccaaagatggatacaagtattatgtccatttcttggatgactacagtcggtatacatggatatttccacttactcttaaaggacaagcatttgatgtttttattaaatggaaggctttagtagagaagcagttcaatctcccaatcaaggctgttcaagccgactggggtggggaatacaggccatttaaaagattcttacttgaccaaggaattcattttcaaaatccttgtcctcacactcatgagcaaaacggtcgtgctgaacggaaacatcggcatattaatgaaactggtcttactcttttggctaatgctggccttgatctatcctattggtggcatgcttttagttcggctgtttttacaataaatagacttcctacaagagttcttgattttgccactccctatgaaactttgttttacacaaagccagattacaacatccttaagccctttggctgtgcttgctttcctcacttaagaccatataataagcacaaattggattttagaactcaccaatgcattttcctaggctattcctctcatcataaaggatacctatgtgaaaataatgaaggaaggatctttgttgcccgaaatgtagtattcaatgaggatttttatcctcacaagactgcctctacatccaattcagtaccacaccaccaggtattgtccactgatcctacttctatatctactttttcatcttttaatactcagcctaatataaatactaatattggttttcccaatggtcacaacaatgatgctgagtgtacatatggtggaccacggcctgctcaacaaaggactgaaaatgacactacaatacctgccacggtcactgttcaacctgctattgatgttccccatacccatgatatgtcacatcctacctatgatatatcacaacataatgagaataatgcaggccattctccaactgcccgtttacccgatgtctcatgcacaaatcctacccctactattgctatgaataatgatcatttgactcatcacatccatcctcccactttaacatccgatactccttcatctcagcaaaccagtcctcatataccacaaccagcagcctcatatcctcccatattaccaaatcctaccccacagcccacaaattcttccacaagaattcatcctatggtcacacgctctcaacatggcatctacaaacccaaagcttatatggccactaaacacccacttccagaatcccttctacccactgaacctaaatctttaaaagcagccctcaccaaccctcaatggtttgcctccatgaatactgagtatacagccctcaagaaacaaggcacttggacccttgttcctcttgaacctcacatgaatattcttagcaataaatgggttcatcgggtaaaactaaacagagatggttctttggacaggtacaagtctaggttggttgccaaagggtatcttcaaactcctggtatagactatgaagacacattcagccccgtggttaaaccagccactgttcggattgtgttgagcattgctgtcactcaaagatggttagtcaaacagttggatgtgagtaatgca

SEQ ID NO: 125953 - DNA, 1831 bp, Cannabis sativa
gggcataaaacccaacagtgtcaaagaatgatgaggtgttggtggtccctgctaacgatattactggtaatattggcacacatgggaatttggatttaaatatttcctctaaaaatgttgttacagattcgcctactcctaattttgccttggtcgtgggcccaaatgatgatactgagcttatcccaaatattgggccctccgtggttcaatgtttggatattccccatatttggtcttgccgctcccagaggccacaccatttccctgagctcataaattttaaatggcccagtaatgattctcaactacaaaagatatattgtgaccttttgggccctgatcatactaatctttacaaggcccaaccatctctaatttctaaccctccaagtctttctgatttgattgtccatttactgggttcaaaaaaaaaaggaaggcccatacttggtatattccaatccttgagagatacgaagactcaccttttactgatgatgtcaatattgctttggattcgctgaacaacgaatttacatctaagaagctagataatgtgaatggggaggagattacggttgaagctttttagccaagctcgagtaaggatcatgaggagtcgagtgctaagggtagaaggaagaagcgtgcgtgtttgggtggtatcagatcgataagtccacgtaattcaggggtgaaaactagaagaagtaagaagcaggttgacgatgacaatggggctaactcaggtaatctcaatcaattattggctcaatgtattgagttaccaattatgtttgtgcaaattttggaaatggcgaggaggcagccagtttcatgcccccacctgtgccatgaggtgcctatcttggaattgtcgcggtcttcgcagaacggcagtggaaagagccttgagaggcttctctcatggcgatgggatagatgtgatttttcttgtgaaaactaaagtggatgagttgtcgatggttagaattacttgccatcttggttttacaaatgttagtcgtattccttcacaaagtattgttggtggcttctgtgtcgcttggagaaatgatttctccctacagattcaaaacattttcagttctgggtttgaatgcttgattgatcctgggaacagaggtaagccatggactctgttctgcatttacgtcgacactccttatggtaatgagaagcacgccttttggtactggttttcaggtttagtgcaaaggtgtaatacaccatgggtggttttggagatctcaatgtcatcttgaatgctcaagaaaaagagaggggtcatttgtttgacttctctgagggggcttttctccaaaatttcttggctgagactgggggcgtggatctgggttacattgggccttgtttcacttggatgaaggctcgaaactctctacatactgtcaagaaaagattggatagagcggttgcttgcacttattggtgtattcatttccctcaggcgggagtcacacaccatcctatttttgcctcagattatgcacctttaatcctggatacaagctttaagcttctctttaggcaaagtctttgtcaacatatcagaaccattctcactagtatgtaccttttctaagttcaaatctttcatctcaagcacatcacgaatccaatgatatctaacatcaatatgcttgatcttgaagggaatgttgaactcttggagaggtgaatggaactctgactgtcacagtaaacaatgtatctttcttgttgcaagcccaactcttgtaggaactttttcatccataaagcttctttacaagcttcagttaca

SEQ ID NO: 125954 - DNA, 1532 bp, Cannabis sativa
  modified_base (465)..(466): a, c, t, g, unknown or other
taaaattattaaaaattaagcttactgtcctatttgtacaattttagaaaatatagggtctatttagtcatttaataaaatagagaatcaaattggtaatttttacaaaacaaagaacccaaaatggtatttatataatgcaattaataggtggagtagtagggatgcacacgaggcaggaaatgggcagggagtgctccccccgtccccatccccgttaagaattttaatccccatccccgatggggaagcggagaatcccttaataggggtatggacggggcgaaaaatctcctaataggaaaataaagttataataaaatttttaatatacaaaaatattaaaatacataaaaattaaaatattacacattaattattattcaataaactaatttttatccaaacacaacttaaaattcataaaaaagatactaatatactaaaaaaatacaaacataaatnntaaaatataaaatattactaaaaaatataagataaaatattaaacgaatcctgtcggggcagggagtgtgatcttcgtccccgcccccgtttaacattcggggacaaaaagtaattcttgtccctgtcccgttccccacttaaacgggaaatcaccgcccctaatccccgcggggccattcccgtgggagaaatttgcatccctatattcgtatgaagtaatttgccttcattaatgtaatatatatgatcaagatttgtgtagtaaataaaataaaataatttttataatcctatatgtttgagtcaactgaagtttaatatatttatatttctagatcaaaggattggagctcgacctccaatatggccacatctaatcaagtaaagtaatttgtaaaataactcctaaatattttataattaaatgatgttaatgtattaactatgccattatcaaaaaaaaaaaaaaaaaaaactatgccagaatttcagggtcaacaaatttaattaacctattaacctatctagtttattttaggaaagactgttttttttttttttttaaatagctataaagtaaaatataattaaagtagaatccttcaaatagtaatccaaatctaacaaactgtattattaaaatatattacatacaaaatataaaagtgtatcattatatataactcactgtatcgaaaatatctttggatcacaccttataaaattgttttgttattttattataataaaattgttttacaagtaaggacagagacaataaattttctatatcaatcatatgaaaaaattgacgtgacaacatatactataatacacaataaattagtgattattattttgtataggtttttttttttttttttagaacaaattattttgtatagttaaacaatggtgtataactgtatgtatgtatacatatatatgagatactgacaaagtgacaatgctcatacatactttccttaggctatgtttggtaggaaagagagagaattagatggatggagagttgatgaagagaggagagtaataatcctttt

SEQ ID NO: 125955 - DNA, 1315 bp, Cannabis sativa
ataagtaaatctgattatgttgaaatgagttttatttagggcataaaacccaaccccactaattacaattttaaaattttattcaacaatttatcttttctttcactaatgccatatttttcaatttcaatcccataaatgtcaaaactatttatttaataattataattgattatcaaataaaattatcatttaacttatttattaattagaccttacaaagtgtaaagaccgcttatgattaatactttgaattatttaattagggtttatgcatgagattaattgttatttataatattgcaagttggtgaaaattaattaatttcaatatatgttaaaaatgctatatgtgaaatcctcgttgctctgtaatgtctttggaagcagtggaaagagatgttgggccagtagagtcactttttctgtggtatagaatggatttaatatcggagtattattgttaggtttcggtattatcggtaattttggtcggaagtttggtttgaccattttgcccttgttgagcatggttacttttgtttatactttaagggtatactagtctttcaccttggggtttttgtctttatgtgaggatattagtagttgtaggtaattttaatattaataagaataagggttatattttttttagaaaataacctagaattacatggtccccacccatcctcttctctctctctctcgaagcatcaagaacccagcctagggttggattttgttaacctatttcagagaattatttcttaattgtgtgtgtgataatccaaggtaccactcttaagactcttcttttgatttttcataaagttcaagtttggtttgtatggaatcttagaattttagttgttgtttgtttagggctgttcaattttgtaatctgaggttaagtagtgaatatttattctgttctaagcctaatttgatgatggttgtgttgtttgaatcaagtaggagcttaagagctcacattggagctctaatggtgattccatgatttgagttgtttattatattttgatgattgaaatgtgttatttggggtataagcaggtatactggaagttcttagaaagtttgggattgatttgaatcaagggggttgatttttgggttcccagcacagaattggtcgaccggttctgggagaccattagaatcggtcgaccggttggtgcccaggaagcaggcttgcggttgggaaccagtctgccggttggggctttttctcgaaccctagtttttcccgttttgtgttgtttagggtatttgcatcctatttatcgatagg

SEQ ID NO: 125956 - DNA, 1241 bp, Cannabis sativa
tatgtataaataatatgtaatatacatgttgtatatgttgtgtgtgatatatgttgtatatattgcaatgtttccttaagtactatatatatacactgagtactaacgttcacaatgaacgttgctcttaattttttagaagaaagtggatctagatgctaataaataggaatacaacacactttaaatatattactaagtccaaaactgtaaaagccacgttagccacgtttcttcctttgaaatatattatattcatatagttataacttacaacacttcaaaaggtggctttcctataagaataggttttggtaaatgattaattagataaacggctatttgaaaagcatcagactaatatttaaatggcatagtggcttgagcaaggagagtgattccagtctccactacatgcctgagttacgctcttccctacaattttgttcagaggtatgaaggcaagagtgctgaaagaagatgccatgttcattgactaattgagtaaatgattaaaactcaccaccccaatcagttgttaactgcttaattttcctctcaaattaattttcaacatcgttttgctgtgttcattgactaattgagtgaatgattgaaactcaccaccccaatcagttcttaactgtttaattttcctctcaaattgattttcaacaagatttttaaactgtataaaagcaaccaaggaatcagacttttgtttaagtacatcatttagatccaaagtcttgccaaatgtgagtttaagaataacttctcctttaccaagaacttgagcagttcgagaaccaccaagatacacatgttcttttccatcccctagaggaaaatacatctttgttagcacaaatatgtctggtattgccagagtctaccacccattctttcacattggctacaagataagcttcagaaaagactgcaacaataatatcatctccttctaccaaatttgcatttggtttaggaaaattgtcatttctcactctttttctacactgaggtgcatgatgacctgactttccacagacaaaacaactccctttttcttaaaggtagtggtgacatgatttgttggcataccttttattttaattttgagtttataccgaattcgcctttgctgccatttctctcgcttcggtagcttggagttccttccagttagcatattcaataatgatgtgagtaatcagatctgcaagggacagctgcttatg

SEQ ID NO: 125957 - DNA, 1170 bp, Cannabis sativa
  modified_base (26)..(40): a, c, t, g, unknown or other
tgtttaggatgttaaaaacatacttnnnnnnnnnnnnnnntcctggtaaaatatatttcaacaactcactagttctttatctgtatcacattgttctcacaattgtaatattgaagagagtcatagctagaaatcacaaggttttaacctgtaatatagtattatctcaatagtgaatacaactaaaagtggagtaggtcattactcactaatcaaggtggccgaacctctataaatcgatgtgtcaattttaccatttgttactattatttacccatggtgattgccagtcatgaaaaaggcttcgttgtcaattgaccaaattttgagttaatattttggcgctttcattgagagccttctttaattccttcatctcgttctgatcaatcaccatggttctagccagaagaacgaccccttcaaatcctcctcaggatcctatgatggtagattccaatgtttgtgttcctcccaccatagaaggtcctattaattcagataacactgtcaatctagccaatcttgcaaattctgttgatcaagccattcctccaagactgggacaactcacaagttctcatgcagaagagaaaatcaacatggaacaacctccacataacacaaatggggttattccacagtgctacgcacgaaaaataaggccaggaattggcaaaccagttattggtgagcttcacttggccctgcgaagttgatattgagctagccaggctcagagaagttggtgagcctcaccatgtgctgctaatcagtttgctttttttaatctcatattgttttgcttattttttatgctatataaaagtaaattttaatttttcttttccatgtttattaaaagtgccctaaattgattttaggaattttgtgatttttcaaaaataaaataaagttataaagaaaatttagaaaaactataatatttttttaagaaaaaaaaaaacaagtgcattaaattaaaagagaacaatgaggtccatctagacatacaacatcacttagaagaaccaaggtaaggacgtaaggtaatgtaaaaactaggaataattagaagaaacactaatttttgtaaaaaaaaaaaaaaattacatttttacttttaaagatttttttttttttacatttttacggtaatttataaaaaca

SEQ ID NO: 125958 - DNA, 1049 bp, Cannabis sativa
taaaaactaataggagcgtttggccaaatctcttaaaaataattttttgaaattaagtttgaaaaaactaaaaaacagaaaatataaaaatattgttttttattttcattttttttttgtctaacaatccaataaaagaaaaaaaaaaaaaagagtatctcatcttacatgaaatagacataatattcttccaaaactatactcttaacaaaaccatagaaaaagtgctaatcttttggcattattaatgttattgtaagtctaaaatatattccttaaagtattttggtagattttttatctgatttagtttgagaaacttataaaaatactgaaatttgggttaatttttataaaaatattgtcacacagaatttttttcaaaaatactgtagttttataaaacaccagtaaaacacaaagtagaacaactcaaaataaaaaacaccagtgaaaacttaacacaatatactgcaatatgaaacttataaaaaaacacagtaaaaaataccaccttacagtatttttataaaaaattaagaaaagttattatactatgtaaatttccctttagtttttataaaaaaaatttaatctaatttaatatatggtagtatatattataatattatttcaaaaaatttacagaaagttttaaaataagtgtgcaattatgaaaaaaaatttaaactataaacgtattgtaaataccgaaacttttgggtctattacataaatttttaaaacttttggcattattattgtaaatgttttggcagtgtaaacaaactgccgaccttgcatgtatgccacgtgtcatgagaagagaagaatgaacggtgatgatcaaatttgaatcgtatgaatagaaacaaaagcaaaagtagtaaaaatgaggcgtgatctttatggctacctgcacctgcaatagccggtcaccatcttatttattatttattattttaaattaaataaatgcaaagtcttttttttttttgaaaaatgaaaaaaaaaaaaagactttacatttatttaatttaaaataataa

SEQ ID NO: 125959 - DNA, 552 bp, Cannabis sativa
tgattaggatatgatgattccaaatatgccactcagattctttcaagagtttgagcttttttgtgttttgaactactgcatcaggtacctgatattgctgttgagcctgttgataatctcagtactctaacaagcaattgccagtttgcacttctggacttggctaattctcattatgctgcgatttgtatgcaaacagctaaacacattgaaggtagagtttttcattttatcatatgttcgagtatttgacaaagaacattgctagtttgtaggttaaaataacaattttatgtatctctatatgcagggaatccaatgaatgtgatagtaaggagaacaattccacttgtagaagatgaagaaatcactcaattgtaatgattggtgaattgacttgattatttggatgatcatattcattagacacatggtagagcatctcaaataaatatacttattgcaaagttataatatagcttagagcacttcacttctttattctatcctttaaaatatatcaccaaaactttattttttttttattatttt

SEQ ID NO: 125960 - DNA, 747 bp, Cannabis sativa
ataccatgatgaggacacttcctagtgagatccttgaacctctcccaagcctcatggagagattcattatccagctgacataaattattaatttctccttgaagcttaggagactatgctagaagaaagaactaatacagaaagttcgttgccaaattagtcaatgttactatagaattcggtgggaaggagatcaaacaactcttggctcgctctctcaacgagaatggaaaaattctcaagcggatggcatcatcactaactccattgactttgaaagtctgacataactccatgaagtttaacaagtgcagattggggtctttaaatgggagtccaccaaactagactaaggattgcaccatttggagtatggcaggctttatttcaaagttgttagcatctatagcgggtggtcttatacaagattggaccctcgtaagagttggaagaatgtaatctctcaaactgaggccatttgcctgatcttcaacgacacatccattattatcattgttgcctccattgttatcgccattaggattctcagccatgatttcttctgtttcagcagttgctgaaactctttcttgtctcttgtttcttctgtttctcttacaagtcttctcaatttaagaatcaaccagcaaaatgacaccttgtccttgacgtcacatacaccttcaattactgaaatagacaaagacaatattgaaagaaactggttagcaattagcaagaaaaata

SEQ ID NO: 125961 - DNA, 1386 bp, Cannabis sativa
  modified_base (752)..(752): a, c, t, g, unknown or other
atcaacgtcgatgttccttctaggttcttggagtatgctcgtttgttctcctcatgcgtagttccaggggccgtccgttcgtatggtttcctcagcagccgcatcaacgtcgactgtttgactggttcttcagtgtcgtcggttcgactggtttctacagaggccgtccgttcgtgtggtttcctcagcagtcgcaagtttgaaagtttggaagcatcccatgttgtccttacattgcagcaatcaaagtttctggttttagatttttcagcggtttgaaagcattacaatacaggtcgggtcttgtcgtattacatggcttctttgtttttctggttacatgtttctctgttaatggtcaggtgttagggttgtttgtgttaggcaggcggtttcttgtttgtcgggttcttgggggttgggttcttggttgtcgggttcttggttgttggagttttggttgacgagtttttttgttttcttggttgtggaggggctattttttgtggctggccggttattgtgggtgtggtgtgggggttgtgtgtgttggttcttcgttcataaatatggcatcgacaagttggcacaatggcgatacagaggaagacatattgcagtttcagattgaggaggaggatcttgaggaggttgccgtgattacagggggaggagatgatggaattgatgacagatggtgtttggttagaaggtttttgtctaatcgggtgattgattttgagaagatgcanaatattttggcttcattatggcagctaggtatgggcatgtttgtcaaacagttggagaataataagtttcttttccaattttatcatgaagtagatattcaaagggtcatcaatgggagtccctggacctatgataggatgcagttgattatagagcggttaaaggttggtgggaatccgaaggcattaccgttgaacactcttgacatctgcgttcaactccatgatatggagcctggatgtatgtctcaagttactgttgctaaggtgggtaatactatggggaagtatatagagtctgatccaaaaaactttataggagtatggagagatttccttcgcatcagggttactttgaatattgataaaccattacgcaggcgaatgaagctaacgaaggatgatgggaactggttctggattaattttaagtatgaaagggccccaactttctgtttcatttgtggtataattgggcactcggaaaggttctgtcataagttgtttcattagccaattgagcaaatagtgaagccatatggtgaatttatgagggcctttccccaacgatctcacaagaatattggttctcgatggctcagaaccagggggtggagccccccgacggaggttg

SEQ ID NO: 125962 - DNA, 1068 bp, Cannabis sativa
ctaaggagtggcaagcatctgaaaaattctgaggaggaaataaagggtagtggggagcccacttcaatctaaatcgacgaaaaattgagtaacaaaactacccagtcaaccctcactcaactcagccgcatccttcaccaacgcaacccaacactaacccgtgcaccatcaaaacactcacattcaacccaactacagacacatacacccaaaagcgcacaacagaaatccaacctcagcacctataaccaccatctccgaagcacatccagcccactctccaagctcaaacgaagccagctgactacattgatcactccacacttcctggtttgtcaaaattgagcttttgatttttaattttgtatttggacaatttcttggttgtcgtatatagtgtttatgtgtggatgttgcgatttggataatactgatatttttgaaattgttgggagggttctgaatgattggagtaatgttgggaaatttttggatgtgattttttgtgtgttcaaaagggtgtcgtgataaataggtgctgattgttggtgtggtttttgaacaatgggttgcttgctgtgattatttgggtgaattggaaattgttgtagtgttggaagtgatgaaagcttgaacagattggtggtgttggataaattggatattgaatgatttatacagggaaagttatcatggccgagtgatacatggagtgtgtgtgtaatgtgtaaaaatctgatttagtgtatagtgtaagaattttggtgtgaatgctttgaaagtgatttagtgtggtttggtcagattgggggatttttgagcaagattggatcattgctagagtattgtattgttggaattaggggtgtggtgctgaatagttgtaaagaagacaaagcagagaagaaatttgttgtgttggggtagtgtgcaagtgaaaaagaagagaaaatgacgaatgtcaagagggttgccaacagaaaaaaaaaaaacagaaatcacttcatgaaattccaaaatttcattgcaaggcagccgagacaaagtattacgataaggtggacaatc

SEQ ID NO: 125963 - DNA, 1469 bp, Cannabis sativa
tattcttaaagctagatattttaaattcaatactttcttagatgctaaaaaagggcattctccttcctttacttggaatagcttactttggggaagagatctcctcgtgaaatggcttatttggaaagttggggatggtagtaccattcgtactcttcatgatatttggatcccaattgtgaaataccttagatataagggtgatcatcctccttctaaagacagagtcagcttctttattaatcaaaattcccaatgggaccttgacaaattaactcagttttttgacagtgacattgttgataatattcttcaagttgcaattggaggtaatgatagatttgataaacttatttggagtggataatcttcaggcatgtattgtcaaatctgcttaccatttagcaaatgctggttctgttcctcccttatcttcaaatattatgaacatgacacattggtggaaaaaattctggaatttaaacctccccccaaaagttaaaatttttggttagagagttttttttaacacattcttccaactacttctaatcttttttccaaaaaagctcttcctactccatcttgcttttttttttttttttgtaacaacttaaatgaataaattttccatgcacttttagagttccaaggcgagacaggtatggaaatactcccctttaaagcagttttattcttaaaataaatacaaagatattaaagattttattctatctggttttgctgatctaactaagaatgattttatgttgctgctgtgtcatttatgggcattatgggaaaacagaaataaaaagattttcggtaaatctcacatgtctgcctttgatttagtcaattggagagttaggtacttgatggattatcaggaagctcaacttaagaaggtggcaagacataaagtgaccaacaatcacatccttcatcatgataagcatgtcacaaaagggttttatcaactttttacaggtgctaccattaactttgctgatgggaagcttggtttaggagttgttattaatgactggaagggttttgttattgctgggttgtcaatacctataacagcaaaggtaaaccctttattagcagaagctttagcccttagagcagggttactttggtgccagaatgtacattttccacttgcaaaagttgtttcagattctcaactactggtgggtaaggtgaattcgaagaagatggatcttttagccatttcggatgttgttcaagatattagatgctctttgtctactttccctactgttgtactaatttttttgcccagaagtttcaatgttcatgctcatgatatggctaaggcaacactagggcttgagaaggagcaaatctggcgagacatatctctagattactgttgtaacatgaactgattgcctcatttgttgttacattcctcaaaaaaaaaaaaaactattgtttat

SEQ ID NO: 125964 - DNA, 1189 bp, Cannabis sativa
tgtttcacttgtttcttcctaaaaacccaatctccatagttcataggcttgtagacaaagtcccatgaagctagatgcatcttactagtattacctctcgcaccccacaaaaagtctttgcagagtttgtcaacattattaactactttctgcggcagcataaagatactcatccaataacaacaaatgcttaacaacactgattgaatcaattgtactcttcttgcaaaaaagagatgcttacttgccaagctgtgaatcttcaattgaatcttattaagaaagtgtttacaatctactatttttcatttagttagtcttattgtcacaccaagatacttaagagaaatgaccctcttcataaggggctagatccctgctaaccagtttacatgcttcatcaacccgccaaaatagatataaaacttgttcgggttagcataaggggtaaaaatcttagtatttattttttcttctaaaaggggatgtccataaacaattttgagcccgtagttctagccctatattaggggctttaacgccggataatcatcaagcccaatgggctcacaaaagtatagttaggcccattaggccaattactggcaccttttgagctcacaaatttgtattttactcaatacctttgttttgtttttgttaaaaccatttttttttagaatctagcacttacttttttaatgttttcaagtgtattcatctataaaaagtgttatttaaaaaaaaaaatctatgaaaagtagattatccaatccataaataaataaaaagaccttaattaagaaaccactcacacaaatactataaaacttttatgaaaaaattgtaaaaatgaattattttctaagactttttatttacatattaaattaatatttaattgttacagggtttctctgtggtatctatataattaaaaagaaattgtgttacaagtgtacatattgtttcaactcatatgaaaagtttcaaaatttatttattttttttaaaaggaaatatttcataattgataagcattaagcagctttaaaaagtttttatagttgtttaaaataataaataataaaatgtttctcaatggaatcttcaaggatcttttgttttataaaataaataaataaaatgttgataagagaatctttaaaggatgttcttaaggatctac

SEQ ID NO: 125965 - DNA, 1065 bp, Cannabis sativa
ctgaatcgaagaagcttacttgtctcccaaatttctctcaagcgaatcttcaccagctttgtctaagtggttgtacaagtttagttaaccttcccccgttaagatttaacaacactcatgatccagatgaagaatcttatgtgatgcactgttataattctttgatggttagaattataaacgaaagagattttcaatattctggcactgatggctatgtattatgtacggtgaggcttttacgtagtaacttgcttgatctaagtgggtgctccaatctcacaactcttccaaagatgtctggtaatataaaatttctatgtttaagtggaacagcaatcaaggaattgcacccatccattttctctctcaaaaatcttcttatacttgatctaagtgagtgtgaacagttaagggaacttccgaatgttacttgtgagttagaatcattgggattcttatatatgggtggatgtgtatcctttgacgaactccctgcagctaccatttgtaagttgaagtctctttacgtacttgatcttaaagattgcttacaattgaaaagctttccagaaatcttggagcctatgcagaatctgaagttgcttaatttaagaggcacggggattgaagagatgccatcgtcaataatagagaatctagttgtgcttaatatcctagacttgagcgagtgcaaaaatctcaagtttattccaactaacatttgtaagttgaagtctcttagagaacttcatcttgaagattgctcacaattgaaaagctttccagaaatcttggagcctatggaaaatatgacggagcttcttttagatggaactgggattgaagtgcttccatcatcaatagaaaatcttgttatgcttaaagggctctacctgagtggtaaaaatctcaagtctattccaaccagcatcttctatatgggccatatctcccatatcaagattgatgaatatccaaaactccaaattctgccatataaaggtttaccagtagaagattcaagtgaaaccagtactggtcaactacttgtaacacatgatc

SEQ ID NO: 125966 - DNA, 1138 bp, Cannabis sativa
  modified_base (1002)..(1029): a, c, t, g, unknown or other
  modified_base (1109)..(1113): a, c, t, g, unknown or other
ccacttggaaaatgattggcttcacttagaaatgaaaaccacagtggttatattaaataagtgaactatgatggaaaatgtggagatggagttggatttggtcgtagaatattttaaattttatttgaataagtgaaattgagttagttgggttatatatgtaggtagctaatccactgctttctttcaaattaatgataagattggagatggagatggtaacctctcaccagtcaccactctcccccacttctctaatttgatgtttcaatagttttactattatgtcacctttcttcaccaaacatcacacgtatatcctaattaataattctaatcaaaattaactattcaaagataatcaaaaccttctcttcaatattatcatttaggtcaacgtttatttaagcaactataatcaatgactattgtaaaaaaaaaaaaaaaagtctaccaatgactaaggataagtagcacaatccatcaaaaccaacacacatacaatttgaaatctcttgattttttttttttatatatatatacatataaaagaaagaaagaaaaataagaggttttcatccatggaaagcaaaataaattaatatgattatgttggaatttaatggtctaacatgagaaaggataccttagttggagtagttcctattcaattatacatattcttagttttggaataaaatagacaactcacccgtaaaagcattattcaaatcaagaatcaaatcaaagtattatgtattttttttcttatatcaaaatatattattattgtttgggtgattttttttaaatgcttaattattaaaaaaaaatgctaacctcaatttttttttggtagttttttagggtaaatatcattttggactctgtgttttgtaaaagttatcaattggaccctctattttgttgaatgacaaaatagaccctatattttccaaaatagtaaaaataagatgttgaactcaattttcaacaattttnnnnnnnnnnnnnnnnnnnnnnnnnnnnaatttctaacacgaatagatatagaaaatataattatttttgccataatatctttagatcagattattattaagttttannnnnacaaaaaattagttcagggtcctat

SEQ ID NO: 125967 - DNA, 1387 bp, Cannabis sativa
tatatcatcgttgtttccaccactagtatgagtggaacctacttatgatgatgaagtgtggaattttcattctgggtttgatgatatatataaatattaaattaacgatatatacattaaagtcagatccatatatataggtgtatatgcgacattctttgatgttgatatatacaattaatgcattatttgttgtttcaagtttcaactaactggtctttttaatgctttgaaagatgcatatacaatttaacgacgacacatgaacgtactatttaaattttgacttgacttaattaattgggaaatttatatataaccaaaaattgctagtatatatataatattatatgacacaatacaaggacaaatatatgtaataatgaagcaaacaaatttaaccatattgaattagttaatctataatgcattactttacattattttatatataatgcaattgtttataattacaccacacactattgttgggctcattacgttattaattattaataatattattaggtagatatatatatataacatgcacaatatttaattaagatgttattacaccaaaaagaattggcttttaatttggttattctttaaatattagtgtacattgtacttggtacttttattaaattgtatattcatagtactacgtacggttctcttctaagctaggcaacattaatcggaaattgcttgacaatatatagagcatctatgattctatatatatagagacaaagtctacatagaaacgaggcggggtaatcgctcgtaaacaaaatcgagaaaaaaatatatatatattttagttagttacgatatatgtttgtaataaaaaaaatacatttataaatataattttaactttgatataatgatattacattaaaataaaatttaaaagttcaaatcacattaagaataatatatttttttctttttatatttattattgcgtctgcctaaaaaaattaaccccacatttaaatcttcagtcaccactgtatagatttcatgatctaacaatatatatttatttttaacctatatatatatatctattttattatgttagattcattaatggaacttgcacaatatgctagctttgtacatattttcacaatttttcattgaatcacacacatatatatatttagtatatacaacattagttagagtatgtagacacttttttgtgtatatgtgaattgaatgtgataataaaaaaaatccccggccattgaaaaaaaaaagtatttgttttttctttcttgaacttgttgaccataacaataacaagcatgaaaattagtcccgtaaattgatattatgaatcaacaacaacaaataataataataataa

SEQ ID NO: 125968 - DNA, 1240 bp, Cannabis sativa
gatcgacctcactcctggtgagtttactacttgtaacgatacgtacacttgcgtgtgcaaaatatcacaacaagtttttgaccaccaaatccctttggggtacgataagcaccacttattgaagatccaaatgcaaagattcgcttgcatcttgagagagagagatcagtgaccaagttgtaatgttcaagacgagtttcatgggagaagagcaaggtttgacttcttcaaatgatagatgatcacttcttgaggtgatgccaaacacgacagaatcaagtttagtgtcaagaccgttgaggagttgcagcactagatcttgatttgtcacatgagagctagcaatcatcaaagcacttgtagttgactgagctttgtcaacatattcagagaccgagagattatttttcagtagatgtgagaactgtccttttagttggagaaggcgagctttggtttgacttgagaatcgctactacaacgcacgccagacaatgaacaaagtagtgaagttggttatggatggtagaattggttctgtcatagacgatcgaagccacgagaggaggaactagtctttctttttccattgagcatatttgggattgggagctcgggtgaccagagtagcagggggagaaacatctaagaacagaatctgatccagacatggccagtgaccgcaggaacaacctgagacttcaattagagaaagttgttgtgatcaagcttcaatgttagggaagctattagggagttggagaaaggatactaactctttgttgaattagcagtagcaacgaaaaatgtagcttaaggatcgaaggtgaaagactgcatagacgctagtcaaaggacgaatataccaagtagaaagaaagaatccaagttgtgctagaaagcaaaaacagagaatagagaattgaaatgaaaaacatagattgaatgagtgcattacccaacagagtaagcactagcctttatttatacaatgagaccaattacaatcaagaaagtaaagagagtaacagaaatggttactaagataactgaataacagtacattgcaactaattgttagttacactaagtgacattactaagaagttagttaacttcatgagggagaatgtcccagatgagattctaccattctcttgaagaggtaaaagactaagtgcatgtttggcatcataactaaaaaattgttttttgtttttaaaaacagaaaactgttttt

SEQ ID NO: 125969 - DNA, 968 bp, Cannabis sativa
cttcaaattttgtttacgtagtaccaaacttgttcttattaacttgtttataataacaagatttgtggtcatattttgcagaaggatacatggagtgaagaagaagacaaaatattgattgaagcacatgcagaaataggaaataaatgggcagaaattgcaaagagattagcaggaaggactgaaaactccattaaaaaccattggaatgccaccaaaagaagacaacactcgaaaagaaaatgtcgtaattcaaagaatccaagaggctcaaactccactctccttcaagattacatcaagtccttgaacttaaccacttcctcaagtagtagtactaatactaatagtactactttcacaaagcaatatcaaagaaaaacgacaccaaacctcacaaacgacaacatgttgttaccatttgttgaggttgagcactcccctcaaacgacaacattagaagtttgctatgctaatgatgatgatgatgttgctcgtgttgagaacactaccactactactgtggatttttgttatagtaatattgagtcttttattgatgagatgatgccatttgtcgttcatgatgaggataagaagtcggtaccaggtagtgatcgtgtggagctgtctgtagaggataataatgtttgttctgtgagggaaggtggtaatgttattggagttgtaaagaatgagatggatttggtggagatgatctcaaaggtgtagcttatataatttatatataaatatatatgcccaatattggtgtttgttaagtgtattttggtgtgatataaggttaaaatcatgatgttttcttgtattttgttctctaatatgaattataaaaatatatgtatgtatcactataagtggtaataataaattataggagttttttcatcaaatacattttttttaagattatctttaggacctatacatttttttttttttttttt

SEQ ID NO: 125970 - DNA, 770 bp, Cannabis sativa
agagagagattagagaaaattgggcccttttgttgtgtgggccctgtgcaatagatctagttgcacacctaaagggccgggcctgccaacatgaacatatccaaatcataaaaacatcgctttaaattcatatttcataaaaataaatcattaccatggctctgaaactagttattggaacttgttttactaggatctagatttactaacatgtatattttattatctatatctaacatcataaacatgaatttcataaaataataaaataaacacatataaagttctagaaaagcttacattggttggaacataatattaatggctcattccgttcagatctctaactcttgttcctttctgtcgtagagtattgtcaagatttaaacctagatctcctttaatgatgtaattctttatactcttccacactatggttgagtattgacttgaattgtgtgaacaagatactcttcactatagggttcaaaattctagaagagaagagaagaagaattcaaaatcaatagaggggctcataacttttcaattatctgacagaatagtctgatgtagcttatcttagttatcaggttatgagcctatctttatctatatatatgatttcatctagggttaggatttcaattatatggaattaaaaaagataaaataatggctaaatagaccccttaagtggccgcccatacaagtggactccacttgtttcaattttgccatttatgtaacaatttatctttttttttttt

SEQ ID NO: 125971 - DNA, 1386 bp, Cannabis sativa
ttttatctttagttacaaattttgttgtgactaaaagtaagattttttgtagtattttgtagtttctggttttaattttagtttttaatctagtcttattcttgaattatggtaattgaatcacagcatgttttcaatcaatttttaaatttatcgcaattgttcaataatgatcaaatgacctaaactaatgtaaccatcaatgaaacttttgagtttaatttttctaacaataataaatatgcagttcgggaggttactgtcgagattactacttatatctcggtggttccaagtatcgagattgcccaaacgtgtgagaggatgacacacctatctcagtggttcaaggtaaaatcgttgacatagagttctctattttggcaattcccaaccgttgagattggtcattatcctatttcggtggttaaatcctgtcacgggggttcttaactgccaagacagggtaattttcttgtagtgaacatattgaaagaatatatatgcctttttctcatgctttttttcatagtgtttggaagaccatcatcatgctagcatttatatgatgttaagacttgaagatgatattggaacatcattgtatcatcattaaaatgactattgaaactcttctataataaattacattattgtaatatatataattactttatttatttgatctatttaggatttttcctctcgaactatgacatatgtattattgtaccccctaaacttttcagcctgttaaaaatagtccctgaattattgacagcgttgtaaataatacatatgtcacaatactaattgattaggataatgcatatgtcatagttcggggacaaaaatactgtaaatagttcagggactatttttaacggactaaaaagtttaaggcgcacaataatacatatgtcataattcggggaacaaaaatcctaaatagccaacataatatatttggcttaattaacgaattgattaggatgaactaccaagaggtgcatggcatccttaaatcgattcaatgttacatgcacgacaacactggtgttttaaaagacaaaagctactttagcaataatgaccaactatggtcaaacaaaagaaaaagatattggaataaaatattattgaacattaccattctaccatttttctctctcaattttttctctcaatagtttcaccatgacatgtcaaaaggggtcggaatcaggcactacaaaaaataaaactatctttaatgataatattttagtcacaacataaatttgttatgaccaaattatgtgatttttagtcacaacaaaagattatttgtgactaaattaaacatagtatttagatacaagttgccactaatttagttttagtcac

SEQ ID NO: 125972 - DNA, 636 bp, Cannabis sativa
ataaaatattattaattatttataagacactacttttacatagtgatattagaaaccaataatgagtaatagtaatgccaaaaaagataaggataaatataggtacattttttctttagagaagtatatagtagatttttagtagatcctacatgttgttcgatattatttaaggcggtcctttagtctaattttttcgtgatggtagatattgtaattatttaaggtcacttataagttttttttaaaaaaaaattaaattatttatagtaactaaaaaggatattggcggccataaaaaatcgattttttgatggtaaaactacttaaattgtactctattttggtccgtaatattctatccaaaagtcgcagttaactgttacagtggactatccacgtgtacacaagtgtaccggtggcgtgtgtacacaattatacatgtgtccaaaacagaagtgcaatagttttactgtcaaaaaaatcaattttatagttaagtgttagaaaatataaaattcaattaattttgttgccaatatctctacctaaaataaaattcaatttttattagtttttttctaatatacttaataagtaattgtttgaattttttttaacactgtaaattatttt

SEQ ID NO: 125973 - DNA, 1624 bp, Cannabis sativa
ggattacattcactcaaatttgtggggtccctcaaaaacacaaaccaaaggttgtgcaaggtatttctagatgattattcaagatttgtttcgattcatcttttgcaaaaataagaatgatgcctttgcaaagtttaaagaacatagagtaatgttggaaagttaaattgaaaggaaaattaagaaattgaggacagataatgggctagagttctgtgcaaatgtgtttagtgactattgcaggaaaacatgcattggtaggcacaaaacaatccttagaaaccctcaacaaaatggccttgcagaaagaatgaataggaccattttggagagggtgagatgtatgctgatctattctggtttgcgtaaaagcttttggggagaggcagcaaacacatcatgttatttgattaacagatgtccctcatctgcaatcaatttcaaaactcatataaaagtgtggtcaggtcacttgtctagctatagtcatttgagaatatttacatgtcttgcctatgctcacataaagcaagacaaacttgaacctaaagcttgaaagtgtatctttcttggatatcctgaaggagttaaaggttacaaattgatgagcattataaagggtaaccaccagaagatgttcatcagcagggatgttttgtttgatgaagaagttgtgtacaaggatctattcaaaacacaagaaaccagaatacaaaagcaaccagatccgaaagtttagtttgaggtggagccaatagaacaagattaggttaaagaaaagattgaggaacaagaagaagaacttgagggacaaggagatgagattgtttctgaaattaacaagagcatgacactcaggagtattagctagttagagatagaaaaagaagggccatcagacctccaaacaaatttggatatgctgatgtggtcttctatgccattagcatcttaagcttggacaatgaagaataaatttcttatgaagaaccaatggctttggctgacagaaagagatggttcaatgccatgggacaagaaattgtctctcaagaaaaatgggacttggattatagttaagaaaccatggggtaattggatgcagacgggtttacaagcacaaagaaggcatactaggtgtggaaggtgcaagatttaaggctagacttgtagctagaggttttgctcaaaaggaaggattagattatcatgaaattttctctccagtggtcaaacacacctcaataagattgctgttaagcttagttgctttagaagatcttgaattggagcaattagatgtcaaaatagctttctcacatggtgatcttgaagaacaaatcttcatgaaacaaccaaaagactttgaagaaaagggcaaggaggatcatgtatgtcttcttaagagatctctctatggtctgaaacaatcacccatgcagtggtataaaaggttcgatgactttttacttagaaatggtttcaagagaagctcttatgaaagttgtgtctatgtgaagaatacacattttgtcagtgtctatttgctcttgtatgttgatggtatgcttatagcaagcaagagtatgagtgagatagacaatgtgaagaaaactttgagcaa

SEQ ID NO: 125974 - DNA, 571 bp, Cannabis sativa
tgggagaactactgacctgtgagcgagaagattgcaggattggtgattctgagttggcttcagcttgctgtaatgatggatctgcatgagtggtggatcggttagattgattagtggtagcagagggtattataaaccaggaatgtggagcttgcatggtaagaacttgctcaggttgatgattgttaagaaagcccttttggaatggaaattcatcttcattgaagatgacatttctagtgatgtaaatccttccatgagggcttagacacttgtaccctttgaacacttcactatagcctaagttaacgcatttaatcgagtgaaattgaaatttgtgttgttgatatggtcttatacatggaaagcatgcagctccaaagaccttcaacaacttgtaatctggcagtttggaattgacaagctcataaggtgttttgccctctaatactgctgtaggcagtcggtttattagataaacagaagtctggaaagcctcagaccaatattttagtggcacgtgtgcttgtgcgagaagggttagtcccatttcgactatgtgtcgatgctt

SEQ ID NO: 125975 - DNA, 962 bp, Cannabis sativa
tcacacacgcacaacaacaacaataataataataataatataattgtatcacacttaatataccaaataccaatatatgtagataaactggatattacactttcaaaatacaaatcaactagacatcagcatattaaaccttataaataaaaaaacaacaacttgataaaatgaaagaagcataataataataataataattaaaatattttttggaataaataaaaaaattatgaaacatatactaaatatatatatatatatatttatatatatcaaaattgattgttaattaaatacttcaaagaagatttaaaaaaaagtgaaattggataacaaaaaatatactcaattaaaaattaagtaaacaaaaactcaaatcatatttgataaaaattagacataatcaactcaaaaatatacttatgaaatcttttattaaaacacaaaaacaattaaaaaaaaataagtaagaatcaactttatatttatccactataataaagttcgaaaaaaaccaactacaaataatgacttaaaaattaagtatatactattgctttattaggcacaaataaaaaatcattacagaacaaatcaaaaaatcattaacaaattttttcaaccaaaatgaaattttaaaactaataataataataataataataaaaagatttactaaattagaaataaattagctagactttaactaaaaataaacatatgaaaattaagcatatttttattttgtattgtttgtatttttattttttcagttttaactaaaaaaaaagtaacaatattacaaaaatactttcagttgaccaaataaataaatatacaaaccaaacaaaaaaaatacgcgaataccatttacacacaccttcaacccaggatccatgattcttgggcaactatctcgcaaccatcgcgcaactacgcagcaacccaacgcaaccaaa

SEQ ID NO: 125976 - DNA, 1500 bp, Cannabis sativa
acagtacgtttaaaatcatgttaacacgcctatgctagttagggtgttacatgttcaaacttaccaacttaagaagatgtctgatgatgaatgttggaagttatttatagagcatgtgtttgataatgtaggctctaaagaggtaatgttgttcgagttgcaagaaatcggaagagaaattgtcaacaagtgtaaggggcttcctttagctgtaaagtcaatggctggtcttttacgatctatgtcaactcatgtcgagtggagacatatactgttgagtgatgtgtgggagttgcctaattctcacaacatcgaaattattctagctttgtggttgagttaccgatttctgccttcttatctaaaaccatgcttttccaatctttcaatatttcccaaagactacaatttcggtgatattgatagagaaaaactgattttaatatggatggcagaaggaatctcaaatttatcttgttgctgctaataatctatttataatataaaaatcaaaggaggggagagagggaagatcatcatcaacaacaacttaaaacattctagtctcctcttatattctacattctacaacttaaaacaaatctatgataactagctgccaccaaaatcaatcctgccaacacattcaattttggcaactctatacaagtaatttaattcaattttgcaacatatcacaagtaaatctatagagatttgcaactcaatacaaataattcaaataatttcactactcacgagagtaaattaaaagagttttgtaacatgatttttcgattcaacacaacacatgtaattcaattcaattttacaatctcatttggtaactcaactcaagtaaataaatagagatttgcaacctcttagtccaggactagttgctacaacaaagattatacaattttttttctattaaaccctacaaatcatatttaactaactataatttccatttgcttacaattaatataaagctagtacttgtactgagtcataaagactcaaacttcaaaagctaacacaccaagattgattttttatcactatctctgcatcaaaaaaataaagaaaaaaacacatacctggtattaagtccaagccccactactagctactagccctctcaaagaaattattaatttgagtgagattgaaagaactaaatctttatcgtcgatctcccgagccataaatctggtttggcttttaaaatctagttactatgaaggttaatatgaagaaaaaaaaaagtaaccgtttctcgagctctggttttttttctctgtcaacaaagtggagaagaggaaaaaaccgtatagttgctaaagaaactatatttgtgcaataaaaaacatagcaaagtacatgagagggagagattagctacagataggggtgtgcagaaagtcatccaatccaatcccaaccgactgatccaatctcaaccgatctaatagaatcggatatccaatcataatt

SEQ ID NO: 125977 - DNA, 767 bp, Cannabis sativa
ccaaacacaccttacattttaaaatatagtgtaattactaaactgtgtagttaccaccctagtaattatcctacctagtaattacacagttacttccaaacacaacctaagtattaaataatacaattcacttgtatgtaatacaatactagcattaagtatcaacctggcaattcagatgaacatctacaattatacatttagtaattcaaatgatgttcaatttaaatgttaaattactatgaaccaccctggatcattttcaacataagtataactttcataatcatattttctaattttttgagtacagctatatattcctttttactttaaataaattattgttatttataccatgctgcaattgcatttagtttcttaaatgagaaagattgggtgatgcacactcattagacgtatgtcattggtggaaaggcatttttaattaacagctgtgtcgcatgcattattcatattcattcactttttggaaacattaactaattaaacaacacttaattaggaaatcgtatgcaatcaggagtcttggaaatttctatatgtggtagacccctattttattttcttctgagagataatagacccctatttgatttgacataacaataaatgtaataaaatatttaaattttatttttagcaataggctaattagtaattttttcccacatgtactaactcgtggcccttaaatttttttgaccgttaaaaattattcctaaactattgagattgttaaattt

SEQ ID NO: 125978 - DNA, 545 bp, Cannabis sativa
tacacatcagctgtgatgacagattaaccattagtgggtactctgatgcggactgggcatgttgccccgatgacagacgttctatagcaggttactgtgtatacttcggcaacaccttggtgccttggtcatcgaagaagcaagttgttgttgctagatcaagtaccgagtctgaatacagagccttagcgcaagtggcagcagagattacatggatagaatcactcttgaaggagcttaattttccaattcccacagcagtaacttggtgtgacaacatgggagcgaatgcactagccacaaaccctgtattccacgctcgtaccaaacatatagaagtggacgttcatttcatcagagacagagtattaaataagcagctggaggtcaggtatataccatcatcggatcaggtagcagattgtctaacaaaaaaggcttgtctagctcaagattttcatttcttaattgacaaacttgggatggctgaatcacccctgcgtttgagaggggatgtgaagaaatgaaggatactgcagcaattg

SEQ ID NO: 125979 - DNA, 960 bp, Cannabis sativa
  modified_base (97)..(101): a, c, t, g, unknown or other
  modified_base (935)..(935): a, c, t, g, unknown or other
gagagctaacctatctcaacggatcagagaagtctatcgatctggtcacgaaactacccccaataagagtctttttgagttggtgagagagactccnnnnngaccaactagtcacgtgagaactagtgctcaaggggaaacccttaatgcatggaacacaactatcatgcctggtaatcgtgcaagcactaagcaaacaccaggtgataagacctcccaaagggaagttaccttcaagaaagagcccaaaaggactccaattcatgggcgctaaccaatgggccctccacctgatgtatagcgacctcgaaactctaagagaaccaacaagactcctccaccaagtcctccttaacgctcctatgacaccatgccccgagaccctacaaggggaaacggacttgccactcaagaaaatagaggtaatcaaaggctttattttgaaactggaggctatgagatgcgacgagtaaggaccaatgagtcgcttcatactcaaaagtacttccaagatgaaaggggtgagttgtgtcgttactttgactatggccccgatggctagcagtatgagtacttccctcgagtacatggggtggagttaaacctgagaaaccaattcaactctctctgtacttgtgatccagctgaagactactttgagggaagtattcactaaaacactcttaatgactggttccagagcgcatcatctcgagatgatttggaggtcattctaaagacatcactagagttgacttcacgaccccatagtcaagagacaactataagacccaagtagaccagagtccatgattgacttggaaagccatgaaatctgtgtgaagctgtaaccagaaaacatttggcagaagagggagcttttagaggagaccctaaccgggtaatagaagctttaactgttgggttttatgccntaaataaaactctgtttcaatgtaa

SEQ ID NO: 125980 - DNA, 1026 bp, Cannabis sativa
ttagagttaagtgcaagtgaagtgatagttgaaagaatttaacagcaaaaaactcaaaagttaaatatcacacttcatttaagtttaatgcccataaatataccatccttaaaaatttagtgtaattaaaaatttgaaataactaaagcaataatattccaaagtaataaaatagaacaaacaaaaatataaaacaatcaaaagttatgaattcaacacaaagaaaaaaaataattaaaatatttatatttatatttatatttttattatatataaataagtataaataatttttttaatatacattgtaatttaattggatcaatttttaattcaattttgatattgatatccaataactaatttaataattaaaatctaatttttaacatccattataatttaattgtaattgaatcaattgagttcacttaaattgaattggatgttgttcctagtcaatactattttagctagtgaaaataataataaaaaagaaaaaaaataataattataaatgacaaaatcatctctaatttatcaaatattttgaagattattttctttttatatacaatgagtttatgttccaactttcacaaactctttgagtacattggaaatcaataaaaaacttaacatcattttttagttattatgattaaatttagttatatttttttttatttctttctaaggaatgataaaattatataatcccactcctatcatatagagggatattttaaactacacaaacacttaaccatataaatcaattttttggctaatgaactatactcctgctttagtttttatttttctatttaaatagttctgttaagtgtcaaggtggactttccaagtgtacacagtgtacacatggctgatttctaacagtgtacgtaatattatttgaatatatattaaaaatataaaaaatatattttttaaaaaaataaataataaaaattacacagatgagggggggggggaattgacggggagggctccctgttgggtttt

SEQ ID NO: 125981 - DNA, 1588 bp, Cannabis sativa
ttattttcattgttttagaaattcatatttaggatgttacaaacatacttgttagtaaatctatatcctggtaaaagatattccaacattctcggcttcttcttttaacttctctgcttcttatttgaggcgggtgatttcccgctgggcattgtcttgttgcttaatcacaaccccatattgggatagtaatttctggacctcgccctccatgtatttaagccgctttgagagtcgtcgattggaagcaaaagagaggaaagaagcctggagaattacgaacaaatgaatatgagaaaagagagaaataataataataatacgaccaactttacatgaagttgtagtccaagttcttcaaaagcatctcttctggactcccaagattgattaaatcccaatcaaggggaaggagagccttaagtttatgccatcatgcaatctcgtacgcctgaatgcagccgacaatgtctcaatggcctgactcgaggaggtagaagcacgagctgtctcaggaggaggagcattggtgttgggagggactggaggaggaacttgttcttgggtatcggtatcagagacctcaaagtcaataggctcagacaatgacttctttttgtgggcagtggttttccttttccttttaggagttaccacctcggcatttgtggggacccctgaattggttccccttttcttccctttccgatccatgataacttcaaaacctcccatgtctgcaaaacaaaataaagtgctaactattaaaaaggcagataaaaaaaaagaagagtgggagtacaattttccacctaagcgatttaccgaagtcactggaaggcgagctatcactagaagagggggtagaaggaccgtaatatccactaaaatccttacagcctataatcttgaatatatcaaagggctcgatgggttttaaatcctagctcgcgtctatatgactttgactatctgtcatagtgccatattgctgagctataccataatatgactcgtgacagttaatctggacgtggaatctagggtaccagctgtcaaacttatgggcaactcggtctacgagaagggagtcccaaatataaaaattaaggctggtgtctcggaaggtgactaatgtgttacgttcagccctatgtattgtgggagaccaaccacccaaccacattgattacctcaggatgctccttcaccggcttctcgatgggtagtattttgaagatactatgctcgagccacgccatcccaggccttatcctcctctggaacagtaacctgctgccaagaagaatacttgggaaacgtataatcacaagtatactccttatcagtaagaaggcccactgatctcagattggccttgttcaaaagaaagtcgtatgacctaaggccatggggaagagtcattagggacctgtgctaactgaccatctcgggggtagggatgggtcccatcgagagagctgtaaaaaacaaacaaaacattggtcagaaaactaaaagacaaggattaatgtaactgagcatgaggaaaacaatcacttatgaattctacgaaaggtggttgtgc

SEQ ID NO: 125982 - DNA, 1805 bp, Cannabis sativa
aacaaataaatgaaattcccaaaatgccatttttactagaaacttaagcaattaatatgcttagcggtaaaataatccaaaactataatcccacctaacaccgacattttaaatatctcttatgtttgttgcgctaagaaaaagattctaaacttacccatgtgactctaacaactatccatctcattttccattgtcgccgagcaaaaaaatcataaaaattacatatttcatattaagcttaaataatattcttacagtttaataaaatctctaaaattaagaaattataactctaatgctcatttctaaaatggggcccacaacaatatataatcatgcataattataaaatattaataattaacgctatttgcctttactaatacatgatctaacatgtggtcattacaggtaggataaaagaactctgtactacttcaaagaagtatccagaacattataataaagactggaatgagtttgttctaagtcgtcttacccctgaatttctggtaaaattccacttagtaatctttgtctaagtttattctatcaaattgtttgaaacttaattttaattatattttgtaggctttgagtgaagcgcaagttgccagagcaaggatgaatctatcacatcatcattcatctcgtagagacatgcccaacatcgaacaagatttagtaagtagtttgtatcactacttttacaatgttaagttataaacacgccaacaaaatttaatctagttcttatattagaaaaaagaacttggtgttgacaatgttgagaaatatcaactctagatgagagcgtggacaaagaacaatactttgattgcaaaatatgataatgaaattgagcaaaaaatagtcagtatgtcaattatggtaagaatgaacaataacaatatataagttactaacttcgtcaccgatttatttcacagaatgaattaaaagagaaattcattactggtgaaattgaagctaagggttggaatgatatcttaacgcaagctttaggcatacctaagcacccagtcgtgttagagttgttaggtatgatgcttctttagtggagtcatattacttctttttttcatattttagagtctaactaagttggtacattatgttgtaggtcattttcaaagaattctactgtgtttggtagaacacaaagaaaaaaaaagttgtggtcgatgtcgatagtgaacatgtcactgaaatcaagagattaaaaactgaaattgagaggctaaaggcacaaagaaatgtactaacagaagagcttcaaatgttagacaatgtatatagagatgaagagcgacatgaagactattatgaggaccaagaactgaccagcaactataaagactaagaacaacccgagcatgatgaagaccaataactgaccgactattatgaagaccaagaattaaccaaaaattatgaataccaagaacaactcgagcatgatgaagaccaatgacaaccaatggactatgaggatgtaagtcaatgtgtaaaattatgttcggataatattgataatgtcgtggctgagggtgtcataattgaggtggttggtttcttttcatatgatggtgtcgtgatttcaaatgattatgcacaagttcaaatcacagaagttattcaagggaaatctaaaatctcatatccaagtggtgcaatacgctatgtttatgatgcatttaacacattgcttccttggcctaaggaatcgattttgactgaagatgtatgcaataatttacttgtatttacattaatattat

SEQ ID NO: 125983 - DNA, 1130 bp, Cannabis sativa
tatagtatagagtattaatattgggcaccagtagtatttaacgttttttatagatgacgcgttgcaattggttaacgatatttcttaaaaattattagcttacattatatgaaacttgatacataattataccaataacgatatgatactgaagaaggtgttaagtaccagtgccttttagcatttttcctatagtatatgattacttatagcatctctaatagagggttgcaggtctttgctacgtgcattttgatcaatattttaaactaattttatgaatattattgtttaaaatgagcaatagttatgtgatatcatttatttatttttttaaaaaaataagttactttaacactaattaatttttaaaagaatatatataattataaaatttaattaaaaaatggtacgtgggatcatggtgaataatttttagagttacctactattaaaataatttttgtaaaaaaatatgttattttatgtgaataagagaataaataatattttaagatgatatttataaatagacaaatatgattttacccaccacatgagagagatgaatgaagctaattttacttgaacttgtgagtatttgagatatatatgctgatatggcatattgagcaagtttcgaaaatccaaaaaactctttaatgaaagtcactttccctcatcaccaaattttattagtatatctctttattagaggacttctctttcttgttatttccatgaaaataatgtatatatatatatattgactgaaataataagcaatagatcaattaaattatatggttcattcatggtccaactggtaaaaagctgcgaccatacctttgcatgtgatgttcatgtgaccttatataatataagagatgtttgtcttggcattaattcaattcctattttgaccaatattgatatttatatcaccaattacaaatctctcctctacaatttcttaaaccaatatcatcatcacgtatacaaatacaatataactactttatttgtcaattacaattttccttgaaagaaaaaaaaaagaccttattttgaaggtttgaaaaacaaaataatttcttaattatatatatatctactattgtaatacatat

SEQ ID NO: 125984 - DNA, 1184 bp, Cannabis sativa
aatagtatgattgatatttagtactttttttttcctactatcagtatgattatcgaatctctgtaacttaaaaaaatagtttttaaagaatatcgctaatcaattatggaacggaacctattaaaagtgttgggtaccactagtgcccaataacaatactcatatatataggacaattcttttataagacctatattgtttgctaaaattttcggaaacgattaataagaacttaaataattacaatatgttaaataatagacagagaattttttacgtggttcgggcgttaacgatccctagtcgacgagtcagttgtgttataccaaaaaatcggctattaatcagaagttgacatgtgtcctacaaaaggaatatgaatcagctcaaagaatattattaagtttactggttctattatgtatatagtctttagtgtgttttgtatacagtccttagtgtttattggtgtttattataggtctttattcattttatatttattctgtttaatcagttaagttgttgttgcttgtgtcagcataggagtcggtttattctgttaaaatagttgagtcctattttcttgggtctgatatgtactgaggcccaagctataaaaggcttgcctctcccctgttttgtttcaatttgaatttcattctttctgtttcaatattcaattcctctttctcaacatggtatcagagcgggaaagataggctttcccgtccgatccttccagctgctgtgtctcctttcttcagtgttgctgtgtatttctcgatcttcttctccgatcttcattcttttatgtacattgattccgcacaatggcaacagatgaaaatcaaaccagtattccttctgctgttactgatcttgggaatccttccattcaaactaatcaaggtcttcgaattgcttccatcaagaatccattggaggatccagtaagtccattctttctgcaccatggggacaatccagggaatgcgttggtgtctcaaccccttactggacaagacaattgtctcgtggagcagggcgatgcagctcgcaatttcagtcaagaacaacatcagattcctcgacggttcaattcctaaaccttctatttctgaacaaagtctttataatgcttggtatcgtaataataacattgtaatctcttggatcttgaa

SEQ ID NO: 125985 - DNA, 1512 bp, Cannabis sativa
agggtacggtcttacttaagtgtgaagattataagaagggaaagaaagagagaaattgtttcatttttattaccaaaaaataactctgcttgacatttagaaggtggagtcagataagaaagcataggctaataatattcctaccatgatcgttcatatatatcacttcaagtcgacccttttggatataacacaattcacaacgtattgcacgattcatctttcgtatgtaataaacaaagtaactattaatgccaaattagtaattgaatgtaacatcaataatgtattagtatggtcaatgtgacctattcaaacctttggtaagaaattggagttgggagttttccaataacaagatagttattttgattgacattgaaaaatatattacgtatataatttatctaaccacaaagctggagtaagaaaatgtaatagcaagtaacttgaccaaaaataaaataataagaagcatctacactgggggtaatacttttccataaaaaatagttactatcttccataagaaagcattttgggttcaaattcaaggctattagcacctacaaaatcatacccacctttggtgtttaagtcaaaatgtatggtattggtatctttgagcttactatcttcagagtcttctctgttactctcttggtaaatcttgaagcttgaatcattttgttttctataaacgccacccatttgatcaattatgcttgctttttcctccacttcagtcatgttctccatgaagtttgatagagccaagttaaagtctgttaattgggctttggccacctctatgttaccgggcccattcatatcaagggagaggctcttttgagctttctctagtatggcttgtaagtactttccttgggcttctattctcatctgtagtttcttctgaacctattggtaaaaaaaaaatgttaaattgggaagagttatggtttcaaaatagcacatttgaattttaccacacctataattgtgcaaataaatattgcgtctcatacatttgaatttttattaggttcaaattaaaacatacgagatgtgctactgaattgcacaaataattacatgtactgtcctaaaatgttagcataccagagtgccttatagcaatactcaataaatatacacatactactgctatatagttttttttaatatatttggtacatacatcttgtatgcaaagtaattagtatatttatttacctccagctgctcttctaatctcttttgtacttcattctgatgtttaagtgcttctgtaattgggatgtcactgttttataaaaacagtaattagtatcacaaaatttcgaagaagataatcaagcaacaataaaaagagtcgattgtaagattaagctggtttaatgtagtgatgaaagcccatgcatgtatggccaagtttaccgctgacaataaattagttaataataattataattattcataggaataagtttcttagcaaatttgtaagtg

SEQ ID NO: 125986 - DNA, 1039 bp, Cannabis sativa
gtacttgtctcaaagcaagaacgtagcggaccttcttgtaaaggttcagttagatggtgcaaaagcttgctcaaatcctacaagtagtgctcataaattggctttaacagagggtctaccatttgaggacaaaactctctaccgtagcacacttggggcattacagtatttgaccttaacaaggcccgatgtagcatttattatcaacaattatcttaatttattcatgctcctactgtggttcattgggaagcatgtaaacgattgctgggatacttaaaaggcaccatctctcacggcctgcagctcacaccagcaacgagattgtctattgaagcgtattctgatgctgattgggcaagttgccctgatgatcgacattctaccggaggctacgctgtctttcttggtccaaatctcatctcttggtctgctaagaaacagcctgtcgtggctcgatcatccactgagtctgactttcgtgccttggccaacacagcagctgaactgaagtggtttcagtcactttttactgaattacaggtgactttagccgatgttcccatcatctgggttgacaatcaaggggctgcagctcttgctgccaaccctgtcttccatgctcgttgcaaacacattgaaattgaccaacattttgtgcgtgatcagattctaaataatgaagtctcggttcgatatgttccttctgtggatcaagttgctaacatcttgaccaaatctttgcctaaagacgacagatttcattatttgaaaaccaaactcaaagttgtgtctttcccttttcgtttgaggggggatgttaactaactaactgttctgacagttggttagtattgtattagttatttctgttactttgtttgttagcttttcttgttatttttagtttggttctgttgtaattgctgtgtatataaactctcagttgatcattaatagaattgaacttttctgcatttttctctctgcattgaacaaactctgttcttctcttttctttctctgctcaactccttca

SEQ ID NO: 125987 - DNA, 1046 bp, Cannabis sativa
tgctatgactattaacaaagttcaggcacaaactttagattcggttggtgtattcttaccagagtctgttttctcccatggacagttatatgttgccctatctagagcaaaaactttatcagctctaagaattctcattagaccaccatcagaggcaacaaagatgattataattataccttcaacattgtttatgaagagatcttattattaagcaatactatacagaagttcttatgtatgattctcttcttatatatcttcgcaatttttatcaccaatatttattatacattttaattttactaattgctattatttttttttttacagatcaaacatgaatcctcaatataaattactacaagaaattacaccaactactagaggatggatagcaaaagttactgttattaaaaaatttatcccacctctttctcgcaatggagtattgtaccaacgtataattcttgttgatattgatgtatatttattacaactcataaatctatataaactatataaattaaatttaaattttgtttcagttacaaaatataagattattaattaattaactataaattctctacaaaagatactttcttacattactttgtgtattttttatttattataaatagaaaaatcgcatacaagctactctgtatggcaatgcaatcaatcatttcggggataccttaaatatttcataagcctacttaatttccaatgcttataaagccagtacatgaagagtttaaaattgttgacaatcaatttgaatggagcctacttctacatcaattgaagaaacaactgaagaaattcaatggagctttgaagaaccctacaacttgtattatcttgatcaactagacgcctatgttgatacaaaaacttctgttggtaatatttatataatttgaatttttatgatcataattattaccaaattactaatgatatttctttcaatgttaattacagatattgttgcagttgtattaagtgttgatccaataaaaaaaatccacacaaagtct

SEQ ID NO: 125988 - DNA, 1368 bp, Cannabis sativa
tgcgagaggggggctttcatgcgagcccatgtgggggggggggtcacatgcgagttgtggtgtatttgtgtgagtgtgtgcatgagtgtgttgcatgagagtcgtggtgaagtgtacgtatgttgaggatgtaaggcaaaattcaaatatgcatattgacaagaatgtcattggagtaggaatcaaaggacaaggcatgcaacagaaacaacacacctacaaggtctagggaaccgattaagggtactctacaaccaccacctctgcgacctgggaccacctgacactagataaaggtacgaagcgtaagaccacctcctgcacctgtggtttgcaacccgaaagcgacaacttgtctatttgggaccaccatgtaactcaggccattagagcctataaataccccattctcaagtcagagaaggcagatacatcacctaaagccacttgaaggtgtgcccaagacgaggatgacattgaccctcgttttgggaaaattgactcgggagttggtctgaccgaggaactcagagaacttcccatcaacacatcggacccgaccaaggttgttatgattggaacaaacctgacggaagtcttgagtgagatgcgcatggattgcctcagaagaaatcaagacatcttcgcttggtcgcatgaggacatgatcgagatcgacccccaggtcatctgtcatgccctcaacatagacaagctaaactttaagcttatacaacagaaatgcaagctccttgacaaagagcattccaaagctctcaaggaagaagttgaaagactacaggagaacaacttcattagggagaatttctacccggtctaggaatctaaccctattctggtgcctaaacctaatggaaagtggaggacctacgtcgacttcaccgacctcaacaaagcatgccttaaagattgtttcccactaccaagaattgatcaactggtggatgcggcaatcggccatgaactccttacattcatggatgcatatttcagttacaaccaaatcagcatgcacgcaccagacaaagagcacacgagcctccaaactgatattgggctttattgctacaaagtaatgcccttcatactcaagaatataggtgcaacatatcaaagactagtcaaccgtgtgttccacaacaaaattaggaacaatatggaaggttacgtctatgatatgttggttgagtcgaaaagattcgaagactgcatcaaagatctaaagaaatgcttcaacatcctacgggattatcaaatgaagctcaaccctctaaaatgtgccttcggcgtccaatcagtgaatgggtatttaattatggaccattaaatttaatcaaatggatgata

SEQ ID NO: 125989 - DNA, 1841 bp, Cannabis sativa
  modified_base (996)..(996): a, c, t, g, unknown or other
ttcaacataatcatttcaattttgtatagagtgtatgattcaacttgttgttcagttaattgaagatctttgtttctaaatcttttcctttgcaataaagttatatcttctgacaatgtaatatagttagatttccaaacttgtaacgcatctgaaacttggcaatgaatgagtattgtgacaaaaaggtgtcttaattcctttcctgttgcccatagtgcagcttcagtcaagcagtcaatccattccttatcatcatctaataatcctaaagcatagcacgcgggtttaaaagtaggatatttgatcccatttaatgttctaatattttcgtacgaagtgcatcctttgacaaaattaagcaacattctcatatagaagcgttcaccagttgaaggatgtgcgaagtaaattcttccaatagtcgcactattttttctcctggtccatattttttttttttgaattccaaacccaatatgaaggaaaagcagagtaagttatttctcgagcatcatcatttttattttttgtctccaaccattcactgaactttgtttgtcttattccaagtttggaaagaacatcgtcaacataatctttttctccgaatattactgtatgctctccaggcaaatggaatggaattttcaactgatggttctctataatgtatgtcaaattgaaagattcttcagcaagcttcagttgcttatatatacctatagtctaaatatgttttgatttcatctatttcttcagaagtatcaataaattctattcttgcagttgctctatcagaacctttatgaacatatttgaatagatatttgattgatctagagtaattataaatcacgatattgatatgcgcatcaaacttgacaatcaaatttttattataagggacgacatatatccattatttaaaatgacacctttcttttcaatgtgtatatctttatttcttcttttgtagactggaaagccatctgngtctattgtcgtccgatcattaaattttgttaggaaatgttttgtgcacctaccttgcatcatacattgagagtttgaattgagttttccacaaggtctatgaatcataaatttgttaacggcattataaccatcaggatcaatatttgagtgtgggatttctgcacttattattttgtctatatgttctgctgaaggatttttagatgtcgaatgcaagaaaagtagtatgtgtgcatgaggctatcctctcttttttggaactcaattgtgtatatacctgcaataacattgagaaaatgttaaaagttacatttagaattgttggaaaaactgtgaaagaattttcataaaacatcattttaaaataagttaattttgttgtgaattcaatagtatgagaacttacatgcgattatttttccaaaaggttgttcattttttagatcatgcattagatggttaaactttatttcaaaaactctgcatatgatatcaaccctattctaatcgtctttttgaccaattaaattaatcatgtcatttatttctagcctctttgggttgcaagtgaaagtaagaaataaatcaggatatccaacccatttacaaatggtcatagcatcttgataattttgtactctatatcggggtccccaagtgtgtgacgaaggcaaaacaattgtttttcccaattttgagcaatttgaatcacctcaatgagcaacatccattaaactaaagtaaaggttgttaactcaaacttttaggtctccttattttgattattaacaaatatttgattattatttgttactaataatttgttgattttgtagcaaatt

SEQ ID NO: 125990 - DNA, 536 bp, Cannabis sativa
  modified_base (374)..(381): a, c, t, g, unknown or other
aaacctgcaactggggaccatgcacctgcaactcgggatcaccctcctacaaatggggaccatgcacttgcaacttgacatcaccctcctgcaactgaggaccacgcacctgcaacttgggatcaccctcctgcaactagggaccacaagcctacaattaggggtcacctgacaccagataaaagtacaaggcgcaaggccacctccaacacctacgacctgcaacttgaaagtgatgtgttgcctccttaggaccattttgtacttttggccactagagcctataaatacccccatctcagatgtgacagggggttggaagatcatttggtgtaactcatatcttgaattgaatagagagagagagagagagnnnnnnnnagagagagagagagagaaagcaatattcaaacatcttttcaccttcatctttgtctttatctttatcatatttttgaataacttttcattttccgaccactaacttagttgacaagttctcaccgtcaatagtttggcgccgtctgtgggaacga

SEQ ID NO: 125991 - DNA, 959 bp, Cannabis sativa
gtttctttcggagtttaaagatgggtgtggaccgaagaagcatggggcagcaagagcagaggctcgttggcagccacccatgcgtgattctttcaaagttaatgttgatgcgggagtcaaggttggaggaggggggtacacgagtttcagctcagttgttcgtgaccatactggtcgggtgtgtgctgcaaatgccacggttgtgaggaaagaatactctcctcttcaggctgaactcgtggcaatttcggctgggcttcaagctggcatacacacgcgactgccttcattcattgttgagaccgactgcttgcaagcagtcaatttagtgcagcaagaagaggagggctgtagagatttagatggtctcattgctcatattaaatgtttgttacaagatgtaagggtgggtgggataaactttgtgtatcgggaagcaaatcaagttgctcatgtattagccaatgaagctttgactaacaaagctagtgccatgtgggttggggttgttcccccttgtgcgagtcatgccgttcggttagactcgcctaatccattgtaagtgtgtttgaatgaatgaattccgtttcaaaaaaaaaaaaaaaaaacctaaattacgttttttgataaagtaaacaagataaattaatatcattccaaatctaaacaattttagtaaaacgtattataaatattgattaggattattctttatttgttctcttacatttctccttaatttagtgcgattctaaatactttaccataaccaattgccattcccaattacattacattatatcagcaaacatgtcttatttttggaactccagctttatttctgatcccattactgccgtgctagacaacctcagcacttgtgcaaaaaatttgcaaagttggcacatcggaaagtatggaaaaatgaagaagaatatcaattctctccagtctaaagt

SEQ ID NO: 125992 - DNA, 1478 bp, Cannabis sativa
  modified_base (55)..(66): a, c, t, g, unknown or other
tgtccatgtcggaggagttaaaattgttgatcatgtaagaaacaacaaattcatnnnnnnnnnnnngaagactattaagaatgaattggacccattgttaaagttgacttgggaacttttctctgtttgtctctgtttttctctctctttcggtgactcgctggtgctatggcaaaaagggggaaaatgtccgggaaagctaaagctaagggaaagaaatctggtccatcttcttcggacagggttattaaaactagatccatggatgctttgattggaattcaagaattggagattgatgaggatgttgagaatgctgaagaaatgaaacagagtagtgaggcaatggaacagtgctcggatggtgcgccttcgcctgcaagtgaaatccatctggatttttttgattggctcacgggggcaaatcgtgcttctcaggatgtgagaatggggaagaatccttctcctccaattctcagatctaatattgcacgaaacctagaatcatgttttgaaaagacaactgtgaagatggctaagtcacaaccgagggttgctgatgctggtgcgaaaaggaatgtgaaggtgaagattgactttgaagacattgccgaggaggtcaattactggcagccgtcgattgtgtgctatgttattggagctaaccctccaatcaacatactcgatgggtttgttcgcaggatatggaaggttgcagtcgtgaaagtcggtttgcttgctaaaggcatttttattatccaatttcagaatttggaaacacgggacagagttctggagcaagggtatgtatttttttgacaggaagccaatggtaatgaaaccatggaactcggtggatgatttcaccaatgaagaagtcacctctgtaccaacatgggttcaactgcaaggattggatatcaaatattggggagagtcttcattgttcaagatagtggggcaactgggagagccactccaagtggatcaagtcacaaagaacagggataggcttcaataccccagagtactaattcaggtgagtctctctcaagaattccctaaacagatttcgtttattgatgaatatgatcatgagatagagttggatgtcaaatatgagtggattcctctggtatgttacaattgttcgggcataggtcatgatacccaatcgtgtaggaagaaagagagtaaagaggagcaagtgaaacaaatatggctccctaaaaaatcgaaagaaatgatggagaaccagaaggatacagagggatttcaaaaggtaataaagggaaagagagtcttaatggatcgagtggaagtggatactgagataaataacagatttggttctttggaagatgtaacaggagagatggttggtgaagagtgtaacataggagggggggggggagatccctctacttctaatggatagactcctatgttggaacgtgagggggattaacaaccaacaa

SEQ ID NO: 125993 - DNA, 2717 bp, Cannabis sativa
  modified_base (286)..(288): a, c, t, g, unknown or other
cgaactaaaatgggatgaggtgcagacaagttaatgaccgtgtttacccatttcctctttcttaaaaaatcatgcaattcaggaaaatcatctaacatgactacttgttcgaaccaaaggtcacgactaccaaaccatcgttggtacacagaagctttggaggcatcaacaaagcattgaacagagcatgggtcaacagttgctatgggggcttttggacattttgattttgtagagcctttggacgactgtttgggagacgagtctgtagatgggactggaatgnnnttggtcttggatttcttttcaggtggttcatacatggtatcacgtgaagactttctttttggctgaaccctttcactagtttgagaaggaataaaaaccttagatggaggacgaagaggtcctatgggtgtggatttaggctgtagactcgaagatgaacgagtgactcttttggacacagacggagggggtgactacagagaagaactagcctttttagacatgggaggagccttaccttgaaacgtacgaggtttctgaatgactggcgatgaaggcgaagacggagtcgactcgtgactcgaatggcgagcaggagcaccgacctccgattggtaaggaactatgtcacgacagggattagacatatgagtctcgactatagggacgactgcaggatcaacagtagttgacactggtggaacgagcatggcaacaggggtcaccgccatgggagtggtattctccattttagagagagaactgtgaattctacaggacttaaggtttctgagagtaaagtgagagagtgagactaatcactttccttaggccttaagtataggcaccctgacaacggctgaccagccaaggaaaaaaaataatgcttttttttttttaatttgatctttgccaaaaaaaatgtacacgcccaaaatgaataatttccaccacacattacggcacaaaaaacgaaacaaaccaaaagtcatcaggtaatgtgagcatagtgacctgaaaaattttaaatatgccagcaatatattcacatagcccatactttactagtcagataagaaatagacacttagagaccctcaaaattttagaaaaaaaaacaggtaacaactgatcaatgaacatgaataaagcctctgagtatttaaaaaaaacataaccggagcaatagatacacacatcctcaatgatactcatgggaacactaagacttgaatctccatacgtgtgtgagcagtgatctcatgtagtccacgaagagaggagatcttctggaccactctctcaatgaaacacaaactgttatgtgaatatctatggatgtttttttttcatataatgccttttttctttttgtaaaacactctggctttttctctattacccagacatggctttcacactcttctagagatgtagccgtcctctttggtccccaagaactaatatagaaggagcatactacttattagtaaaaaggttgaagagagctcttcccattccatctggaagaggtagcctttttatctggagaagattcaagcttagtatcatgcgaagtagcttataggagatggagatagaaatgacaacacaatgctcaaggcacgtttgaaatacaagaatactcataggccaaaaaaaatggatcagatgacactgagaacagtttagatagtatagagaccaatacatgttttttaatgagtaaaagtttgagtatctaaagctttagtgaaaagatctgctaattgattagttgtgggcacatgagatattgatagcatatttgaatcaaatagatcacgaataaagtggtacctgatgtcgatgtgtttagttcgggaatgccacacagggtgtttagagatatttatggcacttgtactgtcacaaaaaatggtcaatgtgtgttgtgggtgtccataatcagtgaggattttgttcagccaaattaattgagtgcagcagctaccagctgcaatatattctgctttcgcggtagaaagtgagatagactattgttttttgctatagcacgagactagattattcccaatgtaaaaacatcccctgaagtgcttttcctatcatctagacaccttgcccaaccagaatcactatatcctaccaaagtggtatttgtgtcacaattataccaaagacaatagttaactgtcccagacatatatttgaaaattcttttgactgcagagagatgggactgtttaggattggctttatacctagcacataagcctacactgaaggatatatcaggtcgactagctgtgagatacagtaatccacctatcatacttctgtatatagtggggtctacaggttcaccagactcatctcgtgacaatttggttgtagtgcctattggtgtatgtgcatgcttgacctgtgaaaacccaaacttctctaacatagacttgccatatttggactgtgatatgaatgtgacgtgatctagttgttttatttttagtcctagaaagaaactaaggtcacctatcaaactcatttctaactcactagtcattaatgtgacaaatgtatgtacttaactttcacaagttgagccaaaaatgatgtcatcaacatatatttgggcaacaaaaattcctttttcaacatgtttaatgaatagagtcctatcagcagtacctctgatgaagccatgg

SEQ ID NO: 125994 - DNA, 1090 bp, Cannabis sativa
cgaccatggggcgatggtttttgactctatcatgtgtaagactaaaggtttcagaccttttcggtttttcgaagcttggtttgaggacccttcttgctgggaagttatcagggaggcttggtgtaggggtaacaaagagaatgacagggggagtattgggaaaagtatcaatagaactcaaagtgctcttcgttggtggagcaagaatgtgttcggggactgtgaaaataagattaaggaactagaattggagctccaaactcttcaatccaaagaggttcataaagtggacgaggtggctgaggaggatattcttaaaaatttgagcgagttatggagacgtaaagagtctatgtggaagcaacgctccagagaattatggttgtccaaaggcgatagaaactcttccttctttcatgcgtccaccatggttcggagaaagagaaatcaaatatggaatctgaaaaatgccaatggaattttatgttcgaatttgaaggagattggttcgatcctgaatgagtattttattgacctcttctcctccaaaggtcaggtttcttatgatggtctggatgttttgataagcaattctatttctcacaatgagaacaattttcttacggtgatccctgataaggatgaaattagatcccatgttttccttatgcatcctctcaaggcgcctggcccggatggcctttcgggttgcttctatcgtaaatgctggcagttcgttagagatgatgtagtcaagagcattcagcgtttctttgcttcgggaactttggatccgggtcttaatcactctttcatttgccttatcccgaaaggaatcaatccggattgcgtggagcgatttcggcctattgccctatgtaattttgtttacaagattatagcttgcattatggcgcatcgtttgaaagtggttcttgatcatctcattgctcctactcaatcggccttcctccccggaaggtggattgccgagtcaactttgcttactcaggaggtagtgaatgttatcaagaaaaagaaagggaaaggaggtcttttagccattaaaatggacatgaacaaagcgtat

SEQ ID NO: 125995 - DNA, 2386 bp, Cannabis sativa
gttagttagggtgttacaaccatagtcactagaagacgaggtatcactagaagatggggtagaaggaccataatatccactaacatccctacaacctgtgatcctaaatagatcatagggattatagttctaaattccagctcgcgtctaaatgactcaccctatccatcatagtctcatattgctcggctactccatagtacgactcagtacaactaatttggacatggaatctgggataccaactgtcaaacctatttgtaatgcgatctacgaggaggggatgccaaatataaaaattaaagcggctatctcgaaatgtaactagagtgttacgctcagccctaagcagtatgggtgactaaccacatttattacctcgggatgctcattcaccgtcttcccaaggggcagtattctaaaggtactgagcctgatgcgatcttgagctttctcctcgtctaggatgggaacctgctgccaagaagaatacttgggatatttgtaatcacaaaaaaaatccttgtcagttaagaggtccaccgacctcagattaacctcatttaaaagaaagtcgcatgacctaaggccatagggaagagtcaataagagcctgcgtcgttcggccatcttaggggtaggggcaggtattttcgagacagttgtcgaaaacaaagtaaatttgcagtcagaaaaactagaataaaaggcatggattaatttaaccaagtctaatgcaaataaatacttacgaattatacgaaaaatggttgtgccgatgggggaaaggccggtcgtccagaagaagtcgtccttaaaagaagttttattgggcaaatccacgatgatcttgcgatcaccagtgtgagtcccaaggtagtagaaacctcccaccgcattcttcctcactggaacagccttaacagagtagagatactctatttccaaggcagtggggcactcccaatttaggattttgtatagaacactcaaacttgcaaggattctttaggagacgggattcagttggaatggggcaagcccgaggtggtttacgaagtctttgaaataatctcgcagggggattattgctcctgccttgatgtgcttaaggctccaagagcctattccagtcgagccacttgtactagtctggccagtggccccctcagaggactcacgtgtaagtcgcacaggtgggtaacaactaaacttgtcggctcatactaatctaaccctctagtctcgcttatactcaatgcctcaagtccttagtgaatcgcctacgtaacctgcgatggttcgcaccctcgactctattaactctgcctcgaaggtgatgttagggtcctgaggagtctttgatttacgtggcttgggagacattatttcaaaatccaagtcacttggttcaaaagtaattgtgactttaggtaaaatagaggtttagccaaaggaatattagacacactgggaggttcaggccaagcagcatctcgcaagaaacggtgtttgccttcaataatttcttgcaagaagcatctgtggcgacttgcaatgtcttcctaatgaattttcactaagttttctctaattctgacatcatttacctctaatttggatttggattctaaaattttgggtttgtaagggatggcaatctcagtagggtactcaatttcaaaatcttctggatgataaacttctgaaccagattgagacattgttgcaaggagaaagcaatcccaattcctggaagaaatttatcaaaccaaaagttggtaaattggagattttagaaaacctacgtactgtctaaaccctaacatttacccagatacagttcgacccaaaaaattgctaaaaaaccaaatgagataacagcgacgctgaccaagaatatagtaattgaacccataaacacaacataataagcatgtgagataataaggagaaaagtcacttactgtttgaagttgggttttgggacgatgaacgactctgcaatctgcgaatccccgaacgtcttgaagatccctctgaatacttgaagtcgaaaattaaatcagataaaactcgtaggaaaaatgccaatgacaaagatggcatgcaaggtttcaaaataatctgggtacgattttttgcagaaaaactcgaaaaaattccaaaattttttaaaatggcgaaagtaatgcaaaggtgtttccttttccctttatatactcttgggttaatctccgttagatcagaaagatgattaatctactggtaaaattcaaaagaagagtggaaaatatggtcattaaatgttgatgtaccttgaaaccacaaaaccaccaaaatcagaggacatgtgttttttcaaaagggattatgacaaatatac

SEQ ID NO: 125996 - DNA, 1289 bp, Cannabis sativa
agctttcttttatttatcattatttgaccttgtcttcatttttttaggattgtgttgatttttcttacaccatggataatgaacacaagagggtggttgagcttgctgaaaagctctcagttgtagaggagcgtgtcattactgtagaagattagctagctgacttgaaagaaaccattggtgctttagagaagagtatggccagcctttgagtggtggttgataacaccaaagcttgagaaagtatcttgaagaagagtatgcctactgctcaaaagaaaacattagatgttgagggttcttatcattcagaacttgatgagaagactttaagtattgataagcttgagggccaagttagatatctaagagagcaagtaagtaagttagaggagaaggctactgctaatgtcaccttttatgatggcttatgttttgatttcatctactgtgcttggtcatctaatagaggagcacagtcattcaactagtcagccttccttgagacagaaatcccattctttataaggcattgtgagaaatgcttcactgatgatgctttatagacgattgactttaacatgaatggtgatgagccagtggtcgaagaagttacaaggttcaaaggctaaaaccctgagcatcccaacattcctcctgctgatgcgctagttcagggaatagagtgggctattagattctattggatgagaataattatgtaatcatagtatattatcaactcattagatactgtgatgtgataggaataatcacaaaactcacaccacactgatacgtgtgatgcatgtgagtttaggagatatatatatatatatgtgcatgtgtgtataggtgagagagagagagtgagagtgaaaaatttaatcctattttgtctcagaaagtatcgtgtattttctcacttaactgtcttgtttgctattctgatatatatatcatatatatatataatgttataaacaaatattttaattaatcctttaaaattaaagataatatctaatttgattcaaattcaaatataaatatcatatatttgatcaatagaaattagttaaatccttttattttattattatctttttaattaaatagattatccaataatatatttaatttaatgattaaaagataattaattagtttaatttaaattattttaacaataaaatagtcaaagaaaattaatattaacctttatatgtcacattattacttgattgcaaatagccatggttactttttgctagatctaatgatctgat

SEQ ID NO: 125997 - DNA, 517 bp, Cannabis sativa
attatattaaactatatgggacctaatactaaattagatcaataacgttattggcacgtaagaaatcgtgtttgacaactagcttttagcatttctgtttttattatatgtataatacaggtcaacatcaatgaatagagtttgcattcaaatttctgaatttgtatagtaaaagaaacaagggcaatacaaaaaagtccccactaattaattcacaacttaacacaattttcaaggcaatacgtcctcaatatgtgtcttattatgtgttcttaaatagcatatgcatgttttttctattctttttcctccaccaataaacatgatctcatatctttatgtttacctaaataagaaattaatagacacatttattgtacattatcccatataatttgtttaatatatagattaatttttttcttaatatattaattttgttattattttatgttttttttttttttttgattttgaccctttttttttgttttttttttttttttttttttttttt

SEQ ID NO: 125998 - DNA, 775 bp, Cannabis sativa
tatatatatatgtatttttttgaaatcgttaatatttaaatttaaaacatttaaactttatttttatctttctattgaagaaactttaaattttgaaatggttaaccaattttatcttaaaatatgcatgaaaaagtaaattttccataaaaaaggagttcatatttcgatgcatacatgtagatggttctccctagagaaatcttttcttattgggagaaatgtttttagaaattgcacttgccaaataaaatttttaattttgcatgtagagatttttatgaaatattacctaccacatgggacttaaaaaaacaaaaggtggttctacattcgagttggcctttatgtagttttgatataaatattaataggcatgtaattttttggtgtagtgttttttgtcaaatttaaaaattcttacactttagttttattgataaggttttagtggatgtaagttttagataagttatgctacgagcttcgaacgagttgtcccaatcaaattttgagttattcattctttcagggtagtatatggaaaagaatcacaacattcaaatgtgattattttaagaattaaatttctttcgaatgagtagcagatttgttttataagtttcttaagatagctaattgttttttgggtttgtagtttttatgtgttccatctaaaataatatattcttagtattttatgttaaaataacgattactcataatcattaaagtcaagatttagtatttatttagagcatcaaatacaataaaa

SEQ ID NO: 125999 - DNA, 691 bp, Cannabis sativa
  modified_base (634)..(638): a, c, t, g, unknown or other
tatttactttttcagtatttttttttagtaaatgaatgagttgtattgctcaaaaataaactttacatctgtacaaatgatcagttgattatactcaatttttcaaaccaaattctatcctttctaagtttctactagttttctctttcaaaatgagaaaacctatcgtatatttcctttttgaagaagaaaaaagaagataaaaacactcgttagtcgtttattaaccaaaaatgcatgtgaataataatttttaaaaaacatatagatgtgaataataattttttgatgaacaaattttaatatagataataatttgttattttcattatgcatacatataataattaaaaacaaattttcatttataatattgatatttatatgaatcaactcaatttgcgtagcttcataagcaataacgtgaaagtagaaataatgattataataaaaagggtggatgacttttgatgaatgcaacttagaatacgtgtcaatgataacctaatttctctccaaaaactactcgtctaaatatatagagtaatttgcggcaaaactccattaactatcaatttacttgtaaaaaatcatcgagcctcatattttagtgggaaaaccctccaaagtactnnnnngtttacatttttaaggtgtcatctgtccagcctcgttaagtcctaattttgcc

SEQ ID NO: 126000 - DNA, 1080 bp, Cannabis sativa
atcgattgaggtctctaatattggctcaagtgttttccaaaattctttttggcaacgaatcattgcatttaaacattcatgaaaatatttgctaacaacttttcctgatcttttgaaacaacaactcgattcttatggtggtgtgctagaatgtgtagaaacattgctaccatctcctcgatagagacatttttatttttcttaaattttccctagtgctaagtatgttacataactcttgaaatgtctctctatccattctagttgtaaaacacaattgacatcacttgtatatactaatcatgcaagttttctaactgtttgtagactcttattatggataatgattgattgaggcgtcttctagaatttatccatgcataagcactcacaatagtacatacagttaaaataacatctaaaatcacaattaaattctacaccacaataattaacttttgctttcttactaaacttaaacgagcctttttatctacaaaaaataaataataaaaaaaattatatgacaatattaacatatatacataaaatacacataaatatattcgtacaacatataaagtaatatgtaaaatttcttagaaaaaaataatgtgtgtaaacaagtaactaacaaatatgttaaccaaaaaaaaaattaattaacaaacacaatatatataatatatataaaaagtaattgacaatatagcaatacaatatagtttttattcatgtacccataatgaataaatatacatatgtatatatattttaaacaataaattttatcaatttctctgtttcaaaaacaaaaaatatatattttatcaatttctaattttaatcgaataaaagtcaaatgttcttttgaaaaaaatgaaaaagaataaaattcaatgcctaacccatagtataatagtacaatttaataaaaaaaacttgaacgtgttgcttcaaaaaatatatatatagtttttttaagggatgaaataaatatatattatcactatatattgttataaatattattaattatgtggatgtccaaattttttatttattactattaattataat

SEQ ID NO: 126001 - DNA, 613 bp, Cannabis sativa
ttttgatgttatttttatgttacttttatgtagttttcttgttatttttgtattgtttctatggaaaaccgtaaaaaactttaaaaaaaattctttaaacgtaaaaatataatttttttataaaaaatggtgccttatgtaattatccctttaaaaaaataatattttagcaaaattttgtgaaaataaatccaataatacttacatttttactttagatataacacaaattaaaaaaaaaaaaattgagcccattgccctcgatttaatctaaaaaaaaataatataacttctttaataaatgcaatttgatcatatttgaagtatcgtgacctaattgagatctttgacaaaatcacaaagttgtaaaatggattttttttttctttttataaatataaaatataaaagataagcaaataaaacgaaatgcagtgtcaaaatgatttataaactcctatttaaatgaattatttttctttattgtaaaaagtttggttagattaacttatttttattgatattgcttgatgagtaatattttcatataatgaatgtttgattaacctattaataaacatttccatttacatttaaagaaaaataatataaa

SEQ ID NO: 126002 - DNA, 603 bp, Cannabis sativa
atgcaaatagataaactgagagaaatctgagtttttagttttcttaggttttaaagagaatgtaaatgtaaagccacgtacgtatactaaactgaaagagtgctttggatttctcaattttcagctctgtcaagattttttacacatacacaacatgcatgccctcacatctacatctgttgcctattagcccagctccaatgctagctagttctattttattattttttaaagttgaaaaatcaatatttttttgacatttaatttcattttctgacacctacctctcattagcacctgtattagagttgtacttaaagtttcctgggtagtcactataaaaatcataattcattaaccatatcagctgttcttttcatttaatcactaaaaaaacagctacttaatgataattttttactcggaacggaacgtaaattttttatgactaaatgtaacttttaattagaacaaaaagttacttgtgactaaaacataatatttaaacacaaattgtcactaatttagttttaatcacaacaaattattgtgactaaaaacacatttaattacaacaatttgtaatttttataactaatactt

SEQ ID NO: 126003 - DNA, 1765 bp, Cannabis sativa
aaataatttccaacacaaacatgggtatacaatggatctaagtcctgtaaagagttccatggtaggatctaaggcctggacagtgttcctaggcaggatctacatccttgatagagttcctaggaaagatctaagtcctggacagagttctcaagcaggatctaagtcgtggacagtgttcctaggcaggatctaagtcctagacaaagttcctaggcaggatctaagtcttggacaaagttcttaaataggatctaagtcctagacagagttcctaagaaggatctaagtcctacacagggttcctatacaagatctaagtaccaaaaagaattcccatacatgatctaagtactggatagagttcctaaacaagatctaagagttggacagggtctctaacagactcaaggtaccagtccaagacttgatcttgcttatcaaaaagtcatacattatgcatcctaaagttatcaagtggattataatgtaaaaagactactctaaactaagaataaaaaagtttctaaaagctttaaaaagcatgaaactcatcaatgacagattcaaagaaagagaaaaatgtcaaagaagagaagatgaggaaagttaaaaacatacatgggagacagaagataaaaagtttaaaagtgtgtcatctgaaaagtccaatacttggccaaacaaggctgcttagtaaaggctctgatagtcaagacaagagttgaaaagtccctatccgtatagacgtccaaataggagggtcttaggggcaaattttttcccaaattttgtccacctggcatggaatgtccacatagtcaaaagtagaagacacgtagagaatagatcgtcactaacctgccagattagtgcttgtagcctgacaactacctaccaggataatgcctacaacctgccaaccttctaggttagtgcctacatccttcaggctgctaggttagtgcctacagccttcaacctgccaggttagtgcctgcagccttcaacctggaagatcccatggttacatagtggacacaagcgcatacagatccatatacctaccaacaaagccctggccaaacgtatagctagtcgcccaggagtgccagcttccatacactagacaaccttcagtaagtttggctggccaaaacatgcaaacagctcttaactggctgaacaagttatgggacaggtccaattatccatgaagatagggatattcccttaagatattagtcctatattctagggatttaattatcctttttgtaacttaaatataagataaaaatgatgttaatattcctattttcaagggatatctttacctatttgaattaggatattttgtaagtcctacactatataaagggaattagatcactctctaagggctaagtcattctacacacactaaagggtctccacaagtcccctcacacgcacctaagagcttaagcctctaagtctctcttttcttctaagttcttgataagtttttctcatatcttccatctataacatacattctcacaattataatatttaaaagagccatagctagaaattacaaagtcttagcctatactatgcatggtattatctcaagagttaatacaactaaaaagagagcagatcattacccattcatcaagggattttaacttctataaatccctttgcacttttattattcattattattatttatacatggtgattatcaacaattaataaatctctgatatcagttgac

SEQ ID NO: 126004 - DNA, 661 bp, Cannabis sativa
aaagaatatgctaaaaaagttttatgtttatttttttcacaatttttatttacttttgaaattttaataaattcactccttagtgactattttaaaaaaatctcacattaattagatattttttaatgaaaataaaagtttcattaaaaaacaagaaaagcaggatctacaacgtgtaaacactgaggcttaaggaagaaaaaactataagaactaaagaaatcaatctcattcacctctaaaatatggtggaaagccttggacacatgccaatccgacaatctataagaaggttgaaacaatatgagaaaatcgtaactgaagtctaattgtagtccttgccccaattcaaacccatacttccaaagacaggcagtcttacaactactaagaatagaatatatacatcactatttattttattttgatttgtgtcaaaattaatagagtaatttgtcctataaatatttaagtttaattctcagttataaataaatacttaagttttatttttggcggtattaatacctaagttataattttgaaacttctgtagttatttagttaaataaattgctatgtggcaattcctgattggtccaagtcattaactttttattatttaaaaaaaattagttcaaatataccaataagaaaatga

SEQ ID NO: 126005 - DNA, 513 bp, Cannabis sativa
  modified_base (64)..(68): a, c, t, g, unknown or other
  modified_base (476)..(488): a, c, t, g, unknown or other
atgaaaatacttttgtttctttattgatatttaaataacaaagattacattgaaatggagtttnnnnnagggcataaaacccaacactacctcctagtagtacttggtccagcactaggctcagcctactcagcttcagactcactatctagaccagttgaggtctcctcatcctggctgaccatgggttgctcagccacaagttcctctacctggccatcccatggttgtttagcctcttctacatgacagaccctccctctcgtcatcaacttggcaatgtgagggtcctgaggaggtgccctacgtcacgtttgttttgtcatagccatggtaggcttggagtgcttggcaacagtaacaacagtctcaggtgcagggagatctccaatcaatagagttgcccaacctatgggaaacgtgtcaagcacaccgtccaagacaatataagtcctattggaaatattttaccaggnnnnnnnnnnnnnaccaagtatgttttattaacatcct

SEQ ID NO: 126006 - DNA, 681 bp, Cannabis sativa
tgagaaataaatgattgttaatgaacttttatagggaaaaaaagaacaaaaaattaagggaaaaaaacaaataagcttgcaaaggtaaaatttaaattgaatatatataatatttatcttacactccaaagtgcaaagactcaactttaattaactccaattaaaaataaatctccaacaaaatatacgtcaaacctatataaatacaacttaataaatctaacactctttgacgtccaacatgtctcctaaaaaaaagtctaaaatatctcttacaaaaaaaagaaaaaaaagaaagaaagagtccaacattgactctaaatttgatttatgtacaattttttattttcaaaaaaaaaaaaaatatagtctcactgccaaatagtgacagcattacaattttttagaatgcacctatatatctctaatggtatatctctcttatatttttctaaattaacaataagcaaatgtcttcaaaaaatttaaccattagagatgctctaataacaatactcatattttcaattatatatgatcaatttatacaagtacataatctgtcaacattatttaatagtttcttgaatctaatatgtaattccaaactctaactaagcctaatcaaattatttgtgatgagaccaaataatttttagagttaatgacatggtctattgt

SEQ ID NO: 126007 - DNA, 657 bp, Cannabis sativa
taatggatgcacatgtggtggagtcaagaagcttcaagagcaccaccacatggaatacataatgtcctttctcatgggcctctcggacaattactctcaagttcgaagtagcatcttgttaatggatcctttacccgagataaaccgtgttttccatgtggtctctcaagaagaaaaccagaaaggaaatcttggagctaccaatgatccaaactcgagcatggcttttgctttccgaaaggaaagaaacatgcccgacaagtctgaatctcaagggtcaaagaatcatcctcctaagaaaggaagacccttctgtactcattgcaacatacatggacacaccattgaaagatgctacaagattcatgattatcctcctggattcaataaacaaaacaagtctaaagacgctgtcaccaaccagatgcaaactggtgaagaaaccagtactactactggtaattctcatgcacttcttcctcaattaagtgctactcaataccagcaacttcttaatcttctttccagccaacaaaccaacatacctgtaaccgatcctagcttttctacaggtaatgcaggtatggttctttcttatgccactgtcaataatcttgatttttcttgggtagtggattcgggtgccactagacatat

SEQ ID NO: 126008 - DNA, 2230 bp, Cannabis sativa
  modified_base (1640)..(1642): a, c, t, g, unknown or other
ttattatgagaactagttttttttaacaagtaacatttagtttttgatattaagaatattaaattttaaaataaaaaaataaataaatgtaatgtatcttgaccctccacgtgtccatatttatgagttaatggtagtaacggctgtaagagaattgtaacatttggtatttttacctctaaaaataaaaataaagtatttgagtgtataaaatctaaaacattatatttatgctacaatttacccttatttattttaagatttatttcaaaaaaaatataaaaataacaaaaaaaaaattacaataccatagttgtacataattttaaatagtttgattgtctttaaaattttatttacaaaaaatgtaatcttttgatgttttcatgttatttttatgttgtactcttattattttgttgttggttttttgtacattattgtatgttgttttaatgttgttttacatattattttcatgttacttttatatagtaattttgttgtttttataaaacgctgtaaaaatataataaaaaatatttaaacctagaattgtaaataaattatcaaaaatagtacttatacttcgtataaatttgcctttgttttatacacaaagtatggatattagaatgagaactaaatagtgatacttttatatgcatttgatcaaatcattgtagttattatttcttagaaccttaaaattttagtgacgtttacattaaacatgtaataagttacgagaacatgttagtcactatttattttctttctatttttctctatgaactttggtcaattatgttatttttcaggtaaattttatataacaagcacaatccatgtattttgaaggaatgtgtactttacataattcattgtgagtgcctaattaagtaactctttgaaacactctgtatatatcaaattaaataaactagtaattattggtgacttgtgagatttgtacttaagaaaactattgtattttatcatattttgaaaaacaccataatatcatagttccatctcttatgtgcttggttttcttgctcggaccaatgtcggtcgtctctgagggctctggagtggtgttgcttcggatcaacactccctctttacatgttcctcatgaggtttcgggttacggcaagtggttgtcgaggccgggctttcgggttttagagcattgcttcacctcaaagttgtaacagttgttaactagtggatgaaatttcttcctaaaaaaaatcaaatcatccatttgtattttttgatactaaattttaactaaaactaacatatgtttaagtttatagggtgtatttggtaatacttttaattaattttatgtttttttaattagaaaagtgaaaatatttttcaaaaatatattctataaaattgtttccacttttttaatttttttaattgagaatcaaattttaaaaataaaaaaaatcgctttaacaattttttaaacaattttttttttcttaattaatattttgaactccaaccccaacttgaatattgggacttggatttcggctccagtcccagtttcagactcggaccacggccccagcctcagccccaaacccaaacctaacttaaataaaatcaaaaaatannnataaaaataaaagttatagaacactcttatactttctacttttaaaattaaaaaataaaagtggttaaagaagatattttcattttttaaaaatacaagtcttactttcatttttattattaaaatattaaaaaaaaataaaaatattaccaaacacggtgtaaatttatattagacacatgaattcagtctaaaattcaaataatttttccctttgtgtcatctatctcactcaatcctttctccctactaaagtccttagaaatagtttgactatccagttatgggcttcgattgggtcttaatcgtaaaaggctaaccaggcccaaactaagcttcactatatttcttctaaggttttcatatatattataaaaagaaagagaaaagaaaagagtattgactttcgtaaaacattgtatgtttggtagtgttgtaaaataattcaagatttattgcacataattagatttacatttgggaaattatagtaaatggcccgaaatcataggagtatgttagtttatgttctcaaaaaaatatagcaaatgaccctaaatcataagactatgttagtaaatgtcctca

SEQ ID NO: 126009 - DNA, 831 bp, Cannabis sativa
attggatgttggatgtattagatttttgaacaccccatccaacatcccatccgatctaattaaatattcaaaaataacataaaatctgatatgatcataattggatatccaacatttagcgatcgattataattggagcgatcggttatcattagattggatgatttatgcacaccctaactaaaaagaactattggttcttggcaccattctcaaagttattatatcattaagtaattaagtatcgggttcaattgtgcgacttcacctatagaagatgttagataccaccattggtactaatagcaatgctcttaaattaaagtctttcaccttaattttttaaatttgacatacatgttaattggttaacaatcaggtcattattttatttgtcatgcgtgaaaaaatttcacgaaccaattcacaacactgtattatagtttatggactatttttaacaagctaaaaaatttagggacacaataatacataggttataattcaggggtaaaagtcctaaatagcatataagttattagggaaacaattttattttattcatattgttttttttcattagtattggaattttggtctaatggaatagaatattattttggtaaaataactattctgttttgaaataaaatgaaatataattccaatacaaaatgaggaaaaaagctaatattttttatgcgatttaaatttaattctatcttttttttttttgggtaaccgataaaggttaaaataacaagggtaacaaaagttacacaaaaggtggggaggtttctttcatccaataaagttcattgtctatcctaa

SEQ ID NO: 126010 - DNA, 942 bp, Cannabis sativa
  modified_base (916)..(916): a, c, t, g, unknown or other
aaaagcataaaaacaaacaacaaaatccttagatttcttcaaaataatacctggagtcgacgggttcaaagttgtgtcaaaaggactagctgtctagactaagtaagtcttcatcaattcggttatcacctccttaaaagtcgtgcaggttcatccctgcaaaaggataaaggaaaatgaacaactagagaacatgaaaagacttagacaaaagataggttaactggccaaaacctaagggtattaactagacaaccttaaaatataaagcgtaatcagaaaagtataaaatcaagaatcacgaaccgaatagcctatgaaaggctattgataagtcagggaagattcagcctgagacatactggacagagctcctaagagggggctaagtaccgaacgagggcatacaatggatctaagccatcgacagagttcctatacatgatctaagtcatggacagagttcctatacaggatctaagtcatggacagagttactatacatgatttaagtattgaatatagttctaaacaagatctaagagtcggacaaggtctcttgcaagatgcaagtccaagactcgatcttgttcatcaaaaagtcaaacattatgcattccaaagctatcaagggaattataatgtgaaaagagtactttaaaacatgggacttaaaaagctttaaaaagcttgaaactcatcaatggaaaattcaaaaaaaaataaaagaaagaaacatcaaaaagagaagatgaggcatacatggagagagaagatcaaaggtttaaaaaatcacatcattcaaaaagcccgatacttggccagataaggctgctcagtatggactcctacagttaaggtgaaagctgaaaagtccctatctgtacagacgttcgtgttaggttttatgccctanataaaactctttacaatctgattagt

SEQ ID NO: 126011 - DNA, 1025 bp, Cannabis sativa
ctattcaccatgtgtgttctaatcgtaccaggttttattccactcaaaagaacatcaaattaacacatgtttaccaaatggaactaacattaaaatttctttcattggaactatcaaattattcaatataattcttgaatatgtgctttgtgttccaaagtttaaacaaaatttgatctcagcttgtgctttatctgattcagcaaactactcatttattttctttataataaatgtatcattcataatgttactaagaataaagtgactgggatgggtgaaaggattagaaatctttatttcttgactgagaatgactttcctgttgtttactttagggctgcacatttagacccgcaaacccaaaaaatccgaccacccgccccgatctgcaaacaacagtgataatactttgtggcattataaatttggctatgctttttgtgtgaagctctcttgtgtcttgaaaaagtaagaaacaacacacaaattcaaggtcctcaacagaagttgaatgtagaacaatgtcaaacaccacatgttaattggttgggttagtttccttagtgtaagaattaaaaattgagcatagaggacatgccattctacattgtgattataaaattgctcaacaaattactgctaaccctattttccatgaaagaactaaacatatagagattgattgtcacttaataggggagaaagttcaagaaggaaccataaaaacaattcacacttctaacaaggaacaaactgttgatatttgtacaaaggctcttcttcttaatcagtttcaaattctcaaagataaaacgagaatttgtaatatatacactcaagcttaagggggagtattaaagtttgttagtaaggtggaatgtgagttaagagttattgtagttagtaagtttctgctagatgttgttagctagttttaattgagtaaagctgtatataaaatatttttgtattgcttttttccaatcaatgaaaacatagtttttgggttttatgccttaaat

SEQ ID NO: 126012 - DNA, 1271 bp, Cannabis sativa
agttaaattctagatagctacttgagtttttaaaaccaagtttttcgaggacttgtctttcttagatttatgtagagattggaatgcattgttgtaaaggaaatcccccttacccttttctctgcaattttggtgtgctaactatcctttgtatcactttgtaatatggttttcctccgccataagcgagatttattaattcatttttaggagggtcctgtctaaggcttgcggaccctttcccttttcaaacaagacaaaacaagtagccacgcggattcaaaccgaaaaggggacagtacgacacaagggtgcactgcccttagggaaaacccacatattctcattaacatttgcaaaatctccacaaggttagaaatacctacttgaagaatttcgataaacaactctgtccaaaatcgaaggagagtcccccctagcacaacaccattgcagtcatcaacgaggagagacaaaacaacatcaaatctatccctctctaggcactcctagcccgtcaaagcctcaaaacccctccatcattgtcggtcttagccaaaaaaggagccacgagacctctccccctttggaaaaaaaaatcactgaaaacaaagggccatgaacttctcccaaccaatttgacaacaacctatttgcgattcacactcctccaaggaagcagcaatttgacgacaacggccgaaggcgagacatgagaagaagaaaccctaaacccacccagggaaaagagttttgtttttagcttaacttgtaggatcataaggagctagttactaattgcacccatgggacctaatattccaattgtggtgccaactattaatatgcttaaatgattcctattaattgtttaatgctccaaactaaggctactgttttcattattagagcaagtcataagagggaacatcaatagcaatagtaagcttacattgcatgtgtatttgtagtatcataataagttgcttgtcatgtgaataagaaaagcaataactcttttgtctactacccaaaaagcctaagtaaagcaataataatattttttatattaaaataaaaaaagttcatgggaatgatttttcattctttggcaaatgtgtattattcttgccacttctatttagaatatgtactacacttaggtgacattcggtaacacttttttaatcagttttctatttttaaaattgaaaaagtgaaaatatttttcaaaaacatgttctatgaaactgttttcacttttcaatttt

SEQ ID NO: 126013 - DNA, 714 bp, Cannabis sativa
  modified_base (595)..(601): a, c, t, g, unknown or other
  modified_base (646)..(670): a, c, t, g, unknown or other
agtaataaaataaagaagaagagtaaaaaagttgatatagccgtgtagtggtattggtgtaataaatattgcattttgtatttttgatgtaaaaatttcttttgtttactagttggtgctacatttgctttcggaaatgagtgggtgtacagtaaaatttggtacaactgcagttgttaatttgttataaaaactattttgtatttgaaatttgccattaaaaaattatatcctatatcaatgttaaatattcctttaaaatgttagataattattaaaaatattagtattatttaatattctattaattttctcagttattttactgatgtgaaataaaaataaattttactaaattttattttaatttaatctttaatatattcagttgtccaaatttctaacaaagtgatgtgacacgtaaaataaattttgtgacatagacggaagactccactcgcaacgaatcatggatagagatctaatgctcaaagtaagtaggagctaaactgtaatactctaggattaagagaatggattagaaaaacactaactacttaattgtgtatttttatggaattatattattatatannnnnnnatatgtgaattaatatgagatataatatgttaagaccccgttggnnnnnnnnnnnnnnnnnnnnnnnnntgacccgagaagggtaaaattgtgaatttaatttatttacgtgc

SEQ ID NO: 126014 - DNA, 964 bp, Cannabis sativa
taggcttaaatatagttaacaaaaatttgagttaacagtttgatgctttcattgagagccttcgtgaaaaaagctcagaaaaaaaccctcctggtataaaaaaaaactttctccatggttgacaacggagaaaacattgacactcttcatgaagaaaccacccactgtcctggaaaagagccaatcggctcctgaaggcgtcccaattcacaatctaaacggaccgcttgttccaggaggacccaacctgaggttggcccaagtacacgaaccacacgttcaaggaggatccaaaatcccggaacaaggtatgaagagcctcaaatgaacgttggtagagcccatcccaggccaattggcgaggatggtgcctacgattcaacaagatatgtgccaatcttcgagctagaaaattgccaactcaggcaccgcctgggggaggcaaacaagcgaaatgtggagttggaatgtgaggcaaccccagccagggtagcataggaacataatacacaaaatcaacctgatcctggagtgagaagaccacgagagagacctcgcggctcacgaaccaagaggcaggagacagctcaggagaaccctcaaaatccttaggaagaacaaccttgggaaactgagggtccccttgaaaatgaacaaccaaacgatcaactagagccttctcacaaaaatgagaacagaaggcgaccaaaaaccagagaacaagaaatccctcgtggaaacaaggggaatcttgggactcaacctagagcacatgggtcacgaatgaggcaccgccaatgttcttcgcaaaccaatagggaagggacacgtacaaaccccagtggggggcatacaaagaaccatacccaagggaggagaacagggattgaagaggcaagtgttacctcaaggcgcacaagaacccacagtcgatcaacgcgaggaggagaaagtactcatcgca

SEQ ID NO: 126015 - DNA, 1563 bp, Cannabis sativa
gggagccatccctattgtactgtgatagatattattgtaggtaaactctattaaaggaaagtattttctccataaacctttaaagtccatagcacaggctcgtagtaattcttctaatatctgtactatcctctcggactgtccatcgttccgagagtgagaagttgtgctgaacttaagctttatacccatatctttatgaagactcacccaaaatttcgatgtaaacttaaaatctctattcaaaatgatggatttttgagctccatgaagtcaaactatttcctttacgtacaattctgcatactgatccacagtataagttgttttcaccggtaaaaagtgtcctgattttgtgaagcgttctactatgacccatactgaatcatacattcccatggttctaggtaaaccaaccacaaagtccattgtaacatcctcccactttcactcatgaagcgctaatagttgtaataaccctgtcggtttctgattttctgctttgatctgttgacaggttaggcacttagacacatattcaactacgtctttcttcattctgcaccatcaataatagggtttcaagtcctaatacattttggtggtgcttggatgcaatgaataaggtatagtatgagccttatcaagtatttcttttttgagctcatcattgctcagaacacagtttgacaatgacctcttcactaatttttgcatcagacatggaatcatgaagagtttcttggcagctgcctatccataagcaaatggaaaagtggaagcaatcaaacaaactcttaaggatacgctaaagaaactcctagagcaagaaaaagggaatacgcctaagcaattgcatgaagtactataagaatattgcacaataaaaagaagcaacatgtcacacactcttcgctctaacctacaagtacgaagccatgataccgatagagctcacacctctatcctatcgaggacttacataagaccaacaaactaatcattagcttatggccaaatccttagaaggaattaaagagatcagagaaagttttgagcttagaattgcgacgtatcagcaaagggtcgcaaaacactataactccaatgttaaagataggaaatttaagctgggagacatggtgttacgacgggtattccttgaacattaaagacgcaatagcaggagtactcgggcctaattaggaaggaccatatgtcgtggttgaagcgcttgaactcagaagttatgagttggcacgctatgactacaacttagatctatgtctataccaaggttttaaccacccgtctaatttttcacaaatacaatgatctatgaagtcagaaaaattaaattcataactttgtatttttcatttctagcacaaccagaaatgaagagttttcacaaaacaacatctctaaaaactggtgttcagcttcaccagaacatataaatagagtaagtggtgtcaaaatatcacttgggcatcttaaaggacattccttggaagttttttcacttacccagcgtctaggttgacgttagatgtcaacctg

SEQ ID NO: 126016 - DNA, 1426 bp, Cannabis sativa
ttccgatctagagagagagagagagagagaaactgagaaacagagaaaagaaaaaaaaaataaaaggagtttattaccagaggttgatccggagtttagtgccttaaaaaaaaaaaagaaaatcgcatatctataaaaatcccgcctcacctctgtaaacccccaaccactccacctctgcgaatccaaaatgtgccttttcctttgaccttgcctaacgtcgcatgcccatcgtcaacttgctggattcgttcgtgtctcaccagcgatgaaggaggttgagtcgttgagtgagcgatgatgaaggagcaagagagagaaagagggtatcgactgggacagagaataagaaataggaaattagggtttttaggtttataaggttctatttagaccccctctattttttatggctgaaacattttttttctttaattaaatataaatttcattcattaagagaaaaaaagagaaaatatataaaatatttattaaatactattttttataactaaattaaaaataattctacaataatattttctttttgtttaaattgctgaaacttttattttggttattcttaattaaattcaaatttcttctattaaacaaaaaaatatatatataaatttcttttattaaatacaatttttttataactaaattcaaaataattctccaataatttttttttctttcacaataatttttttggaataattttgacaataaatttttaaatataactaatttctaaaatttctaattgaaaatatataaattccaaattttacaattttataaattctcaaattattaatttattaagaaaaaaaattctttttttattttttaaatttgattttttttaaaaaaatttacttcattaaatacaaatttcttttattaagcaacaaaaaaatacaattttctttcttttttttaaaaaaaaaatctgaaactttattttagtatattcttttattaaatacaattttttttattaagaaaaaaaaattaattagattttttttacactaaaaagaacatttcccaacagtttatcactgttggaaataataagtattcccaacattagtattcccaacagttataaactgttggcatcaattatttttttttaaaaaaaaattccatttagtattgtccacggttctccaccgttggcattggtttttcccaacggtttttttgcttcggttctaaactgttgggaaaagtctctgcttactttttctaacagtttttataattgacccccttattaaccgttgggaaaaactaattttgaagtagtgaagttgttactactacttaacgactttctgttacattttaggttgtatttcttggtctataaataaaggtttgctacactgttttcgggtatgcttttagctcc

SEQ ID NO: 126017 - DNA, 1930 bp, Cannabis sativa
  modified_base (38)..(40): a, c, t, g, unknown or other
cgtgagaacgagcaggtggagattgtacatgtcggggnnnttaggcctggagcgtacgatcttaggggacaccaaggctttcgctagcaatcgctaggtgataaaacttttatgttaatttagcaaacttttgtaaatgtattttgtaacgggatcctaaaattttatatatgtattattataagtttattaagtaaataaggaaatgtaaattaatcatgtttttcaataaccttgttgattagcaacgagctgcacaatacgtttaaaatcatactaatacgcctatgttagttagggtattacaaagtactacgaaataaaaattatattgttagctaaagcgctgtggatgagcaacaagattaaaggcagcttaagaattaatgtcgttgttgcaggaacggtatcctgagttgtttagacaaattttgagaacggaatttctataaggaggggatagttgtaatatcctggaaaatataatgatatttaatttgacgtattttattaaatatgtgattatgtgggcatttgagtaggattataatcttacttaagataattacaaataattagtgaaatataaataaacgaataaataaagcgtaatttatgaattacagagattttatcagattataggagtcttgtatatactattttcaaaataaaatatttttcgggttcggcggccgtggaaactaaacggagtgattagaaatgtcacgacaaaataagatgaattgtattggaattatactggcctagtttagaattttaagttgtcggtttggcgagattagttggaaataaccaaattaccctcacattttattttaggcttaagtgtttattttgaagggcatattagtcatttgttaagattataactttatttgtcttattaaggaacctagagtatgctaggctaaaaatgactttcttgtattgagttattagaaactaaattaagaattaaggaattaatcataagaagcaagaaaaaccatcttctctccctcatctatcgacagccctaaaagtatgcagaattggagcaatttcttcatcatatttacctcttctcaattgatttagcaaggttttagagttgttcaagcatggtggtaagtcttacatcctttccctttgaattttttatgtttggattagcttttgcttagggcttttaagattttgcgtatatgttgatttatggagttcatagattgatgtttaagaacttaagttttctcactcatggtgttttgtttattttgatgaatttctgggtgttgattgatttgttacaatgtttttatgatatgaaagtgttctagagggtttgagcaggtttggtgaagaattggttgagttttggagcaataaaccagagtttcccatttctacagcaaagaaaccggttaaccggtttcataggaatagtaaaataggtcaaccgattttgccagcagaggaaatcctagttttaggcatcgaaacaagttttgtttggggtgtttcccagagcttagaataggatattttaatgagatttgatttattttgaactaggggggagtaagatatgtttatttacgaaattagggttatttcagaattttgaataaatttatttatcgagcttcattctcgtgatatagaacccgagatcgtcgagcgtagttcaactcaagtcggcctccacatctgactattggactaaggtaagaaaaggtttatgcaccactaagtggttaaataagaagcgattataatcgttagtgcctcgattaagatcgagattaatgttatgtatttgttgtggctcgactattatcaaagtgatgatgaggaacgacgtttgtgctgggttttatgccctaaataaaactcatttcaatatactcagatttacttattaata

SEQ ID NO: 126018 - DNA, 2929 bp, Cannabis sativa
  modified_base (27)..(27): a, c, t, g, unknown or other
aacatgattaactgctaatttctaaantaaactaagcggtctttacatactcatacaatcaaataatcaataatggggagattattctagcacttcgtacaatggaatcaatcaatatgttcaaccaacttcttactatcctcctatagaaccacaagatcaagatcattctcttactatgctcaacacttttgtggcttccagtattcagatggaacagaataatgcacagtttcaacaacctactcatgttgcatcatatagtgaaaagccaactattgctgagctgattaaaatgataacagcttataacttgcggattgaataaaatactgtgcagtttcagcaaaactttcagaaaattattcagagcgcccaaaaatctttacgaaatatagagaatcttgtggagtaaatagaaacatctatgagtgaatatgaaattcaatgttcaaacgctatgccttcacaagtggagagtaacccaatggagaatgtcactggcatcactatccaaagtggtacacaacttgaattaccaccacaccaagaagttaatgatttgattccaagtggtggagttaaaaattcatcccttgaaggatcatctccaccaaaggtttaatctcatactttagttggtccatcatcactgaaaaatccatacaaaccaattgtaccaacttatgtcactcctccaccttttccaagtagattgaaaaaatccaagaaagacgagcccgtcaaggaaatccctgaaactcttcccaaaattgaggtaaaaatttcatgtcttgaggtaaacaaagaagagcctcattgtgctaacatttttaaggagttgtgtccaaacgagaaaaagttcaatggtggtgagaaaataagtgtgggaaagaatgtttccgttgttctccaagaaagttgttgcctaagacaagtacaattcaatgcataattagtaaaatcaagtttgatcattgcatgatagatttaggagaaattattaataatatgtcttattttaattttgcttctttaaatcttggttcgttaagagaaactcaagttttgattcaattaactaattaaactaatgcttatcctttagggatatttttttttttggtagggaactgatacaggctaaaacaacaaagataacaaagttacacaagagtggaggattttatttcatctataaaagttcattgtctatcctaagagtatgtagagataccctaggagaacttataaaactttaacatcagaaaagaaaacctctaaactaagagttatagcttccgatccaccaatggaacacctgttctcgtctccattgctgaaggtgactacaatacatctgatgagtttatattagaccatactaacctcacaaaattaaaactaagcataatgattttacaaaaccaaaattagtcatactcgccttaaaaaacaaaaaaaactagtcatactagccttacaaaaccaaaaattaaccatactaatggacttgaagatgtttttgtgcatgctaatggacttgtcactctaagtgagtcttacataattgagatggaagatgagagtgatcccaatcctacatcaactctatttgggagacctttcttactcactacgagtaagaagttggatacgaaagcatggatacttagaatggatttcattgataggtacataaggaatgagtctttgtaagaaggccaaacgtgaagaccacatgagcacaagatgcagtcgagctaacgacgttaaataaagcaaacttacgagagtttttctaaccctttttttattttgtattgattttatttgattgagccttgaggacaatgcttatattaagtgtggggaagagattaattgtcgtgtccatataggttttttttcttagttgtttagttatttatttttttttatcattttttagtttacattaattttttatctttaattttagtgagcatggtttgaataaaattcggttgacaataattgctcgtgtttgatgtgtgtttttactttgatgtcttatgcataatcttgtggataataattttgttgatgatgaaattcttgattgtgtgatagttaagattctaggaaaatgataaatttctatgatttgtgtactctggattacttactactcaagcttcatttttttaacttttgcacaacaattgaattatcatatttgctaatatttaaaaagataaacgcatttttgacttttgatttaaagtctcaaccaatctagaatttatttgattattatttgaggcaaaattgataaattacatatgattttgagatatgattttgttcaagcctacccaatttgttgattcccttgtaacccgatttgagcctagatattgacatcttattcttattttaactctatacaataaccttttgagccttaaaaaaaagtcattgttcattctttttcacaccatagtatattgatgtcttatgtatttgtaaaagtgtgagagttttgttagcgggaaaatattgatggttatgtatgagttgtgaaaaaaaaaaaaactattcccttggaatagatgtttgtaagttgcaagtattttattgaaaaaaaaaattaaaaaaaataaataaatgaaaaaattgatgagaaatatatgaatacttgcaacaatttaagtgtgggggagtaataagtcttatggaaaaaaaaaagatacaagattgagctgtagagggaagtgattagggagtacaaatgtaaattatttgagataatgttgtatatgtatgttatggtgttatttgggcctaaattaaccttcttatctacctttcaccctagccttacattataagcctaggccagtttggcacagctgtgctgtgggaaaaagcagctgcagctgtgctg

SEQ ID NO: 126019 - DNA, 1056 bp, Cannabis sativa
aaaaaataaaaataaaaatgaagtatgcatgcaattttaatgtcaacaccataaataattgattttttttttaaattaaaattttcataatatcttaaataactataataaactgatatataaaagaaataaagagtataatttttttgatctcaaaataaaaagagatctattagacattagtacatcttctttgaaagttacaccaaaaaattacacataataatgataattgtgacataagtacttaaagttttgtttgtaatcagcataaattcaatatctttttagttacataagtatctaatgttagtaaaaattgtattttacgtccaattttattaatacaaattcaatttgaatttaataaaagaaaatttaaaaatacctcatactacatatttctgtacagactcaatgatttattatttgggtcttacatgcgtcttattaacgaaaattatatctttactaacattaagtagtaatgtcgctaaaaaaatcattacaaactccaaaagcttgactacttatatattgaatgataagtcacatatttatgctactatttagactaataaaactcataatagttctccttctcttgcaaatcctaatagacttaaagaactcttaagaggacccacccacttagtagaagaagtgaaccaaatctctacattgcacaatcatcaaaagaaggaaaaataaattataaacttaatcaaagaataaacaagctacaaaacaaagcatgtgtatcaactcaaagctataaagttattatttttaataatttcaagtgagaaacccaaattattattagggttaggaataggaagagaagtggggtttgagtgttatagtagctttatagcaacaacaacaacaaaaaaacaaatggcacatccctgattttgaggccacaacacgtgagccatggccaaaccaaacccatctttctctttcactaattaattaacaccaattatcttaattaatattcattattttattgctttattttttttttaattgataaagttgtgtattata

SEQ ID NO: 126020 - DNA, 1303 bp, Cannabis sativa
  modified_base (27)..(33): a, c, t, g, unknown or other
aaccaagaattgccgttagataggcannnnnnntatataaagatatatatattttaaaaaaatattggtgtcaagcaaatcaaagatagagggaccaaaaaatatactccttaaaacaaaatggaaaagagccttctaatatattaaaagtttaattagtataattgagaaattggttccctacttttttttttcagcaaattagtcctcaaattttaattttttgttggggtttaataatactcgttaagctggcaagaaatcatagttggaggataactttttaagtgaaaacaaagttggggaccaacttgttaagctatgtatagtaactcccaatagattgaaactttactgtttaaaatattttactaaaatattatagtatcgtttggtaatatttttatttttttaatttttaaatcacaaaaataaaagtaaaatttttgcttttgaaaattttatttttgaaaaacaaaaatctgttctataaccacttttgtttttcaatttaaaaaacagaaaacaaaagcgtgttctgtaaaattcatttttatatttattttttgattttatttaagtcgggtctaggtctagagtcgaatctgagtccgggttaggagttaggtttagtgccagggatggggtcagggttcggttcggtttgggtctagtcagagtcataaatattgattaagaaaaaaaattgtttaagaaaatattaaaagtaatttttttttgttttcaaaattttgagtctcaattaaaaaatgaaaagagaaaacaattttatagaacatgattttgaaaaatattttcacttttctaattttaaaaactaaaaacttattaaaaaagtgttaccaaacgtcacctatattttttattttattaaagacattgttatcaaatatcagtggtgcctagtactaccttgaagtattgtcttgcaaattaatagccatattccataataattattaaattaaattgtgtgggatcaatacttaattatactaatagcaatataatattttaggtagtgctaaacaccaatactaatgccctttagcacttttttggttaactctaacttttacattacatcatgcactatttttatatatattttttttattaaatcatttaaaaattgtatttttagtaattaaaataataaaaaaagaagacaaggaatattaaaaataattaatttagaaagagatggaataaataaaataataatttaaaaaaaaaacgtttagggcccgtttggtacgcaggattggactggactggacaa

SEQ ID NO: 126021 - DNA, 768 bp, Cannabis sativa
gaatacccttatcactatacccaaacaccaaaagtaaatatacaatatttaatatttaatattaaggtttaaaggtttagtttttttttttttttgaaagaaactttaaggtttagttaaagcaccaaaaatctccttaaaaaagaaaaaattgcaccaatactatgtgaagaaaatattaatagatatgtatatataaaaaaatatatatatcaaatccaaattatatatacatccttaaatatgataatacaaatatataaaaaatttacgatgtaagtccccaaaaaaatttagtttgatgtagataatttcaaaaattataatagtaatctccaagcttccaattcttgttagcccattttaacctatcttttagagtcttctaaaatagacatgtgttaatctattattgattgaaatcataatttaaaataaaaaaaaaattattaagtttttttatctttttttttattaaaaacttattaattttttaaaaaatattttttcctttttttttctttttcattttctttcttgagccttcctctttcagatctatttcactccaacgctcttctttctgatcctccatcaaagcttgttgggagaagtcagtggttccactactataaaaatagttttttcctgacgtttttaatcagtcgtttaaaagtattcccgtcggtttctataactgtcgcctatacgaccgtcataaaacgggcaaaataggcgactgttaaaaatcgtcgctaatgtggactt

SEQ ID NO: 126022 - DNA, 810 bp, Cannabis sativa
tcccatggcgaagaagcagcgagtgatccgaaagcgagctatttgaatgtctagtgagaatgtatgaaaaaaattgagaaagaagatgagaattgagataaatcaaaaatcggcgaaggtccaaaattttctaaggctcttcaagcaagggaaactggctgttctaataccagctcagatagaggttcgagcttgaagggagagaaggaagttgaggctctttcttggaatgataaaagcgaattctcagtcccaatggaaacacttcactaaccaaaaattgaatattcgagagaagaaactttatttcaaggaactgttgattagagatggagtgaaaatagctcaggtggatgttgaagagattaagttgcaggtagagtgttgggattctgctatcatttgtatggttctaggagctaatcctccaattgcaatttttgagggtttcataaggagaatttggggtaatcctagtgttgctgaaattgcaagaatgaatggggatacacgattgtcaagtttaatgatgtttctacaagggatcatgttttggagcatggagtagtgcaatttgattgcaaactagtcataactcagccttggtattcagatctaaatgccttaaggttagtaaaatcggttcctctttagattagattgtataatttaggattacattattggggtaataattgtctaattgccttagttagcacaattagaaaaccatttatagctgataaggtaactaaagaacgttaaatggtgaaatttgcatagcttgcccagccttgcttctgtgcgcgt

SEQ ID NO: 126023 - DNA, 924 bp, Cannabis sativa
aaaactaatttagacaaattaaattttcaaaacaaatcaaatcaatctataagaatggattcatttagttcgaaactataatttgtatttcataaatattctatttttttactaaattcttttagtttttacagcttaaactagtaaatgacaatgaaaataaatattctcaaagttatattaaattattatcaatattatgtttaagattgtttcaaaataaaaaatcatatatattgaatatatatataaaaaaaaaaaaatagacggtttggtttagtttgaattacagacaaaaattttaaaattgtgatccaattagaaaattaaaatcggtctgaattaatcaaaccattgacactaaattcattttgtttggattggttagggtctgaaactacaaattgtaaattatatgcatagtcctaattaaagaggccttaaattaaattgagcacaagtggtggaaaaattttattgttgaaatgattgtttagttactgtacaaacaattcaaagtgtgctaaatatggcatcttcctttgatttttcgtgagtaattgtaagtttatattaacttctttaaattatgttaaaatttgttttgctaaatgatttacgaataagattgcatatggtattattcgtgattcttgttcatattaagattattattttaataaaaatcataattgcgacaaaagtctccaaaaacttaaggttgatgcagattagttcccagcctcaaaaattagtggtaatagtcaccaatgtcacattttctgtgagtccgttggtccctaagataactgttcgtttattaattttaaaaataccacgcgttgaagtattactggtctaaattataattttaataaaaaaaaattaaaaataaaatacactaatttttttctttttcttttt

SEQ ID NO: 126024 - DNA, 553 bp, Cannabis sativa
aaaaaaaaagaagaagaagattatagatttcggatagtaaaatacctttaacttacataaaagtttttatgttatgcatgatgaatccatgatctaattttatcgcaaagatcatcataaatgtatcgtttttgaaattatttttgcgtcaaaaattaattttttatgtcatcattgtaaattcattgttaagcattttaaatccatcattacattttttttttatcaaaaataatattttcaccacaattaaatgtcattttaaaaattctgaaaacatcgttaaccatcgttaaccatcgcaaacgcataatttttattctaaaagaaaaaaatacaaacaaaaccaaaaaaatcttatacttactcgaattccaacaacataaatataaaaggcacgcatggtgcctaacacccttgtaaggtataatatctttcttaatgcaatttaaaatcaaattgcacttatttcaatttgataaaaattatacaaaatcgctaactaagggtgcgtttggtaacactttttaatcagttttttgtttttaaaagt

SEQ ID NO: 126025 - DNA, 774 bp, Cannabis sativa
  modified_base (706)..(725): a, c, t, g, unknown or other
cataaactagtattatgaaatgttgagaatgtgaaataccatgcaatttctcaagaaccatcacagcttcttccgaagtgtacttcccatttgcatccaaaataaacaagcattggggctgagctaattttacagctttaataacttcgagttctgcatttatgtttaatcccatatcgaaccttatggtattgaacccttggccatagtactttgaagccaattgagaagctctagctggagatacaattgggatctgtagattatgagaccaaatttgagaaccaaataattgtattcatagtaattaatactactatttaaaactcaataaaaattgataaataattgccatatttaagattagcatgaatgtggtacgtactgttatggaagtagttaatctatttgaaacaccaccaaataatctccacagaggcacatcaatgctattggcaactgcatcaatcaatgccatttccactcctgccctgagcttcacaagacattttcactcaaaatatataagcattgttattaactaaacactatattaatgcagtacgttataaatgatcctatattatttattcaacaaaatatgtacaaattgtgccatcaatcatatgtgacattacgatgccttttaacatcttaaactcaaattaattagcaatttttcctccaaactttgacatgtactaannnnnnnnnnnnnnnnnnnnttggccgttaaaaattctccctgagctattaagattgttaaatttaagg

SEQ ID NO: 126026 - DNA, 1317 bp, Cannabis sativa
ctaattagcgttattttaaatatacaataagaataaataagtaattttaatatgcattcatcgcgatgtggattgcagtttgaattgggttacgatttagattgttccatgcgctatactgtataatctgtaaaaatgtaaaaaaaaaatactttgaatgtataaatgataaaactctattaaaaaattaatttatttcaagtatacctattagtaacttgttatagcaagttataaaaaatataatcatgatagttatatttttaatgtaactatcaaatagcgactctattaaaatatattcaaagaattaataaacataaaagtatttgttttaaaatatatgcaacatcatttgaatattttctctatttttcgcttgttcatttgaagaaagaaaaaatatttattatgagcgatcttaagtggaaaaagcattggtgtttttactcatattttctcactcaaattttttctttcatcattttttcttctcaattactttaaaaatgtataaaacagcaaaatattacattgcttataatatagtacactatgtataattcaacaatatagaagagatacttaactattttattgaggtaattaaaaaataattgagattgctaatgcaatactaacctactaattgttctttcctatatctctaaaactcaaacagatcatatcatcaacaacatacaattgtaataagataatacatattaattaatttaaaaaaagaacttagcaacataattctaatcagactttctcattaaagacttcgattaattagaaaaatctacaatccccttcaactaaattttacacatatattaccttaagaatgggctcatttggaaagttgggaatggtcagaacattcgtaccctgcaggatacttggattcctaatctcaggacccttagatacaaagataattcatctcttccttctgacagagtcagtttttttattaattctagtggcacttgggatttaaatcaattatccaattactttgaccatgacactgttgcaaacattcttcaagttcctattggaggtcatgacaaagccgattgcctcatttggaaaggagactcttctggcctccttacagttaaatctgcctatcattttgccaatacttcttccttacctccctcttcttctaatactaacttttacaatagttggtggaaatttttctggaaccaaactcttcctcctaaagttaaaaattttggttggcgtactttccaccacatcttacctacagcctttaatctgtataggaagaaagttgttccc

SEQ ID NO: 126027 - DNA, 666 bp, Cannabis sativa
ttgtaatacaattacatgtagaggagttgatattattttgcatattgtaacgtttattattttttatgttatttttttttattattattttacagttgttttaatgttgttgttaaagtattttataattattttttaattttattgaaacacattatttttataattttaatatttttaaaaaaaatagttttgataacttattacaataaaaatataaaaactaataaaaaacaataataatatgaaaataaaaatataaaaataagaaaagtattttttttttttttggtaataatttattattatatgaatatcctgtaagcccatgcaatagccagtgacaggtggagtaaagcgaacatattgaaaagagagattttttgtttcaagaaatatctgccacaaatgctgacgtggaggcatatggttggttaagatctgataagaattgtgtgctcgtaaagcactcaaaccccaaattataacccatattatcatcacaactttctcttcaatcaactacatttcacatttcgcttaagcatctcccccaaaaaaacaatatcaaaatggcaaccacaatggctggcatgagcctctcggccccaagaatcgtagcaggagtagactcagtgaaggtccagcccttcaagcccgccacgt

SEQ ID NO: 126028 - DNA, 600 bp, Cannabis sativa
cgagggtaccaccctaaggggaatactacctcccttagaggattaaatagctgagtcacatcccaagaggtaccattaccgtaaccaacacattcaaaattcaaattccgttataagtttgatggtggttacaaatctacgaaaaatagtgggatattaccacaagaattagactttaaccccatctgaaaattaagaagacgatttaaatattttcgcagtggtcgtgtctcctgaagagaaaagcaccaaccctttccctatataaagggccacacatgacctaagaaggggaggaaaaattcagaaactctgcccaatttcattattgcatttaagagcttgttcttgactttgcaactcaattaataaaaaaaatacaaggggagtaagttattaccgatatctaggaccaaatctttttaaatttcggtgttcattgtttacatttatactcttgttttggttatttgctcattaattacgactctgtattagttggctaaaaattcagtcaatattaatatttgattattttaataatattttgagtaatttgcggcataaatacctaagttttatgccgagtagcagataaat

SEQ ID NO: 126029 - DNA, 789 bp, Cannabis sativa
gttgttttagttatttcaaactttcaattgcattacactgggtggtgtttgattagaggtaataaaatagaatgaaatggagaggagataattttcattccttttgtttgtttggttgtattttaaagtattaaaatatcattctaatggaatgtcctttatactattgtggtggaatgactattttagtttaaaatgggaggaaagatcattccaaagtaacatgagaaataatttaatgatttttttgtccatttatttttatgtattttaaaatttattccattaccattcctatttttattcttgtttttattcctattcttatatttttatttctcctaaccaaatgccatcttagtttttacctattttttttttaatattcttcagttaatattaaaattagatgtgtaattgaatatctaattaaaaaccaattaaattcaattagtaattgaattagattggattgaattttgaggtttaattaaatcagattgtatcataattttctaaattcaattactaatttgattaaattaaataaagagaaaaaatattaaataggatcggtgtccatccctgttataatgtatacaatttaaatatatcataattattacttatatttatataattaattactattgaagtagaaactattaatgcttttactatttctcttttttgaatgtcagcctagaaactcttccggggtaaagcaattatccattattaccattataaaaaaaaaaaaaaaatttaaaaaaaatacaaaaaaaaaaa

SEQ ID NO: 126030 - DNA, 2342 bp, Cannabis sativa
gttatatttgagttttattatcaaattaattcatttataattgataaatacatatttattatattattatcatattataggattttttaacgtgtcgtgttttgggctagtctaatttgttcatgtgttagtagtacgaattcattgtgaccagtggtaaaaaatattcaaagatgggtagagttagggttttcaagcttcaatttagtgttttggcaaggtgttactgattttaatccaaggtaaaactttctagcctctctatttgtgatttcttaagttttagttaagtatttatgcatgattttagagttagggattctctgttgtttaatgatgtttgattttgtgttttgatgttatgttgaggttatttaagctcttttatgttggatttgttggttgttgtggtgattgagcaaggtttaagtttatgaactcaagctttgctctctaatggtagtttttgcttcgggggttattggttggttcttttgcatgaattctatttattgtgatataattaggaggtctggaaggtttggtggcatttgggatcgatttgaggtgtttgtggtattttttgaagtttcttgcactggaattccagttggtccccagaaaaccccacagaactggtcttccggacggggaaccgatcttccgattggagcaattttgggaaccctagattttcccatttttgcaatatttagggttttgtcatgtattccatcaatagaaacttctagttttgattttaagtccctaaaaatttatatagcgtatcactcatctgttttacgaataatgtgatttaggagcctataaatcgtcgagcagcagttccactcaggttgatcggcacacctgaatttagaaataaggtaagaattgtataatgatatgcatatgtatttacatgtttagcatgcatgtttatggagcctattagattacattaatagttgtatcagtatacgtagagttgtaatagatactgatagatgtatggttggctcaagtacgagatcgacgctatcacatcggtacgagtagagtatgattagagcaccgagtataggctgatattttggtcgatagtactgtcgtatgaacgttctagactcagtaccgtgtggaattagtaatagatatatttatataaaactgggattagtaccataaataagacatactttaatttagaatcctaattgattcattaaaatcaattaatgttatacccgaaattttgctggcacttcagaggacacgtgtcaacctagaagaatactaatcaacgaatataatggtaattatattagaggatattaaaatagaataactcattaaatattgaactggtagagtatatatataactcgttgactgtaaagtcttgagcgagacacagatatacaaactattaattcacatattgatgagaaatcatttcgtatatgaagacatgaacataaggacgacatcaataatacaaagcaaggcaccaacctcgctacgtatgaagagatatatacgagacatggtgactgttaaaacacttagcgtataatatacattatgcaaactaagcataacagttgaatgaacttgaaaacaaatagcgaggcatctatctcgctataggaaggcatatgataactctatggtataaagttatttttcatgcttttaaactaaaagtattgtgagaagagtagtgaaaatgtgtttgtttgcttaattttagttagttttagttttattttttatttagtaagctaacttttaagtcttgtaaaaattgatattgctatgtgtgtttttctaattaattttgcttgtttgttgttgaaaaaggaagaattaaattgataggaaaaagaaaaggaagcaagaaagaagtgggaacaaaaggtgaaattggggcaaattgctgaagcaatgctgaagcgaattcagtattctaacagtgacgtggaaacacgagatttacttgtccacatcaacaggagtgtatttgtcactaaaaatgagaccagctggaagctttgaaaggggaggactaaacctagtgggccaaagtgcaaaaaggattgggcttctaattttagggtgtgattttgtaccctagggacccaacaactaaaagaggagaaaagccaagtacaccaccatcatcttctctctaacatgagggcagctgccatttttgaagggaattaattgcataaagtacagagtggaagaaaagagaagggggacccaagtgcaagagaagagaaggacaaaagctctatttgtttgaatttctcttcccttttcttttatactttgtt

SEQ ID NO: 126031 - DNA, 1443 bp, Cannabis sativa
  modified_base (27)..(53): a, c, t, g, unknown or other
  modified_base (102)..(123): a, c, t, g, unknown or other
atgaatctatacattatgtacatatannnnnnnnnnnnnnnnnnnnnnnnnnncaacattaaatattatttctgatcgatattaataagtaaatctgattannnnnnnnnnnnnnnnnnnnnnggcataaaacccaacaccttgatccatgaccgtatctaacagagttcctttgccagtagtctttcatgtttttaccatgatcaaaggacggtgaacactactaagcttcctttagctctaaatgaaagcaccaaaatgtttgccgagttttttgaaaaccaaatgtatttagagcttaaagaagataagaaataataaataataaacagatagatttttacgtggttcaggcgtaaaagatccttagtccaggagtctattgtattggcctctttgggcaaatgtttatgagatagcaagatggttatagcaaagactactctacttctcttgatagagagctttcttggaatttttgtagagtgactggaagtaaaaaattcttctctcccttcttgatgaaaaataggactgtttataggcacacatgggtaaagggcataccctttacccgccaaggattttatactccatacgccaccaaggtcagtactgttagaggaaaatctgacaattggttggcaagaaccttcttcatcgtgtggtgtacaattgcttgtgatgacttttgtacgatccaggacacgcatcgtgcaaaggtctctcctttgtaaaatactctctagccaggccttacggcaaaaaaatatatttgaggatgcgtatgcgcactaccataatcgagcacaggggacaaattttgattttgtgtctgaaaatggtgtaactgtctatggagtgattgctataagacactgatgtggccaacgtctacaagtcctttatcgcacttcaggtcctttactaaaagaagtcactcccagtggtcaacatctctccttaccttccagatccaggagatgtttcttttcttggttatgtcaaataattcttgttgtgattgtattcttccctccgatcatgccacgtctcttgtcaatgaaaactttgataacaaggataacaccatatatatctgttaagccaagctcaagggaaatcatcatttcacttctatatagttgtaaaagctatagattaatattctttatttatgattaccgctcctactcaattgcactaccatggtcccaagatgtaagtactgggctgatccatttggtcagctttaacgaacaagtcaaagaacacaaataattcatttaagcaagaacctaaccatctcacgattaagatctattgacctaagttcaactaagtgatattgacttagaaagatataatagtaagtttatgatatcttttccactatcaatatcggtccagttcgatgtatactccatatatttgatactagta

SEQ ID NO: 126032 - DNA, 1260 bp, Cannabis sativa
cataaatatttatgtcatgcaaataagtgattctaattagtcaacactaagtcaatctaaaaattaatacatgtgtgatcatatattttggttcgatttcaactcgtacctatttcttatatgtagcactaatcaacagtaattttgtttaagcttgttataaaataattaaacttcataatttaggctgctaatcattctgttaaaactttagtataggtgcacacaccactacaattttgttatgcttttgtatggttctctaatagtgtggtgcatgccaatatgtaggctttatgtaacctgtccttctttctttactttatattaatgtagcaattgcctttataatgaattgtctttgctcagtctcattttgagttgaaatttctctttttggtgcatttggcactttccaaacttggtatcagagtataaaaagttcacgctattatgttagggaccagtcaccacttaacacctcctgaagtaagcacaagagttgttaatgaccaagagatgaatcagaaacaagtagcccaccaaactaactcgccacagctcttcaatggaatctctcagatgggttcttcaagtgaatcaggaggttttactagctctccatttggtaatactttgtcacaaccattcgccttaaagctcgatagcaacaactacactatacggaaaacaattgtatctaccattatacgaggtcacagacttgatggtttcatcaatgatagaaatcgtagccatcgaagtgatggaatgtactacagccagagctctgtggagtactgctctggaatcttgtatggtgttcacacaaaggtaaagatggatgatcttcgaaccatgcttcaaaaaattcaaaaaggaacaactccaatggctaaatatctgagactaaaaagttcttggtgagatcaacttgcattagctggagatccatatccaaaatctcatttagtattaaatgtactgagtggtttggatgtggaatacatcaccactgtctcattgattataaaaaagaacaatctaacatcatttacctagcaagaactacaagaaactctactcagctttgatgcaaaattggatatcaatctgcagccagatctctacatgtatatatattaaatttgaaataaaaagataaaaataattatttacttcttgaagcgtatcagagtatccttgaattttttttttgtttgtatccttaaaatagtgatggagaactcacaccatgat

SEQ ID NO: 126033 - DNA, 4042 bp, Cannabis sativa
atctaataatcaaatttttaaaaaaaaaggtaaccaattaagcaaaatatcaaattttatcctttttcaattcaaaatctactaatatttaaaattaattaaaaattttaattttattctgataattagatttgagatttgaaaaataaaaatctgaatacaaaattatacaaaaaattcaaaattaattccatgaaaaagcatggaaaagttgaaaaaatgaaaaaaaaaatgcatttggcttgacaacctcgaaaactaaaaccctagttggggatgtcaacttgggcgctgggtgaaagcctagctacccaagtttgctttcgggttacaggttcatgtaattttagctccccatgcatgaattaggttgctccattccttcatggtacaaaatactgaaagatactgtgttggattaatgttatttaaatccaaacttccattatggagttcctgcgttcaacttgggcgtaggactggggacccctcccaggtcggaacccctgctatgactcgggactacttaactttaagatgtcatctttcttgccacgtgtcaaatatttaaatccacatcattaaggctgctcttggtgaaaacaataaatcctaaaactttaaacataaaattatcccaatttgctcaataattttagtcatataagatatcaatagaaagacaatttcttgatgaatgaaacccctaaacttttaatattaaattacaaaacatttaatataaaataataatgaaatttatatgtaataagagaaaattaacacatacatattaattgttacacacattataggtcctaaatcatatacaataggtaatctgataatacatgatagaaaaataaataacaaacccaaaatactaatttgtatataattttaaacacaataaaaatagataataattaggtatgtgtacctaattgatctatatcaattacctcaatttgatagtgaaatactatcaactatgtcttcctctctagatctctaaatcagaagaagctttatttatctaattatcaaaaagtatacaatttggatgagacgatatgtatttatagagttagggaggagacttagctacatagccttagtgtgattgagcctgctcatcaaatgcttcaattaactagaaaagtctacacttttgcttcaactagactttacacagatagatgctaagcccattaactattgatcactaacaatatggattagcccaacaaaaaactatccaatcaatctatattttacaccaaatagtttttttttttctaaactttatatttatactttgacaaggaaatttttacattcatattttccctacttaattttttttctttctaattgctttttacttaataaagctgaaaaaaaaatctcttatttatatatttttagtcagctttggttgagtctttttttttctttcctctctctctctctttatttttttttatcttcattgtatatatgtatatatacatataataagtatacattttatatctcgtttttaacactctttctcactcttacaaaaaaaattaagaatactcctcctatatttttctatcttttacatgattaatgaaagtagtatattttttttttttggatattttgtagtttattcagaattaatttatgcatgatttacagattttaacaagattaatgtcttgttattgttattttttttgttgatttatagttatctttttgttattttgtagttctttttatgttgttatttatgtattctactattattttatagttgtttttttttttattatttttatgtgtttttttttacggttattgtttaatttatgtgtatttttatcgtgtatatttccagtttattctagataatattttattgtatatatgtatatttttatttcgttatttttatgctattgtttggttgatttttagtttatagttattttttaacaatcactaactcaaaaaggtaaagagaaaaaataagttgaaagaataaagttgtaaccacaaatttcatgaagaaaaaataatgtaatagtacaaaaagataaattaagttgtcaaaactacgtaaaaaatattataatacaaaaacatattgaggagtcaatattattttactaattccaattaggtcaatattttgttattttttgcttgctttgtagttatatttttgttgttttacagtttgttaagttgttctagggttattttttagttgtttttgaattattattttattttactcaaacatagtgttatcccaattttcacactatgacttggcatcacatgctggtgacacgtggacttgattctccatatctacctgaaagagatgtttcgagcagaacacaacatatacttgcatggatgaggtcctcccaaccgagcagtggacaatccgagcagcacatcaacacttaacaattccagaattttcattgtgaagcacaagagcaattcctataaatttgggatcttatcacagagatatggcaagttgtccaaatcccacaattttttgtattctaaatatgtaatatatgttcttaccaattatagacattgtaagtaaaagggaaaccttccctcaagcatgtagccctataaatagtgatccattctcactggtaaaggggtggaaagaattacttgagagggatctaagagagcatactcagagatttcacagtaagagctttaagagaagaaacattgtgttcttcgttcttgagtcaatacaaatcaaggggagtaggctattaccgaactgctcagggtcgaacctctttaaaaaccttgtgttctttatttatgttttcatattatatcttaatcatatcctttattgcttattattaagactcattgtaattggctaaaagcgaggttaatattttggtgctttcattgagagcaagaatcataaacctgctctttacttcaaatctactcataaacacgatggtcgtacaaactcgctggggtgtagtcaatcaggtggatccactggcagtagatcccacactgcagattccagggaatagaagggtcccaccagtcactaaccctgaacaaccaatcacccaaccaccaaccgcgggtcatggtgtgacgtctcctatggctggaatcacacctggtgttcaaaagactagaaataccagttcagcagccgatctaagtacttctagtactggggttccttcaacaacaaatgcccagacaaccgttggagatgacaccgagatccagaaccttcgtaatgctcttgggctcatgcatggtcatactaatactctgtatcatgatcaggaagagttctgtgcagcagtgaaccttgcgttcgaagagcaaaggcattagttcaccgaatggaaggatagagagatgggaacgttgaagtctcagaaagcagccatcgacgaccgaacaaaacaggccaccgtactaatacgaggagcctaccaagttgctaatcaacaacccacgtccagcatcttgatgggcagctcagacgaagatccagctaggaacaattcctaaactctgaacggtcagccgtccaatccctggtcgcaggttccacctatgggccaagcggtgggcggtcagaccttatctggtaatttgtcaggaggggttatacctaataactctgcccagactagcggttctggccaagttctcggccaaaccaatcagtcactgagacaacttggtgtgtctatatttaatatattgggaaaagctcatgatctcagagatgatctaaatagaagaagagggttagacgaacaatatgttgcactagccactcagcccgaggcccgcgctcaagatccagctcaatgagatcctgacgtggcattggtcggccaagaggacgaacaagttcatccatccgtgcaggcacagttcgatgaactgaaaaacatgttccaaggtctggccggtcaaaagctcaatgatctctgttatcccaatttttgca

SEQ ID NO: 126034 - DNA, 900 bp, Cannabis sativa
tagcaaagttttaatactaaaaaggttatcgaacctacaaggattgattattaaattttactaattagaataaaataaaaaaagaaaatagtgtagctgttgtgaatcgaaccaaggtgagcgcgaccaaaaattagcaactcaagcaacccattgccaccacaccaaagctatactatgatattatgttagtattattaaacttttatattcaaaaatgaaatgatttattttttcatggggccctaggtgtgtgcctaccccacctacccttaaaattggccctgctctcgattcaaatatacggatatgaatgcctttgccattgaataactttttctcagccacatttaccattgaagaagtgcattactacaaagatgcagtttttaccttctcatatatgaatgagttggtttgttgaggttgttctataatactttgtaagagttgttcttgcagttatgccaccccgttgccatcacaccaaaactatatgatattatattaatattgaattttcattttaaaaaaaatgaaataaattattttttggggggccctaagcgcgtgcctaccctgcttacccttaaaaccgggcctactctacattcaaatgtacggacggatatgtctgcctttattttttttttctcagccacatttaccattgagtggattactacaaagatacagttttttaccttctcatatgaatgagttggtttgttaaggttgttctataatactctacaagggtttttttcgcagtcatgcccaaatctatgtcaagactaagagatatggaagatgtaggtgttgggattttatgccctaaataaaatccattacaatctaatatgatttgttatcaataaaagattagaagtcatttatgtt

SEQ ID NO: 126035 - DNA, 760 bp, Cannabis sativa
tgcacttgcgtagtaattaataattttcgcaacaatttaaggcataaaacccaacaaataggtggttcctaagaagactcctcaaggtggccttgagactatcatggaagaagtaagccccctctcactagagcacgcccagccaagcgatgcaagaggtggggatatccaaccttgacaatcgagaggacgacctaaacaaccaacatgacaacattgatgatgagagagatgctgagaaagaggaggaggatgatgatggagaatacatcaaagatgggtactataaagattgttaccactacgagcaagaacctaaagtagatcgagtgtctaaggagctgctcgggaccaagaaaaactagcccattaagaaaagttttctcaaagaatggagaaaatgatggcccgcttcgagccaagtttggagatctagacaagggagattctgacgatgaccccttggtggaatgtgtcggaggaaacaacaggtaaaaccctactaatgctgaacatgtactcctgtaaaagataaggggaaggcaaaggtaggtgaccctcagaaccttgctggtcctgtacttcctcaaaaaatcacgaatctagccaacatgtcttcttaggcacaaaaggtcaccgatgcctccgggctcggacacccttcgacctaaaaaggccctgttacgccaaaagggactggtatgaaaatacctgtaatgaccgcattgttgggttttgtgccctaaataaaacccattac

SEQ ID NO: 126036 - DNA, 927 bp, Cannabis sativa
aaaaagtaaaattttggtgatgtattttgaaagacagagtaaaaaagctaatgagagtgctctaaactcttttttctttattttactataataaaatagcatatataagatgaatagagtgcttctccattgtcaattaataatatatttttataatataaaatattatatatttacataatatttttttttacacttataacaaaatacattattaaaataataagagattataactatgcactaaaatcaagaaatttcataattacatttagctaagtacatgaggtaaattttgagttattttagctcaggatatatttttttaacttttttttgtttaaatctcttagctattttttatggaaaaatactaaaagtatagatggtgtgtaatatttttgtggggtataatattgatattggtgcaactcattattgagtcttacttgtttaatttaataaatattatagaaaatttctaatcaattataaggtgacaattcatcgtaaaactaactataattatgagtatcttataataatattcttttttactttttttttaattattttatattagttattgtgagtgctcttctaaaatggtacacaataatttattagagctcgaactttgtcaaaataaaataaaagttaatataataaattgaattagaagttttatgaccaaaattgtaatatattttttttgttgtcaaacttaccatatgttattagttatattataaaaatatatatgtaaaaattaaattcagagcattatttcataatatggtaaaaatattatttactctatatattaaaaaaagtgaatattgtggtccatttaatcaaaatttactgtattcttaacaaaaaaaaaaaaaaaatcaaaatttactgtagaaattatgtggtgcatat

SEQ ID NO: 126037 - DNA, 794 bp, Cannabis sativa
  modified_base (27)..(50): a, c, t, g, unknown or other
taagatgattttttttttaatttaaannnnnnnnnnnnnnnnnnnnnnnntaattattgggtttatttatttgttaacgttataacagtctgttaagttaataagttaaaataaataataaaaaaaaaaagaatcgtttaaaaaaatcgttaaaccaaccattgccgttagatagacactttttatatataaagatattgacattaaaattataattaaataataaaccacatagtttataatataatagtgtaaatttatggttaaaattaatagttgatgatactatgattttgatgtattttttttggtagttctttaaactatttataagcaacaagcgtacaacttcactataaaacaatttgatatttaaaatcttcaaatcaatttactctggtaatttgttcgtgagatgtaatgattagtatgcaaaattgtatattttagatatttttattaagtgaataattaaaattaaatatttgttttagtagcttttagtgccaaaattatttcattggaaaatatttaattggtgtgaattttaagacttggaacaatatggcaaaattaaaagtagaaaagaaatggtacaagcccatcaccgaatgggcaaagccacattgaagtttagaaagcacattattttgtggggctttttaaagtaaacctcaaaagcccaattgaatcgtaccagtctctactgggggttattactcatttttgtacttgctgttttattttccaattatttcttcaattaaaaaaaaaaaagaagaataggaaataat

SEQ ID NO: 126038 - DNA, 740 bp, Cannabis sativa
atttaatttattgtctttttttattgtaggaattgaaattattgtggtattttaaagtgaagaattggagaaagaaaatatatatacaaaaagaaaattagatttttggaccctgatagaggctcactcgcgtgtcagcaaagccccatcaccagccgtccgtgcgcagatccaagggctcaggtgcgcgcgtgctctcactccagacaaggcgcgtgaagcgcctggaacttctgccagccgcctgccagcttcaacgagtggggctcgcctgctgcaatttgtctccccacgccagcctcacacgccggcacatgtccgccagtagcctctctctcaagcttccttcccaaaaatgccaaattcaaaatacactttaattttatatttagttgcatttatttagctcattttactatttctctcagccgataaattgaacatggtatattttaccattctacccttttcatatctcacctactttatttatgtcagatatttctagaaaaatattaaaataattaatttattaataattattttaattcactcactttatctataaataaagaagagataacttaggggatctctcttaagaataatcttttagtgtaatctatatatataaataaagaaagcacaatagaagtttaggtagcactctacattcattctatcactattttcttttttttttttttgtaaaaattttcatatttttattattttatatt

SEQ ID NO: 126039 - DNA, 928 bp, Cannabis sativa
tatatttcaattataatcggtttgagctatttgtttttattcattatgttatagaactgattctatttttatttatatatgagaaatctacttttggtaacttttccaatgacttttttgacgatggtgactttttcagagacggtgattgtcttggcaacttttcctacgacaataacttttatggcaccagtgagtttttcggcacatgtgacttttccgacaaaacttattattacaagtttcatcaaatttatttattgtttcttttctatatttttaactttaattattttttgatgttatatttttttacattatttatttatgccatatcgaaataaactttactatatattttcatatttatgaaaaaattatttttttctttgaaagaaaatgcatgttttttttttcctattttacatacataaataaaaaatttataactgaatgtttaagaacgaatctaaatgaaagactgattataaaatcgtggtcttaatgtaaaggattttttttttttaaaaggtctaattttaaacttttgtacaagtcctaaaatgttttgtaaccaatttccatcaacaaatcactttagaataaacaaaactttaaaatgagtgactatcaaccaggccaataaatttataatattatcaactatcaactaagaatgaataatggatttatcaaacttatctaaaacaacgtttcgattaccaattgggttttgtaatcaaattgaatctatgatggctaatttttggtggggtactaacaaagatggctcaaagatccattggaaaaggtggaaattgttatgaaaattaaagtttgaaggtggtatgggctttcgttcgtttgttgatttcaatcaagctatgctagcaaaacaggcttagagattgtttgaaaatccaaactc

SEQ ID NO: 126040 - DNA, 956 bp, Cannabis sativa
ttaattaattaataaaagaggcattttttaacttaccccataataatttagtggatctttaactaatatagccatttctttgagttaactgggccttgagaatcgagatccaaatcccaatataaacacatatatatattatataaataggttatttaagatttttgtttgtcataagtataattatgctcacagaattgttcagctaattaaaaataattatgaattattcacaatgtacaatagttattctgtcaaattttgttacactttgacaaacatgattaaagaaattaatcttgcaataaacatgattgattatttgatacgcttaaaaattaatccaatttatgagtccttaacgcttagtccgttttacaaacctggccgggctaaatggaccgagatcaacaatggcagcacgccctttaagcacaagctcggccatggctgcacccgtggccggaccattcagaattccccaacaactatgtcccgtagcaacgtagcaaccgttgatcccaggcaactccccaattatggggagtccgtcgtctgtgcatgggagaaagcaagcttgctcagctttcactcgggcctctccttcccttagatgactcgaaacactgctggccactcgcttaagtgcctgtatcgattcaggtttgcctatgatctgttccgggtcttcgggaacatcctcctctgctgacattccacatatgtacacctcccctgccaaaaaaacaaaccaaatcaagacacatttcaagtaattctatataaaaataaggtccaatttgattgtataaacaaactagaaattgaaaactatgaagtccaaccattgattttcactcacagttttctcacgttattcttttactcttctaagctttgatcaaaacacatagctttttctgaatcaagtactaataataattaaccatactcat

SEQ ID NO: 126041 - DNA, 2941 bp, Cannabis sativa
  modified_base (2908)..(2916): a, c, t, g, unknown or other
tttttttttttttttggatgaaaagcattttttttgattaaataataaaaccatattagatcttttggtcattacaaaatagttcagtaggaatagtttgaacaactccaaacctatggcccacctaacctcattacgggtaataaaattacaaattctgttgatatgagaaaaaatacaactagaaaaccgagaagagtaactattacaaaatgagacataattttctaaagtccattgagaatccatcccattaagagcattgataactaccctcgagtcgctctctacaataacaaacttgtagcccaagtccatggcaaccgaaaccgccaaacaacaagtcgtcgcttctccgcaaagcgcatcagagaaatccaaaagagaagtgtgaaccccgaccaccctactaaggtggtctctagcaactacagctatacacatgctttgaagctccactttaacatcgcaattcaatttgatccaatccataggaggaggagaccagacatccttccaacataaagcaggggaagcaaaaagagaagcatgtaaatttgcaaaagaattacaaatattatcaatacacttattcatatcaacatgacgattattataaaccttttcattttgggtacgccatagagagtcaacaacaatcaaagcataaaggaaaacctcatgagtatcaatttccctgtgtttgagattccagatgaatttgatccaatcccacatacgaataccagtatcacaaacaggataaataccccaaggggaggccctccaaacatgaagtgccacatcacaagagagaaataattgttctaaagtttcctcccccatcccacacaaaaagcaactagcatctttaatatgaaaccgtttcttgatcacagatcgaactggtagagcattggaaagaattgaccaccaaagaaccttatgatgttccaaaattttactgttccacagcttgttccatagcgaaggagccacctcacagggaggagctctttctagggcctaagtaaggtaagcggatttacatgaaaaacgtccattacgttcaagagtccaaatccacttatcattaccttggccagtgagaatacccccttttaaaattgcagacacagtctcccgatcacagagactattcaacttgtagatatcccaacctccatccatagtgaggaggtccgcaactttgctaacagtagaagaagaagctcccttcgatattgggtggaagtctttgatatgagaaatccaaggatccctccaaacactcgtgtccctcacattagccactagtttacaagcacctttcttcaaaatggatttggttttaacaatattcttccaaaaccaagactccgagtctttgtaccggcaacttagtaactcctttccttttaggtatttggatgccaagacccggcagcaaagagactagctaccattaagaatattccatccccatttagccaaaaatgcctggttcatttctttggtcttacgaaagcccaatcccccccgagattttggaagataaagcttatcccacgcgttaagataaagcccatgattacccttttcgaaacctcacaagaaattacgcactaaaccatcaattctggaaacaagtctgttagagagtttggtagtttgcatggcgtaaagcggcaaggaaagacccacagacttaataaggggtggccctccctgccttagacagggttttagctttccatccctgtaatttagaagtgagattatctaggatgaaattgaaatcagtatctttttgtcttggtctagagagagagagacccaaatacttaatgttgccctcaaacgaaccaattcccaacatatctctgatctccctttttaagttatcaggagtatatttactgaagaagatagaggacttaagcttgttaacttgttggccagaccaagagcaaaatctctcaaggcaatgccagtagcccatagcttccataaggttggctttgccaactaaaattaagtcatcagcaaagaagatatgggagagcaccggcccacccctgctaagtctgatgcccttgaggaccttcttgctcaaggcctcctcaagtaatcttgataatacttcagccgcccaaataaatagataaggagaaaaagggtcaccctgacggaggccacaagaaggtttaattgtgccaaccgacccccattgaggcaggtgttgagagtggtggtagtaatacactgagagacccaattccagaatttttgaggtataccatagcacgaaagcacatggtctataaatctccaatttagcttatcataagctttcataagatcgatttttacggtaaaataaccttctttaccttttttccggttaaacgaatggatgatctcttacacaatcacattgttatccaagatattcctacccggcacaaaagcagcttgggtagggcaaatgatcgaaggtaaaaaaggtttaattctgttggctatgatcttggaaatgacattgtagctctcattacacaaagaaatgggcctaaaatggttagctcttttcgggtttcggactttaggaatcagaactatatttgtagcatttactcccttatgcatcctgctagtcttgaagaagtcagagacagattcacaaaaatcatcgcccactaagttccagtagtgctaactccataatatattatagagaaatgctaaagggacttactagtatttttgtacgcatcaatattattattagtatatagtttagagtaatttgcggcataagtacctttgaaatttttgtaggcacctgactgttaattgttaagtaaattgccacgtaggaattcttgattggtccaagtcattaaannnnnnnnnttttaaaaaaattaatttaaatata

SEQ ID NO: 126042 - DNA, 655 bp, Cannabis sativa
caataatcttaaaaaaaaaaataaaaggaacttaaaaataattacaaaagaattgtacactaactgaaaaactcgtaaaaattaaatatatactatttttctcttttttaatgaactaaataataaccaacgaaaaattcaataataactacacaaaaataatattaatgtatgtacttataaataaactaagcgtatatatatatatatttatttttttcttatttgaacaattaaataacaacgaacaatgatcaaataatttgacaaaaactcaaaattatatatatatatatatataaaaaatgacatttattggataagaaaatacaactacacaacaatactaaataaatatgcaaattattggatatcaataaatattatcgacaccttaaagaaacataaccttaatatacaacgaaataacaacaaacaaacatctttaattatatcaacaccatgttaatatgcaaattaaatatgtatcaatacattgcgacaataaaatgaaaataaaaaaatatcaataatttaaaagaaaataaaagaaacttaaaaataattacaaaacacttgtacagaaactcaaaagtatatgtacccataaaaaaaggatattggcggctaaaccacctgaactttacggtttgta

SEQ ID NO: 126043 - DNA, 824 bp, Cannabis sativa
atatatataagtaaatatatttagagaaattaataaatatattgcgaaattattgaaatagtaacttttgtaaaaataagttaaaagttgtggtgtgctaattgtagtttttttgcataaattatattttcgactatttatcaaacactagagtttttcataaaaaagttttaaattttctaaaaattgtgttaaacaggtcagaatatgatttgaaagattttgtggcagttcctcaatacattgctttaaaggttcaatatagttcttggcaaacaacttcattaatgattactaattatgaggtgatggtatggtggttatatggatggataataaaataataagtgagtttggtgcaaccaaatttcccatgtgactgttgaggaggttcatgtgtggccaaaattatggtcgtttaatcttcaaccaatatctaaagtaatatgtgatccactaataaataataaattaacaacaacattaaaagacagaccatctccatttgaatgttataaatagtgtgtatattttttttagctcatatttataaaattaattttaataatagtgtacaatgcggtttaaatttagcctatattaaaaattgtattaaatttaatataaaatataacactaaattttacacgataataaatatcatttttttttacgcttttgtcactcattaatataattaactttttacatttttatttggagaagatttcaattgttacatcaaatttataaccatgatgattacatttatttttagccattaaattacaattgagtggttgtgatatatttataaatttaat

SEQ ID NO: 126044 - DNA, 1532 bp, Cannabis sativa
cgaattatctcaaaaccttactcctcaaatccacgtgtcgcagtcgcgttagtccacgtatggacaaaattaagggcaacaatccttaaataaactatttatttaaaataaattataaccaataaattaattaaaaaaaatttaaattgatttattcttaaataaactctttgtctaagacaactatattatcatattagttttgtattaaaataataatatttattattttaatttagggttaaaataacttttgtgttaatataattatagatattgaattaaagttttaaatttataaccaacttatatttatttaatttaaaattaaatttgaaaaaataaatattccacaaaactatatactatgttaatattatatttatgataatttatagtgtatatatattgtgtatgaatcatatatataatgtatattatacacaatatataatataatatatacaacatatatagtatatacatatatattctgaaaaatacatatatatataatagtgggtatcgggttcggttcaagagaggaattggccaacatggccacaccatggccacgatggccatgtctggcgttcaagcttcaattgcacaaaccagtcccacaaagaacgggccaaatggcccacacccgaacgagtctttcctcaggcaccaagccacaaatggtcattaatgatggttgagccaccgtggaatgctcgagcatgaggagtcgaggtcctcatacacggaccaactagaacagttgcaggtcgtgagccttactactcttgcggctcatttcatgaaccaagcggacggacccttgggtccttatgtgcatggcttgcatgcacagttgactcgaggtcgacgtcatatgggatgcggaggagcatggaactcgaggctataccatagtcgtggacatcgtgcatggttggagtctatgaggactcgagctccattcaatggggcggtggtcattcacggttaggttttgattcaaagctgagcttcgtgatattgagcattgcattaaataatttgcataaaaataattttaaaaaatttaaaactacataaaaaattacttatgctccataatgacttacattatttttaatgaaaaaaatcacgaaacctacccctaattttaccataaaattaacaacccatcacctctcatacattcacaataaaaaatactatccattcatatacattttgcatatatataaatacataaaattcacacaaattaaatatatatacataatggaatcgctcttgatactaattattagttttatagtactaaatcatgtatgtagtgaaaaaattatatatttgattatcattgtaccatagtcccaaggatctccagatctatatatattaaactaaaaaatataaattacatggaagaaataaatacctcttgatgcctattcaggcatccttgatttttttttgtttttcggattgattaaaaactcacaccgtaatctttcagattgattcaccacaca

SEQ ID NO: 126045 - DNA, 1501 bp, Cannabis sativa
  modified_base (1424)..(1431): a, c, t, g, unknown or other
gctcaccctggccgacctataggcttttcttggtcgaccagggatgtttgtacagctccttgagggctcacttcactccattcagttattgcttgacggttttgctatatcttgcaaggaggccctgttatgctactgacaggattgtactccacctatactctatctttggcttatgtggacatgccacgttaggtggacaaaattcggaataaaattttcccccaagtccttgttcgaacatatggtcggaaagggacttttctaactatcgtcttgtctgtattagtctttgttgagcaacattgtctagccaagtgttggctttttatggcgtgcttttggatctttgatcttctctctctatatatgtctcatcttctcttctgaggtatctcttttttgtacctgccattaacaagtttcaaactttttaagcttttagaaactttttaattctcatgttagtttgtaatccctttggtatattgatcctcataaaaattttggaatgtttaatgtgtgactttttgatggaaaagatttgacactggccttcgttatgattcttgactctttgagtcataaagaatacgaggcatatattcaagttttgaaagaaaaatatacattgggattcaacacttaccttggttgtcctaggaggtcttgcttgagacctggtcgaccctaagtcataatcatgggagttggctagctttagggttttaccctataaagctagcatgttcatgtctgggtttggtgaccctgactagttcttcgctgagtcatgggacccaggcgaccccttcaagacttgagaaccttggcaatcacggtggttccgagggggtggtcagttttttgtcctcttttgactttgtcaagaattcaaacttacaggcttatacaaccttagtctcatacgtggtttccttagaaactttgtatgaaacttaatggtgagtttattatagctgaatgttcaactgaagactcaacatggcttatatctgtaaggaactctactttagtcatagcccgatacatggcccttataggagctctgtcctgttctttttggctatgtggtagggccttggcttcatgcatgtgaaccgatataatatctgtccttaaggcttttatattcttgctttggcctataggccctttattttcgaacactacgattatttagccttaaagccttttacgacggccatatgatcatcctgccaatcttcttatggccttgacatgtaagggtttagatttactttgtcaagccgaagtatgcccgcacgacttagaggcaggcttcgtaacttattttaagtgttaaaatttctctacataagttctttttgctagttcaatgcattatacggtatgggtgtgttgggttttgtaccctaaannnnnnnnatttcaatataatcagatttagtaattaatataagatcagaattcacttttatgttgcatggctcacatg

SEQ ID NO: 126046 - DNA, 1782 bp, Cannabis sativa
  modified_base (1727)..(1738): a, c, t, g, unknown or other
gtggggatcatgagcctatataattaagcttccaataggtagttctagaatttactaagtaaattctcaatttattaattcttctttgctagaggaaatgatgcatggatcccacagatttcattaatattgtgatgacctgtgttagaataactaggttttcactaatgtttgatggcagtatgcatggctattttgagtctaagagaggccgaggatccaatgtctcctttattatttgtgttaggtatggaatacttatcccgaataatggggaagattggggataaaccagatttttatttccataatagatgtgcagcaaccaagctcaattaccttgcttttgctgatgatgtattgctcttctgcaatggagattttaggagtgtatattatttactacaggggcttaaattgttctcattgacatcaggcttgtatccaaatgctacaaaatttgctatatattccagcgacatgcctgaagatcagttaaggaaaatcctggaagtatctggtttcacaaagcagtctctgcctcttacttatctgggggtcccaataggtgcaaagaagatatcatggaaagattgtgaggtgttggcagaaaaaatgacagctagaatcaagatttggagctcaaggaatctatcctttgctggaagagtagtgcttatcaattcagtattgatggctattcatgcctattggtgccaagtgctgattttgccaaaaaaagtagtgaatgccattgaagcaatatgcaggaattacttatggaatgggaaagctatgtatcaagggcatggagctatttcttgagaatctatttgccaactaaaatcaactggaggtatagggtttaagagtgtggctgcatggaatagagctgctatgggtaaatatgtatgggcaattacaaataaagaagataatctatggctgaaatagattaatagtgtgtacttacatgatgcagactagcgggcctacaaacctacaagctaatgcagctggtattggaaaagtttggttaggctcaaagaccagttcaaggaggcaatgaatggaggaacagttctgcaacaaaattacactgtgtcacaaggctataacctgttgtgtccaactagaacaaaaattcattggagtaagcaggtgtggagcaggttaaatacaccaaaacacagctttatgttgtggcttgcaatgcaccagaaactaaaaaccagagataggctatttaaaatgaaaatcacagagcagcagacatgcctactatgttgtgatcacactgaatccacagaacatttgttctttaattgttctgttaccagaaactgtttttaggagataaaggcctagctaaattggagaactgctcacacatcgctctctaatctcatcaagtggattgggagagtcaagttgagcaaattcaggagaatggctattgctgctactatggcaagtcttgtatacaatatttggataatgaagaacaagtgcttatggaacaatgagaagcaagatcctgtcaaagtggttaaggagctcaaaacgagtgtcacacatagaattgagcttttttgacaaaagaaagtatcggatgaggatagacattggtcctttagtttgtgaatattgtaactaaatagaaatagaagcaattgttgagaactaaatgtatagatgattattttattggaaatattttaccaggnnnnnnnnnnnntaccatgtatgtttcattaacatcctaataagatcggaagagcg

SEQ ID NO: 126047 - DNA, 632 bp, Cannabis sativa
gataatgatattttttaatttaaaatatatttaatattaaaatatctaatcttacaattaaataatatgtaaatattaaagaaattaacaaattttttaaaatttggccatacttaaaaattaattctttaatttaaacctcaaaatatcaaaattaataataatctactaaataaattaaatattattaatttgtaaatttgatattaaagtttaaatattaaaataatattttattaagatattagggttttgaaatgggaataatccaaaattggtgaaaaaaataccaaaaactcaaatttagggtgcaaggcaccaactgcccacgagaaggctgccagcagccttggacgcgagcgcaggagggcatctgggaacgaatccgcgcgcagatgaccctgctagcagggtattacgcgcgcatcgtcgtgtctgaatgtggggcatcacgcggcttcagacagcacttgtccccttctcacgcgcgcacatcagtgccttgtccgaagcctggtgcgtgcgtgcaccatctcgacacaccttggacctgaaatttcaaaacaccaaaactctctcattttttatcggaatcgagttccgtaaaaacaaaattgcttaatttttcacaa

SEQ ID NO: 126048 - DNA, 1203 bp, Cannabis sativa
ttggcgggacttcgggcagtaggtcaagagcccctggctcgaggccccaagcattatgccgacatgagctgacaacgacactgatggtactgtgccaccacgtgagccgcgtatgaacctcaacgaggagcctatgagcctcaaaaaggaacacgcggagcatggcagggagctggagctcgaccttgaggttgagcaactagaagagattgtaactaacttgtaacagtagtcaagcctaggagaggctgacgagctcaaccccttggttgagaaatcagagataattgttgctaacttgcaacaacatttgagcctagaagatgctaacaagcttaatcccgaggttgagcaactgaaggaggttgtttctaacttgcaacaacatttgtaggagtcactggaaaagcatcgggaggagtttcaacattgattgcaagagcaatggactagcgttgagactcaatgagcctctcaagaggagaggagagtcgttctggcctattcgatttgtgatatgtatcgagctggcagcatgtcggcaatcccgatagtcatgcttgaaagttagtgtgacagtcagtagtctcgtgatccataaggagaaataccaagtaagctgtggaatcccacatcgtttggggaaggtcaattatgatgattttgagactgtgtaggtatgggactgtacagttgaagagggcttaaatagattgatttgtactacctatattaacaaggtgcatcttgtttttcggtagcccatcacgaaagaactctatagttaagcgtgcttgacctggggtaatctcagcatgggtgacctcctgggaaaactgtttttccaggaagggtgcgaatgaggacaaagcatgctggaaatgcacatgttatcttctagggtcagtcgtcattccaggaagcaactagagtgacgtactcgtgtataagggacgttacaaatggtatcagagccttgacccaactggaagtgtggtcgacgaggacgtcagaccccgtaagggggtgattgtgacaatcagtagtcccgtgatctgtaaggggaaatacccgggtaagctgtgaaatcccacatctcctcggaaaggtcaagtgtgatgatactgagactgtgtaggtatgggactgcacaattgaagaagacttaaatggattgattggtactacctatatcaacaaggt

SEQ ID NO: 126049 - DNA, 1534 bp, Cannabis sativa
aaagttcaggggaaaaattactaattagccaataataaataactttttggtgatgtattttaaaaaaactaatgtatggtgtaatataaaagtgtgatgtaaattagaaaaatattaagttttgatgatgtattttaaatatagagtaaagaaacgttaagaatgctcttaaattgacaaacataaattaagaaagtttgccatcaaaaataaagatcatgagattaaatgtataccaattgaaacttagagcattctcaatagatgatctaaaatagtttcttagctaaaattttaaagaatttaataaaattgtacctccaacaagtgggataaatggtgagctaaaatagctcataactagtcaggtaactctagtggcgacgagctaaaaatattataattattttatctttctctcatttttttaattattttttttattatttcattactctttttgtccttttttattttaattaataaaatacatgtaaaatataattatttaataataaaaaaaaaaaaaagaaattgatgtatgttgtaatataaatatataaggtaaaatagataaagtggtattttagtgaagtattttaaaaaataaagtagagaagctattagaagtgctcgtaaaagagtttggccacaaatttctcaattaattatttctccttttctgcaagaatttattaccagttaaaattttcttgactactcgaaccatctccaatgataattttctaattaagatttttttttttgagtgtacgtaatggtatttttacaattaattaatagcttatagcttaaaggtcttggcttcgaactcatgacctctccctttttccatccctccctcaccactaagctagccttagtggcttttaggatctattactactatagtatctccaataatactctctaaacacactcttagactatatttaagaaggacggagactagaatagatgaagagtaggagagatggaaaggatagttgctctccattgtattatttggtatgagaataaaattaattagaaggatagagagtaaaataaatattaaaattattattttattacttttaatattattatatattaatttttaaaggataaaatagacattttatatagttctttttttcttttcttgaaatcccttattagtctctccctccatctctcctctcccttcctctctccttcttgccaaacaaaagaaattttcaattcctctatctctctccctccacctttaccctccatccttctctttccgctatcaaacatagtgttagtgacaataggaagcgagtcttaaaaaatggagtgctatcgttaactaactatttcaatgtctttgtcaatctccgcatttgataatatatgttagaatatttttttctattattttttttgttatattttttcatgacaatgtttgtcatatagttacaacatgaaacatataaatttttaaaaactcttgatagtttacagtatcgacaacatagttttt

SEQ ID NO: 126050 - DNA, 615 bp, Cannabis sativa
aaagatgatcaggaaggggatattattgagaccaaaaaacaactgtctagaacaggccctgcctataagccaaaacatatttctttggaagaggagcttaaggtacatatgtctcttctcttgcttgtacattttcgatttcaaatgagatcatgatgagaacattttcagctcacttggctgtctatttttataggctttgcaagagaaggtcgacattaacaactatgagtacaagaaaattcctcggccaagtgaaagcaagtcacactagtttgcactcttgtcaaattatcatgcaatggaaaacacttaggatttccataagtcatgtagcaacttctcaactatggccacttttttgccgcaaaagcttacatacatttatgctctgacttagttgattgttgtagttactgataatactagaacaattgtagtttttcccacaaaaaaacaaggatttagaaattcatgcaatttgaatataaagttgtacattctaaaatgcaaagagaaataatttattgcactccttatgaggaagagttttattactctaagggttcctttggtacgctgtattacaccgaattgtattgtatagtattatat

SEQ ID NO: 126051 - DNA, 2539 bp, Cannabis sativa
  modified_base (2274)..(2278): a, c, t, g, unknown or other
  modified_base (2476)..(2476): a, c, t, g, unknown or other
aaaaaaaactattttgaagtgtacaaatgaaaaagcttatttttttatgaagataaatttttaattgtatgagttaaataaaaattaatttaaatttaaataaataatttaaaattagttaattatatttttttattttaaaaaataatgttagtaatttgttatttttaaataaattaaaaaagaataatttaaatattaaaaattaaaacaaaaaaaaagaataatttagtataaatttttaattgaaaaaagtgtcatgcccgaaattcggctacacttcagaggataacacgtgtcatacagtggaatatgaaccacctgatataataaagttatatcacttaatataaagaaaaaaagaataactcgtcaaatatagaattaatagagagtatttataactcgccgattgtatagtcttaagcgagacaaggataaaaaactattattactcatattgacgagacacatacatgcctcggagtacacaagcccaagaaaatgattcatttattcaaaggagtggattcaattacccaaagcaacctcatgttacatataacgagacatccaccttgctacagaaacttgacgaggcgaatcatctgctaacacttagtattttttctacattataatagacaaggacaacaacttggaaatatgtgagatacaattgtccaaattagcattaatcatcgataagttaagcgagatgctattttccaaataagtattgaccatcgaaaggataagaataacaagcagttatgcagttatcaagtgttatccaacatgtgatcaaaatgaaatgtgggaattaaccacgtttcattaaacggttataatttgaatttaaatgtaaataactggcgacctatattcttataaatatgggcagatcccacaaaaaaatggacagagaattttgagagagaaaaatagatacaatcaattgtatattttattttgtaattctaaaaatatcttaaataagatagactcgtggagtatgcagatttaactgtaaaaccacgtaaaaatatctggtattacttatatactatttatactttatttatttcttattatttctatgttaaacttattacgaaaaggctaattattggttaacaaaaatttgtgttaacagtttggtgctttcattgagagcctacgtgataaaactcagaaaaatccctccttacaaacaaaaaatttatccatggctgatagcaatcaaaacgatggaagttgtcctgagaaaactacacatcgttctgggaaaaaaccaatgggttctcaaagaccccatacttctggaacaacacgttcaagaagaaactatggtggtgataatcaaaacccagaaggaagaaatgaagaaaccaatgcttttgcgggacatgtacctaaaagtgaggatgcttatgatccaactaggtatgtaccattagttgaattagaaaattgacagctccgacaacgcttagctgaatttaattgacaaaatgctgagttagaaagagaggttgcagcggcaggggcgactcaaagccgaatttaacctgatcttggactaagaaggccacgaggtagacctcagggttcaagaaccaggaggcaagaaacaaatcaagaaaattcacaaaacacccaagaggatcaacctaggggttctagggatgttccagtggatgaacatcaaaatagtcaagaacaacgtcgagaatttcctcaaagatcccaaggatttatgaatcaggggaattaacataatgatgtaccagggccctctcgctggaatgaggacatgagacagctccaaactagggaacaagaaatccctcgtaataacgaaagaaatcgtgggactcaacctaggacaagtgggctaccaccgaggcacccctaatgtccttctcgatccgagagggaaggtgcatacacatacctaaatataggacgtgtatctaacctattctgaaggagaaggacgatacaagacgaggcgagttctagctcgggacattcgaggtcccgagggcatagtcgatcaggaagacaaacacgagaaggaagtaggccttggcgttatgctgatcaagaaagcatgagcaatacgagaagttatcaatatgagagttgctcagatatgagatatgtgagcaattatgaacggagacaaattaatcataatgcacctgacttatgctatcaacttaatgcgaaccaatagcaaggggattcctattgggttttgtgccctannnnnaactcatttcaatataatcagatttactaattaacaaagatcagaaatcacttttatgttgcatggttcacatgatttatttcacgattattctattaagtccagaacataagtatatattttttcatgattgtagtgtatatcatcacagtagaatataatcgtgattatatattcaaaagtttaattcccatgatntgtcagttcactggatttagattagcatgataatcagtaataaggtgtacttacaccttggat

SEQ ID NO: 126052 - DNA, 1559 bp, Cannabis sativa
aaatgtagactttaatttcaaaaatattctttcgggtccgaacgtgttttaagagaaattttcaaatttcaatgattttttttcaaattatttcatgcacgaaatcactctataattttatataaatgtgatatagcattaaatattcaaaatatacaccgaaaattaaaaattaaaaatttcttataatatggaccgaaacttaaaacttttgtgtatatatatatttgtatataatgtatatacaacataaaatcatcataaatatatggaagagaatattatatataattttatgcaataaaattatagatccaatgtaaaaaatatatataaatatataacaaaaaaatttatatgtatatacaactatatatgaatatgtatattatatatatgtgtgaagaaatattatgaatataaatatatataaattagatcaataatataaatataaatgtatatatatacatgaaaattatatggataaacaaaatccgatcaaatatataaataaatatatatgtatacgagaacttaaaatataatcaagacagagatataaaatttgctctgatacaaactgttagatatttatatgtgtagataaaatatataaatgggtaaatcaaatgcgaaattaaatgaacatatacacaataaatttaaggatcaaaatccctccagccattgattatttgagcttcaatcccacacaagctttgatctacaaaggaaactgatttatgtgggtaatcaggcttccaatctctctctataggtaatgccttccatcaaggtctttaccacaattaattgtcaaaatattttgacaattaattttgaacattaaatcgggcaactgaaatattaagtaatttaatatgataataattagaatatttcaatcaattattaaataattaattatgttttataaatcaaatcaaatatatttgttttgttaccatataaaaaatattttaatagtattctcttcctcttcgcgacatattttatttaaaaaaaagacaaaaaaatattgtaacttgtcaaattcttaataagtatacacacacccttacaaagtacataactgtaagttgaaatgtcttcatttcataattaaaatattttaaaagctaacaacactccaactgttaagtgaaataaaataaacatcaatgactattatttaagcggaaacatattctttggtttccaccacttgagctacttgaggctagctcaagtggctataggagagtgcgtgtgtgttggaggtcttaggttcgagccccaagttatatattgtgtaatatataaaacgcttgaatcaaaaaaaaaatatatatattctttggttttctaagaggggatgacatccttcaccatgtgtgaatatgtatatgtgtatatgtatatatgtttatgtgtatgtgtaagaacaagacgaaagagcttttaacattctttaaaacatcaaataagttaagggtaaatatcattttggatttacaaaagttacccattggaccctgtgttttgttaaatgacaa

SEQ ID NO: 126053 - DNA, 766 bp, Cannabis sativa
agttgggatcagtcaatattaacgattaagccgtaataaattagtttatgcataaagaagtgtgcccatataatattaaatagtatttctattaggcagtggacacaatggtgccaacacggatcatactagtatattagatttaatacttaattgtactaataatatcatcacatgttaaataaataatatcttttagcattttttctaaaataatttcctgttaaactctttagacttttaagtttaatactatctaactgtcatactaaaaaaaattataactaaaatgtgcaatctctacaattattttggtcagtattccttaaaaggaatgctaaaaaaatactaacgaaaaactactgaccaaaaccatttatctaaatttgtatcatttcttgtattaatatactacaacaatttataaaaaaatcaccaaattatactaagataaattatttaatttattatatacgcatgtgttttagggtgtacagaaagtcattcaatctaattacaactaaccaatctaatttcaaccgatctaataaaatcagatatttaattataattgcatcgaataatcagatgtaaaatttgaaaatccaattaaatcgaatcggataagcataaaaaatgttttgtatttaacttattagagaatattgtctcatatgaattaaatgtgaaagtattgagccatatgtacatgggctactccactcattgccaattagttttgagttggaacccatgattctcaaca

SEQ ID NO: 126054 - DNA, 2805 bp, Cannabis sativa
aataaactatattttagtttttcagttttcaccatttatttacacttctattggagatgctcttatatattgtaaatcttgatgcaaaatttaatatgtcaattaatacttttaataatttattaaaaaaatataataaataataataatgcaaatgtaaatataaatttaataataataatgctagtcatttaatataaaagagcatgttaactaaaatttaataataaaatattaaaaataacataatagtaaatataatagtatatcatttattatgatacaaattttgtatcatactgtattgtgatccaaatttagatcactttttgttatgtgacatatttgcatcacaatttggcacgccgttggagtagatttttaataaagtgaactatatttacatttgcatcacttattttcatctctaatggaaatgcatgctaaaatttgatgcaaagctattttttgtgtcaaatataatacaatttttacatctctcattagagatagtctaataactttatcatcaattttattaatttttttaaaagtaatataataaaaaaaaaaagaatataaacacttcataatttaatgaaatagttaaatatgctaatgaaataatacaatgacatagtaagcacaaaatttgctatgtactaaatttacattattttttggcatcaccattaaaatatttttttttttattaaataggtatattttaactttttatcaattatttgtagatggagatgcttacgatagtttgaaattcacaataaatgcaaatatattcacaatttattgattctaacaatgttcatgttaaccttctttattttgaccgaacaactagatgtgctttatacaactttaacttgcaagtgctttatactagtaagtaggggtatttattggattacatctaatattttcaagtctatctagattcgatccaattatacattagatgttagattttaccatttgattcgatctaatcaatttcagtcatccaatcgatccaatatccattggatgttagctttgatcggctctatccaatgatgtatttcatatatatttattggtttaatttaagtttatctaatattttagacttagcattttttagatcggatcggatccatccaatattttagatccagtatgtattggattggattggatccatccaattaatgttaatgtcatatatacatatagattttacgtataacaatataaaatctaattactcatctaaattaaataaaaatactaattagttcgattggatattggatgtattagatttttggacacctcatctaccatccgatccgatccaattgaatatttaaaaataacatcaaatccgatcttatcacaattaaatatccaatgtttggcgatcaattataattggattggttagttctcattgaattagatcgatttatgcacacccctaagatgttaaaagttataaaatttagcataaaatatcatgccatttatttggagcaatataaatcgctctttttttttttgtgggtaataagtgaataatgcacctcccaactctgtctccgttttctaatgcgctcatcccctccctcgccccacttaatctcataagaattcggggtaagagatctccattaggtatgaggacccattgggtacccattaagattgaaacaataataataagaaaaaaaaataatgtaatgtaattcaaaatgcaaataaaaaataagatatgaattttaaaataaacattctatctattaaaaagtctttattacacagtaaattaaaaaaaattagtagtcaactttgtaagtatgtaatcaataactttaatacatagtaattaaaaaactatatagaaagattgaaaactatatatctaggtcgaatatggagaatcatcatttgatccagtccaattagacctcaaaatctaatccaatccaattacacacttaaattttaatatgaacatcaaaatatgaaaaaaaaaaatacataaaaattaaatatcaccttttatttaagtttaatactccataacatatcatcattacaatataatgcaactaaaagtttcaaataattaaaatagcaacatttataagtaataaaatagaacaaaatatcatgaaaataaatacacaaaacaaccaattgttacaaatttaacaaaaaaataaaatccaataaacatataattaatatatattatattttttattatataaataaatataaataattttttaatataatgtaattagatttgatcggtttttaattagattttgagattgacatccaataaccgattcaatctaactagaatctaaattttagcattcaattcaatccaattataattgtatattcaattttttataatgggattgaattcaaccggttcagtttaattgaattagatattgtccacccctaattatacctcttaaaagatgataggctctactgatacttttttagtgtttctatatgcatgtaaattagtggaaatttattaatttaaaatattgaatgaaattaatggtagatttatttttaaatttgtgcatttaagcacttattcacttttttgtgttaaataataaatatgacaaattttacatcttctcatctttcaacttaatttggttttgtacatgggcattttacaaaaatactggatttggggtaatacttttcaattttactgccacacggtagaatttacatttatactgtcctcccttttttttttct

SEQ ID NO: 126055 - DNA, 891 bp, Cannabis sativa
aaattaatattaccataattgtggcccattactaaattttcacataaagttgtacataatgttcaacataatttttttcaacaaaaaaaaaatatatattcaacatattcttatctactatgtacgtcattttcactagcagaaaatgcactgatttagtaaatcaaaccacaatcacccatatggaatcaaatatactcgtggttctaggtaaaccaaccataaaatccatagtgacatcctcctatttccactcaagaagtgtcaatggctggaacaagtcaacaggtctttgatgttcaaccttaacctactgacaagtcaagcatctggacatgtaatccaccatatccttcttcttaccgtaccaccagtagtagtgctttaaattttgatacatcttggtggtactagggtgtaatgaatatagagtggtatgtgtttcatatagtatctctcttttctagttcaacattgcctggaacaaaaacgcgagttttttaaagtaacatttcattatttgagaccgagaaatatttagcctgactagctaagactttttcttgagttttcattaagtccaaatgtaacgccctaacaatatggcacactacgacaactaataatataacctaatcccggtaaatcgggattactaagaagataagagcgggaaaatttaaactttaattgcaatggaataaaaatataacttgtccggctgggtcaaggttctgataccattagtaacgtccccacttcaagcctccattggacccttacacccacagaataatgactcttatacatgagtacgctactctggttgcttcttggattgaggactgaccccacaaaccaacacgagtgtttccagcatgctttgtcctc

SEQ ID NO: 126056 - DNA, 800 bp, Cannabis sativa
atttatttatttatttattgaattatgagactgttgttatttcagtattcatattacatatttggtaatcctatggcgaagctataccattttacatgtaaataagatttttattttcttaccttacaaattactttttctcttactacattttttttttcttttacataccccacttccgatccaaactggtgatgcgtaccatcattttattttatttagtattacaagtgataggatcgaaataattatctgttaggtgagtgtgagtagctaaatttgcacttcttacttaaataaataaataatttattttagaaaaagtatttatttgacttttgtagtgaaaaagcgactaaattttacttagatgacaattcaaataacatattttataaaataaatcaaattaatgctcttgatttagttttggtcaaatatatatgacaaaattaatgtatgtttgacataaatctgaatttaccattaaaaaatttagttcagtatatccatttgttaaaaaactgtttcactaaatatatatgactaattaactagtgcatgttggacctaaatctagagttactattaaaaaattctgttcagtatatccatttgttaaaaggttagtatatgtcataaaagaaaaagaaaaaaattcaaaaattcaaaaattcaaaaaaacagtaatatgttcagtatatccatttgttaatagtataggcagacggttttaaaccgtcgcttataagggttcattaaaaaattacattttattaaaaaaaaacgtcgcctatttt

SEQ ID NO: 126057 - DNA, 699 bp, Cannabis sativa
aaaaatgtaaaaaaaaaaaagacattcttcgaacgtaaaaatataaatattttgcaaaaaatagtatcttatgtaattattccatttttttaagtccatactccatactctatgccatctgtgggggcacaatattaatgatattttgagtaacagtatttttcaaaacggaaaaaaaaaaaataaagttttctaattgggtaaatattattttggtgtgattaattttttttttttttgaaaaaaaattatgggtgtatttgtccacgttgctcatgtgtgactaatttgtgagattttttttgtttgacgcagcgatcaaaatcacatatgattaacaaaacagcaatccacaattagcgaaggcacctcctcttgaatcaggatagctcatcgtctaaacgaagggcatgctttgccaaaccatgtgctgtagaattctaagtagctatcaaaccaaactttataatagggtttcgtaattttataaatgctactttattatcatcaaatttaaggttgataccattttgaaattttttaaaatagtacaaatagaattttgaattgtaataattttttttaatataatcaagaagaaatttttaacataaacaaatgatcaataattagttttgtcataacatcttttgtctaaattgatttactattaagttttattttgacaaaaatcaattc

SEQ ID NO: 126058 - DNA, 687 bp, Cannabis sativa
cctttttatattaatattcaatcttaaaattatatgatatgtgtttttatttatagtttgataaattgagatttttaattttgtgtatttttaattttattttacattttgtgagattttttggcatatatttttttaagtaaaataattaatggttgaaactcacacaaccttaccgaaaatacacaacattttatatgaagaattagaggttgattcattaaagtatgatttgaaattagtgataaagtagtaaaacagtttcgaaattgtggtagctatggcggcccgggccaccacagagcaacattcaaagcccgtatttgaggcatagttcaatgttacttggggtccttaaaactgattctattatattaaatgctaattaaattgttattgtgaaattctcgatgattttttgataatatttcatgtgaaggctccaaatgatgtcattgcaattttaaaatttaacgattatggtacatcaatatgttctcgatgttttttcgatggtttgtccagtcctttacaaacactacaacaattgcagctattactggcggaaacaataccggtgggccaaatccgcccctattaatgggattattacaggcggattttagggcccgccggtattattctgtattaaatttaaaaatgaaaaaaaattaaaaaataataaaa

SEQ ID NO: 126059 - DNA, 523 bp, Cannabis sativa
  modified_base (40)..(45): a, c, t, g, unknown or other
tatattaataagtaaatccgattatattgaaatgagtttnnnnnngggcataaaacccaacagtcacagtattagatcctcgagtaaggccctgcatcgtcttttttgcttcaaagatacgtggtgcatttttctcattgaaccgttcatgtaactttgtccagatttcagcagcattgtcgtgatacattatgctatcgacaatctcatcaaaaatagcatgtagatccaagaagtgttattgcatctacaccagttgtcatagtcttcgtgatcataggttgaggaagccttccattaacaaatttcactttgtttctagcaagcaaagtaatcaacatcgatcttctctagatgttgtaattctcactacctttgagaatttttggaataagaacagcacctgagttatcaccattcgatagaaaataaggattcgagaggtcattggcattagtcgatcgtgaattctcaccaagaacagagtacatgttcgaatcatgagatgtattctctatttcac

SEQ ID NO: 126060 - DNA, 1602 bp, Cannabis sativa
  modified_base (33)..(72): a, c, t, g, unknown or other
  modified_base (1541)..(1543): a, c, t, g, unknown or other
catgcaacataaaaatgttatttctgatctttnnnnnnnnnnnnnnnnnnnnnnnnnnnnnnnnnnnnnnnnagggcataaaacccaacagttagccctgtcccttatcttcagcgaggggatcggctgaatataagtggggactttatggaagaactggcaaataccttttatgtcataagccattagaaaacccttgatataacccctgatttttgacatgcactactagaaaaatgggattcagtgacccattttgagtgactctaaaaagctttagtgacacttcactgcgcgtcactaatgtgggagactgtaaatgtagtatatagtgacccttcagtggtgtcactaaagcattttagagtctctcagtacgcgtcactatagcctttttacgcgtcactataaccttttacagcaacaattaatgtgtgtcactatatcatatattttttttaaaaaaaaaataatcgacaaaattaaaaagtatcagatttttttttatttttaattttcttattaataaaatcaataatttttttagaatgaaataaaaataataaactgaaaaatacaatattattggtgccctttttttaatatctatataaataatgccgattagaatgtctcttcaattattattggtgccctttttttaatgaagaagctgccagcttggttattttacaatattaactttctttttagcatatgaattttgggcttaaacgtacaattacaaaaaaaaaaataaaaaaaaaaaataaaaaaaataacccctgaaaatacagataaaaataaatctcaaagacaaacttttattctaaacactatacagagcaaactgattcaattacacaatacaaaatcaaaatgttaaacaaatatatgagttcatcacgggtatgaacataaattttaaatccaaaaaacaatatacccagtaaacacaaacaatattgaaactaaaaaaaacctaaaaaaaattcaagttcattttgagataagctccaaatgcgaccacaaccgaaattggaaccatggacgagctacaaatgtcgtcgaccacaaaccaatcacagacgccgatgagaaagacgggttgacaattacctacacagaagagaaagagagagaaatagaaaaaatgaaaaataaaatagagatatattaacctaaccttgggtttcctgggatcttcggttgttgatgagaaagatgaggagacgacgaacgattgaggtggagaaacgacgactgatcgaggtggaaaaacgacgactgaccaaggtggagagactacgagtcgatgattggggttccatggaacttcactgttgttctccgaagaagaaagaaggacgcctcccttttgcttaaaaaactgattgggttttttttttgtttgtaaacccttaaatgttacctttaaatattttttatttatttattattttcttatgtcttgggtgttgtgctgatgagtgattagtggtttaaattaatatatactaagagcattgctattgggcacnnntggtgcctagcaccttctaaatgtgtcgacttgcaattggctagcgatactctataaaa

SEQ ID NO: 126061 - DNA, 1889 bp, Cannabis sativa
tctgttttacacgcgtataaaataaaatagtcacacgtacaacacattgtttgaacataatttttggcacgttaaagttttctgaattttttaaaattttgcaggatgtattaaataagtataatttacatgaccatgagaaaaaatttgactaaaaaattatttcggatactaaaacagataaagatgtatcggtgtatcctttttaagggggtgcattatagaatttccctaaatgaataatatcataaataatttaaataaattttaaaatatattatttacttaaagtttaaaatttaaaagctttcaaaaaaaaagtttaaaatttaaaatataaataaaaacaattaaaaagattgaagtctttttaagagaatcttgaattaaataatggacaatttttaattgtatacaagtatattaattatattataaaagatgtgcaaaaaaaaaaaaatataattacacaattctatacaatttgataaatatttaaataatcatcatattcatattatataataaaaataaacataaatatttacgattttaacatgttgattatttttaattaattttctaaaaaaaatgcatgaagctaaatataaaaatacataagtcaatatttgtattttgatatattactaaaataataggtttattaaaatttaatacaaaattatatgtatacaaacatatttaaaaaatttgtttatattttataaacaacgtatatacgtatatacatatttgattattattaatgtttattatggtttatttatctaatatatttattatgataatatttaaataaaatcaatatgatttgtttattaaaagtccataaataattttaaaaataaaatatttatgtttattttgttttaagaaacgaaactataatgtgcaatcatgtataaacattttgtttatattttatattaatattatttataaattattgatctaatatatttaatatttagctttataaacaaaatatgtatgtttactttttttgttgtatataaggaaaaatatgtatgttcattgtttatttatgtaagacttaaagaaaattaattaccttatatagattgtatagaaaataaaaattatgtttatgtatctaatatagaatgtataattaaatgtgaataagttattttgtattatatagtataataaaattatataatgtatacaaaattataaattttccttaaataattatattataatattaaatatagatatgcatcatttgtatgttgtatatattacatgtgactatataaaagtgtgttttttttaagaaaaaatattacaatttaaatttattatacatatttctcttattttttaagtgtctttctttttacattataattcagatttaaaataattatacatataaaaaaaaatatatatttctattgtcatttattttactcaatccacatatctaaaaaaaaaaattctttctattagttttcttttaaaacagtaaaataaaaatagcgtttgtgtttcttaaaaattattattgtgatgctattatctattgttgttactaaaaatatatatttttattattttttattaaaaaaaagtataaaacattttaaggaaattgaaattattataaaattaaaagtattataattaaactaaagttataattaacaattaataataaataatattatttttttctataaataatatttaaattaaatattttttaataaaatatttattaaataacaccaataaaattaattatataattaaaagaaaaacaaaaattataattaagtatagggttatttacaaaaatatgggaaagtaaagataaattttaatttatatatatatgacat

SEQ ID NO: 126062 - DNA, 1097 bp, Cannabis sativa
ggtgtaaggacccaatggaggcttgagcggggacgttacaaaatggtatcagagcctttacccagccggaagtgtggtcgatatattatatcagagccttgacgttacaatatagtatcttttaataattttttatccttgtctcgcttatgactatattgtcagcgagttataaatattatctaataatcttttatttaacgagttatacttctttcgcattaaatgatataaatttattataccaggtagttcatattccactacttgcacgtgtcatcttgttaagtgtaaccgaatagcaggtataacatatatttataaatttatgtatcttcttaaaaaattatatactatatataattactatacacatatacttactttcataaatttttataaaattctaatagtttttttgttaacattgttaattttttatttacttgttaataatagtttagggttatttttatttattaacttctcaactctctaactttacatctattctttctctctttttgtaggtaaatggtaggaccttgaccctattaattcataaacatttaaattttaaatacattctcatctctttttcaatctatttaaataatcattgtctctttcatagctatttcaaaaatatttaagtagaacaattatatgcaactaaggatgtatactattacttgattggtatgagtatatatatatatatgttacaatattatttttttaatctattttagttttgtccatacttttctatttaatgtttttattcttgagtgatttttttgatagaaccaatcttgatgatagaaaaacaagatttttaatggaataaaaaaaatatgatgaagaaatattttcctaattttgagtaagtaaatatattattcttttaaacaattataatgatttttatatattctttttacttggcaaaggtacaataattatagtttgcgataaaaagtcttatttattataatatttatatatggtaaaaagaattagtaaaaatagttttacgggtaaatactattttggatcttgtgttttgtaaaagttattaattggaccctctattt

SEQ ID NO: 126063 - DNA, 601 bp, Cannabis sativa
  modified_base (58)..(59): a, c, t, g, unknown or other
aaatgtaaccaattttgtcataatatctatagctcagattattattaaattttatttnnacaaaaaatcagttcatgatcctatttgtacattgtaaaaaatacaaagtcaattttgtcatttaacaaaatagatggtccaattgataatttttgcaaaacacagaatcgaaaatagtatttacccatatttataatttatctatatatatatctataattgcattgttaggagaagtgacataacattctattcattttaatattttcgtttttctattttgtgggtggatttttcatgatttatctaattttatttacatttttctcttgtaataaataatttatctatatatttatataattgtgttgttaagtatggacggagtcaggataaaaaattaaaaggggccaaactatattacatatttaagtaataaatatttcgaaaagactttattaaatgagatatttttggcaaaattcttttcacatttgtatttgttacacatatgccctaaaaaaaaaagtaacagcaaaagtattttatcttacgattttattgtaggcgtacctttcagtatcaactaagcctgttaagt

SEQ ID NO: 126064 - DNA, 2676 bp, Cannabis sativa
gggagagtagatactcaaaaacctgttttaatttattgtgtgtaactctggaccttctttttttagggggagttacgttttagtttcttttttatgtttgatatgagttatacatgtctgtagggggagttcttctttttacttatttctaacatgtgtgttgcaggtttttattttatttttgtctatcaaattggtaaaagagaagattgtaaaatcctttattggcatatttcataaaatagacaaaaaataatatttgtagtattttcaaaattggttttatttgtgtatttgttattttcaaaattttaatttcttttcttagtgtgaaaagactttaaaaatcaaattttattctcttttgactttatttatgaataaatatgagttttccttatttagattatttgatattatctttgtatttttaagaaaattcttaatcatatttatttcttttttatctgatttcttaaccaagaaaccgtgtatagctgtgtgtgtaaaggttctcataagttgccttattttttatggaaattttgctaaaaaaaaactgtccaggttcaatgtacctgtttgaacgaatcgactttctgtttaaacagtttttgactttcctgtttggaaaaaatttcatttattgacatgattgtttcttggttgtttgaccacgacctagagggtttctaaagtgtataaagacacccttaggtcgctcgtattggttagctctctggtgagtcaattctaaaattactttcaaagttagagagaatttctttgttgtgtgaagaacttgagtccaacaaatttttagtattttattgttaacgcaaattttttgttaaccaaaattaatgagcttttacgtaataaatattttacagaaataataatgaataacttagaaattaataacttcatagatttttacatggttttgcagttaaaatctgcatactccacgagtctttcttattaatgatatttttagtacagaatacaatatcataataataatatttttctcccaaaaatttctcgtcctctttttctatggaatctacccctatttatagaaatataggttgacagttattttcttgtgatcagtttaaaatgtaattgttcataaaacatgaataattcccacgtttcatttaattgcatgtgggataatattagataactgcttaactgctcaactgccttttgtttctatcctttcgatggttaatgctgatttggacgattgtatctcgcttaacatgagttatcctcatccatcttgatgtggaaaagatggttcgcctcgttatgtctctttatttgagttaagatcgtgaggtaaatgtctcgctatacgtaatacgaggttgccatgtgtgattgtatttattctacttcgaataaatgaatatcttctttgactatgtactccgaggcaggcgcgtgtctcctcaatatcagttttaatagttttttatccatatctcgcttaagacttatgtagtcagtgagttgtgaatattttctattaaaattttataacgagttattttatcttgcatttaatgatgtaactttattatatcagggggttcatattccactacaggacacgtgtcaacttctaaagtgaaatcaaatttcgggtataacatttattattgtattattattctgtattatttcttgttaaaaaggtgcaggttgaacatcttgaatatcgttcatcaaacttcgggagaagtcttgtttacgagtcacttttcaggaggaaaagtgcaagttatccactctttaggagaaagattgcaagttagtcactcttcgagaggaagattgtaaatgagtcactctttgggaggaagattgcaagttagacactctttcggaagaagattgcatgtgagtcactcttcagaagaagtgtgcaagtgctatgatttgaaggtagttcaaggtcttggcactttataaatttgattagaagaataaatttcaacagttgcagcaaattcaaagagggagtctttatttatataagtcaatttagttttgtaagcacttgagattcatctaataaatttcattctctgggcgtggccttatagactaggagcaattcgaaagagttgatgataccatgtataaaatattgtgtgtcattttattttctacaattttactttctgcagtatatttctgttctattggattttgtgtctgatagagataaattatgttcaaacaattttactacagttctgcattatttaaattattttataattttacttagtaattataaaaacgaaatttcatataacatgtttgggaatgtaaggaccattagacactatatgccacaaattataattcctagattgaaggtaagtttccattctaattttccaataaggaaaatctactccattgaagtatggtgctctatttgtgctcaaaccttctaacatgttattttgtgaattacttagaaacgtcatgttctagattgtgaaatctaatcaaataattgagccattattctgataccaattgttaactcaagatatgtttccaagagaggggtgaattagaaatttaaactaattttggtaaattgaaactttcaacacaaagctatgcaattaatcaagtaaatgc

SEQ ID NO: 126065 - DNA, 1458 bp, Cannabis sativa
atagaaaccactagagaaactactctaaaaactcaaacaataaatttaaaaaaataatatatgagataattttttttaaaaaaaaaagctttcatactagtatggtttgctattggagtcatggccctaatccgttgtatgtgttgttccttgtcggtagatctttttcataggatggtaatcaaaatagtttgtcattttgtttgataatctatttatgggattttagtggctttatttatatgtactcttgtcctattaaactattaaatgaatattcatttttttaaaaaaaaagatagcaaataaaaatcaaaatgttaaatagactaggtacgcataataagatagcattttgttttaaattaattaaggtgagatacatgttttttatacttgatttaaaattcaagtcattattattatactcaattttgagaaaataaagccttgattatgaatgtaatctagtggaaagggaggttcttgaattatttaattaattgtcctttgttttttttaacaaaaacaaaatattgttgtaaaaaaaatgttttgttcttaaaaaatggtatgttgtcctttcttaaaaggacaatgataacattaatttacgaggggttgaaacaagtattaagacacaaatttggctcattatgcaaagaagaaaggcataggtagggttttatatttaagttcttggcaaatcgacaaccatgtataaaatgattgtaaggcaatctatttcacttaaatggtaaaaaaatcatttaaattagaatgatattttaataccacaaataaatcaaatgaaattataaaataaaattgttattttgggtttagattaatgtttgaattattttattaaaatataggttgataaataatttttttttgttgtttagtctatatagttagtaatttatagttagtgaatttagcatatctaattgaagtaaaaatatacatctttctagttaactaaaacttatgataaggagacataatttaactaagatttgttgctatatcatttttttaactaatataaatacatattatttcaccacaatttgtatgtttttgttcatatgataatttggttttatttcccttcaaaaaaaaaataatatggttttgttttataaatttaaggaggaatacttagatcatctccaatcatgacactaaatttagtgtcacactaatattaaatttagtattctaattaaatattactatggataaccaaacacagtaataagtttacagataattatattctccttaatatttccattaattagattattttgaaccctttataccaaacgctcccttagggattacatttagcaagtgtgattaaaggtgcatgtattctccaagatagagtatgaagtgattttttttattttatctttatatattaaaagtgtctatctaacggcattt

SEQ ID NO: 126066 - DNA, 1039 bp, Cannabis sativa
tgggccggcccatagtatttttgtaattttttttttccttttttgtatatttctgttttttttttttcctttttctttttctaaatttataatatttaaataacaataaaaaaaatcttaagccaacatactagtaacgcaactttgaaatctttgtatttgtggataatatttattaaattataattttatcaacaattacacaatcactctatttcttaataatattattattaggcaccaatagtggttattatcatataaacgtaacaccttataattatttaaaagtcattactttaagttttatgtaggggtgtggataaatcgatccgatctaattacaaccaaatattaaatatttgatatctaattgtgatcggatttggatgttatttttaactatgcaattgatttggatgagatggttggataacatccagtcaaactaattattatttttattaaatttgaatgagtaattaaattttatgttatacataaagtatatatgtatacattaaaattttattctaatttttttgaattggattggaatctaatgtatactgaaactaaaatattagatgtattctgtggatgttgaataaagttgaatcaaactaacaagggcaaatagcggcataagtatctaaaattttgagtctgtaagcagcataaatccaatgattttttttagtggtataagtacccaatgtttgtaaaaatgtaatttttttctatttttattagtacaggctcacaataacaaagtctgtactgataaaactggaagaaaattataattttataaacattgagtacttatgccgctaaaaaaatcattgagtttatgctgcttacaaacctaaaactttaggtacttatactactatttacccaactaacaaatatacatgaaaaatatctagaggatagaaccgatccaatacaataatcaacgaatgttaaatagattgaatgattaaaattaatttaaattgaaaaggaaaaccaagggtaggaaaggctatatggc

SEQ ID NO: 126067 - DNA, 2070 bp, Cannabis sativa
gttattacttgataagatatacactgttattaatgagccctctgacagctcatttgaaaatattagtagcaaaataaaatcaattttatgaatatgtcagccatcaaaatagtaactgctaaaaatcaaaattaataactctagaagtcatattcaatataaaaaaaatccaagtaaattttaaaacacttgtccagaccaagttaacctcttactcatgtatgaagaaatccatcatattagaacttccagcaaaactgatttttcaatttttccaattttttattttttttcctaataagctattatttctaacataattggtatttgaaagagaataccaacatttagtttttactagcaaaagaaaataaaacagaaaaaaaataaaattaaactaagatcaaaacaggttccaaaattgaaatctactcgcatctgtgtgtatattttcaaaacattgataagagtcccatatgctacctcgctatgtttgtcatactgtcatactatgtcgatcaagacaaaagtttccaattaacattaaatctttcaatcttgctattcacaatacagaaaaaaacaattttgtattaaaataaaattttatttcacaaactgaatttattataccagcgaaaaaagacctcaatggtcttaccaaacatttcaccaccatactggtttaccaaaaacaaaaccaaaccatactggcttacataaaattgcaaaccgtactggtcgtaactaatgaaacacccaaatgtgtaagccataaaataaagcaaacatagcacaataagaaaacactgtgaaccaaaagagaagaagccacatatcctttaaaaagctcataaggggaaaaagtatcaccaaaaggatcaaacactactatacttcggtaaaaacaaatgacaggaatgatgctattatgagatgtaataaaacacctcaagtatatcagaaacaaaattctgggatttaatttctataatttggaactacagtgcatgcttcaaaactgaaatgaatgcaatattctgggtttccaaataagaatcaaccattcacaataaaacaacatccatcaattgcaatagagaaaacgagtctcaagatccaaaaaaactgggatatcagatttagcaatagtgaagcgtatacgtgtaaataaaacacaaattcaaaagaaacctaactcaattaaagttatacatcaaaacttttccaaaataaaataagaaaaggaaaaaacgacattaaaaaaatctaaccttctcccacatagatagtgacctaaactcgttcaaaaacatcgcaattgcttctgagtatcggctgaagaaagagtgagccggtgaggtgagtgtctgagagagtaagattgagacagagagcgcaggagggaagaccagatcagaccggtgtgtggtgaagagattgggcagagattttgggtcgtaggcaccgcctgtgcgtgggtctctgggcacagactacaaaggatcttagtctcttgggtgccataggtgtcggtcggagatagggtagggttagtcagtgggtttctggtgggtttcttagtggagatagggtagggattggcggtgggtttctggttagtttgggataggctttgagtacccatccaggtttcatttgggaagccttttaatcaagctcactttgtatcctggagtggtaataagtcttccgtgtctgggaagcaaaagtaagacaaggtggatcccccgcactctgcttgggcttaacttatcccggattagtgaagcttcttcgtgacttaggttagttgaggggttttaatcagggagatcatgagattatctctttgttttatgccacgtgtcacttgtttagaaacacgaataacagataatgagtcttgtgatttcaatttatttgaatttttttaagatgctaatgtgtattttttatttgattttttattatatttatttaaaagtaaaaataatgatattcataatttttttatttaaaaaatgcaaaaagaaaaaaaattcaaaaattcatgttttttatttttaa

SEQ ID NO: 126068 - DNA, 844 bp, Cannabis sativa
atcgattttttcggttcggtttgggcgggttattcggtttgggcggtttacaaatttttttgtacaaccctacttctcatgatctttcaaacttcttttttttaatatcctgtgtaatctttgaagctgtattcgagtatttgttgaaaagacaattgttcctattgctccaaatgctgtaaatcatggctgccaatatcgacacatgaattcgatgcttcttgtccctgctgttcagaatcagccactgctgccagctttggaaaccagtcagccacctcctgattcccagccatatgctcactcacctgctccataacctgctgaaataaacaacagtcaaaaaatagatgggagttactcttgaaattttaatttggctgttttgtctaaaaaaaaaagttacaactaatagtatatatatttttaaaaacaatttatgctgattattttttttttaacaaaaaatcatgctgatatttttttttgaaagaaatcatgttgatattttaattagtaattaattggtattttatattttattaaaatataaattgtaattatctaaaattttactccgactacgagggctttttctctcctctgattcacctcccctggggattgttaaggggtattgagccccctcacaatccatatcagggtatggagccatcgtcgtttcaagtataacatgttgagtgactactcctatagggttcaccactccgtagggctatagtatcaacgttgtgttaaacaggtagtttttgcaacgtaccccggcccgaaggtcctcttgaataacatcaacacaccagagccttcttgtctgaacttcgtt

SEQ ID NO: 126069 - DNA, 1945 bp, Cannabis sativa
tctctctctctctctctatctcagccgcctccttcccttctagctctgccacaactgcccccatcaaagcaacccaactttaccccatcagtcgcctcgttctctctagctccgccacaacccggaactgttctcgatctctagcttcgcgacaaccacgtcccactccgtccgcgtgaagatcggagctctcatcccagtcatccgtcgaagatcctatcctggccatccgcgcaaaggcctcatcccaattgtcgttccttctctctgtacgaaggacccatctgccctaggttgtcgttggccattcctccactgtcagagaccatatcccgccagatctccttgattatttaaaaagaaagttattgttaataaaagtttgttgttagttagtatttttttgtggttgatttagagattgttcattgtttgttagaatatacttagttttgatgattttttctaaattttggtcggttttgaatggtggttatggtgtttttcgatccggtgtgatggtggttggaaaaaatgaaaacgatatatgttcgcggccatttatcaatggattctcgataggttatcgataagatttagcttttgatgatggtcattaagtttagcgattatcgatgggctatcgatatattctcgacatgttctcgatagttaaagcattgcaaaaaaaaatttgtaattttatttttctttattctcacttgaatattgattgattatcgacgggttgtcgataaggtgatagtcattaaatgaatctattatcgactggttgttgatattttcttaacatcccaagaatggcatttttttttgttaaaacacatctcaatcatgattggaaatacaaaatcatttgccatttcgaaaaactgtcgagaacctattgaaaagccttcgagaaaggtcttccctaactttgggacatccgagtggagaacctttcgataacctatcgaaaagctttcgagaaaggtcttccctgaccttgggacattcgagtcaagaacctttcaagaacttatcgacaacccgtcgagaaagatcttctctgacctccagacattcacatcgagaacccatcgagaacgtatcgagaaactttcgagaaaaatacgaacacacagaatactccaaaaaatgagatctcgcgattttagcgaaaattatattaaaaacaaaagggtcaaatggaaagttcatgtaatcaaaggaattaataggtacaaattagtaaggggagtcaaaattgatatgaggtgttgtattaatcataaaaagagaaattttcctaaattaaaaggtacttctacaatgtacctctccaaataaaagaatcacgcatgtaacatatagtttgaactttatttctggcgtgttaatttttttttttaattttaaaatttttacaggaagtcttaaataatggtaatgtacacgaccttgaaaaaaaaaataaactaaaaacgtctttcagatactaaaatagatagaggtacatcattgtaccaaaaaacgatgtgcattataaaattttcctaaattaaatttttaattacataaatacaattaataataatcataaattaaatgataattttataaattaaaaaattaatataaatatatataaaagtgaatgtcattgctacagcgccacgacatatatgttgtgcactgtaatcacacgacaaatatagagtgaaagttggagtctccttggagacaaattgtgcatcatatattgattatgtaatttctttggagctgctctaaaagtgagtatttttgtttagggaaaaaaacagaaaaatacaaaaaaggaaaaaaaaacaatacaaaaatactatgggccgacccattaaatatttatacagtccacatacaaacatttacaaaaataccacatgcactaagccttcag

SEQ ID NO: 126070 - DNA, 3666 bp, Cannabis sativa
  modified_base (1137)..(1138): a, c, t, g, unknown or other
  modified_base (2493)..(2494): a, c, t, g, unknown or other
tggttcggctaggagctagaatcactattggtactggtctttcaacacatatcctcaagcaaccttggcttcctgactctgtcaacccctatgtctctactacaggaccgggtctcgatgggtatatggtaagctctctctttgatgtctcaactcgaagctgggatgtctctcttgtccaggatatgtttaacacacgggatgcagctctcatccttggaattcctcttagctctacagctactgaagattgttggtcttggactggggatagaacaggcagctacactgtcaagtctgcctatgctatgttgcaacttcagaagacttctcggtctggggaaaacaattcgggattctggcacaaactttggcaccttaaaataccgccaaaagtgacaaatttcatgtggagagcagtttctgatgctcttcctacatgcctccaactggttactaagtgtgtaagtatctctcccacttgccctgtttgtcaactacatgccgaaacaccttctcatgttcttctcaactgcccgcttgctctaagctgctggcacaaggttgatttgattcctttagctgattcgcaaggtactattggtcattggctttatagtgtgtttgctaattatgatgatgatgttatttgtcgtgtggttatgatctgttgggctctttggaaagcaagaaacaccttagtttgggacaaaaaagcttcttctgctactcaaattctctcttcggcttgggttactcttgatcattggcgtaaagctcaagacaaaacatgtttattatcatcctctcttttgcatgatggtagtaacattgagcaatggacgacacctacttctaatacggtcaagatcaatgtcgatggtgcaatatttgagaaggaaaatgcctatgggtttggtgtggttgcacgtgattcaactggccaaatactcgactttattgccaaatattaccatgggaattacaaggcggaggttgttgaggctttaggggttaaggaggcccttagttggataaaagacaaagggtggagcacgattgaggtggaaaccgacagcttactcactgttcaagcaatctttagtaaacaacaaatgtcttctgtctttggcttgnntactaatgattgtaaaattttattgtcttcttcacctaataagttacattaaacgatcagcaaatcgagtgacacattttgtggctagacgctctcgattttactctgatcgtagcattcttgagaataatgttctggctgatcttcatactatcttgtaatcagaatgctcattttaatgaagttgatatttcattttcaaaaaaaaaaaaacaatacaattatataaatatataaatattaatattaattaaacaataaaattagtattaaatagttttatatttatttttaatatatatttattaaaaaaaataaatttatatacaaaactttttaaaaaaatcaacctacaatttcttatataaaaaaaaagtacacaaattttttaacgtacatcatagtgaagaaaaattaaaaactgaacaatccttacacaaaatagagatctaaaacagaaagaagacaataaatctacaaaaaatttatcatataattttaaaacatatcatcaccgtattttatttgtagttaccattacatttaaagttaatgtcattactgtatctcacttaatatctttcccaataggtaaatatgtgaagaagaagaactgaataagaaataaaataaaaaaacttatattttaatggaaaaaaatagagagaacttgaggaagaaaaaagtgaaaaataatggttatttgctcaagatgactatataatataaacacataaaaactttcttagaatgaaagatcacgtgagccactagtatctgtattgatttttttaatagagtgtgtccgatttcattgtgtttgataaaagtgttaaagaaaatgtgaagtaacataagggaaatttgactttttatacatttattagattaaaattatttcactaaatttaagtaaactcatattggcagaatagtctaacatttcataaaatccaattctacccctcctatttcaaacacctaactctctctctctttctcccttatctctcttgctctatgaactcaccccaagaactcgacccacaacccaccactcacaacctcggtcatttctgtccacgaccaccacgaccatagacccaacgacccacagacctaatgaccactgcggacccaacgacctacggacccaaggacttctttatcaagcacggcttcactatcggcaatgttattaaaggaataaattgtataactaatgtttgtattatttgtgagtagatgttagatttagggtcgaaaacggtaagatttgagttttaagcaaaaaatagatttttttgccaggcccgatggtggtccgataccttcctgttgttaaaatgagtaanngttgaagacgaaggtccgatggtgctccaatgttggcatgatgatatggtttgatagtagtccgatggtgattcgatggtggcccgatgactttctattgttaaaatgagtaaaggttgtagacaaatgtccgatagtggtccgatggtggtccaatgctatggtccgaaggcagtctgatgatgccttcttgacgagcttaatgaatagagcttaacatctttaaatgtagaatatggttcgatggtggtccgatgttacttttttttatgtacaaaaacataaaaaaaattaaaaaaaaaaatagatagcatcaggtcattatcagactccatcagaccagtagatgagaatgaggagtatggacagtgaagttagaagagaagagaagggagaagaatactatgggtatgaatataaagtgtgcctatttttttaatattagtaaacttaaaagtttaatatacacgaaatgtatacatataaattcaaatttcattaacatatatagcacaaaaacatggatacatgataatattactattagaaatcaaaaacctcatgccacaccaataaagaataatcaagcacagttatacatatatatatatatatattaattcaaactggtggttgatgatgtttgatctccaagcttggaggtatgaatgatgtgtaaacttgttccaaatctacttgtgtagattgttcaatggctgcgattttgagaggaatgtggtggaatgaacgatggaacttcttatgtgcaatgaagccaaagagaaaagtgatgattgggagtgggactaggagtggtgtgtacacaaattccttcactccaaagtaaccaaacatggtcacttggtataatatcatagctgcaaggattcgaaataccatgtgtggccacatttctccatagctttcatattttgttacatatactttcagagcctgcaaccattattaattgcatgcatgcatgcatgcataattatgatcactatcaatataatctctaacatatatatataattttataaaagttaattaggatttttttcccacaaacttttgtctaattttagtaaaaaaattctaacatgtatggaagttcagggagcataatttagtacatatcaaagtttaaggggcatgatttagtagatatc

SEQ ID NO: 126071 - DNA, 1140 bp, Cannabis sativa
tacaataaagttaaaaaaaaaaattcacgtaacttattggtaaaattgataaacatttaaattgctaattagttattttaaaattatatttttagttactatttaagttggcaggtaaaaatcaatagttttcatttaggataacaaataagtatagatacgaaataattttatttagtatatactttatagtaatatttaaattaattatgattttaataatataccaattggttacttttcataaaataatccactttaaataaaaatatctcttgtagataatattcaatttttaaattagttattttaaaactatatattcatttttagtttatattatgttgattaagatgtacttttatgttatattttttttgtgtaacaatatttatgttaccttccatactatttaagaatgaatgttaattaggatttagtaaaattataagacaataactaatcactatataagtaacgaaatagtttattttctagaaatagcgaaaaaatatatgcttctcatattttgaaatgtttacattaaagaatagaatacaatggtattttttttaaggtctgctgaataataatgtggccattaattatttttaaaaggaaaaaaaagattgagaaatagaaaagagagaatataatgacttaaagagaaggaaaaaaaaatgtcaggcaataatatttggccaagtattgaaatatgcctacctattaaaaacgttaataatacttaaagaaaaacttacatttaatgttaacgttattttttaaatttagatatataataaggtgctacatgtaaaaattatttttttatttaatacatatatttagaattcatatgttatttagtataaattaaaagtgtaaattttttaatttggtaatttattacatgatttatttaagcatgtaataattatgctaatttttataattgtgcatttaattttatattaccaaatttatgtaatttattgtttaaattaataaatttttaaaaaatctactattaattacatatttagcaatttgcatttaattaattatcatacaatgattgtatcaatttgtatttatttggtaaatttattattaatacaattaatttagatttgtataatt

SEQ ID NO: 126072 - DNA, 1452 bp, Cannabis sativa
aacaatcattgaaatagtaaaattgaataaaatagacaaaagtccttaaatccaacaatctcaatagttcagggggcattttcaatggccttaaaagatcaagggtataatttaatacgtgtcaaagttcagaggacaaaaatcttaattaaccaaaaataaaacgtcggtaaaataataagacaaaaaaagtttattaatgaatatatatcgatatatttttttttctttttgaaattcaagatatatagatataaattacaacaaccttttttgtttaaatgtatatttaaaacatacatctcaaaattagacatagtgacgtgtatatataaataagaaatgactacagtggaaaaaggtgaggactttttatagtccattgatggaaaatgcaatggtaattaagtggtaggtgatatgatagagggtttaaatattagtgtacttgataattttgtgtattttatattgttatataatttttcattggttaataaacggtatactttatctatttggtattttgacgaaagttttaattttttttttgttgagtatattgtaattacttataatattttgtaaatatttaaaaaatataaataatttatcaaaagtaacatttaaatatttaattattatgcataatttttttttcataaacatcctgaaaacaactaattaaactttattttgatagagtatattattgaatattctaaaaatttataagtaattctataaaagtaatgtatgtgaatgtaatcataattttttttactaaaaagttctacttagaaaagatgtactaaacatttattcaaaaattaaaaacttaaacttcatttttgcagttaatcctcgtgcgtgtgacgtggatgaaacgggcgttttaaatgaaatgagagccaaaagagtgtgccttttcagatagccaatgactcactcactcaaccttattcatcaaatataaaataaaattatttaattattttttttttgtgtgtctttttatatgtaatttatttgtacccttcaatagtcaggttaattaaaagaatatgtggatctatatatacagataaaataagtgtaattaattagtgtataatatatgtaatagttttgtactaattaatggtatttatttaaactgattcattattactatactgaaaatgcaaaaagccacgttccttataaccaaattatacctacctaccatacctactctctctttctctctcttagcctaagaagggaaatttgattttctatacttagaaaatcttaaaaaaaatttcctaaatacatacttaataatattggtaatatatgaccacatttctaatattctacaaaatacccctcccatttgaaaaaaaatcaaaaactgaaatcagccatggatgcctcatcccgaacctctctctcccatggctgcctcat

SEQ ID NO: 126073 - DNA, 1046 bp, Cannabis sativa
gatgtaaagtcacttttgataataaattgagaaaaagaaaaaaaaaagattatttcataaatacccaaaattttacaaaagacttacatttttatagatttttttaacaaaattgcagtcgtttttccgttgctgttacggaaaagcaacatgaaaataatgctttatttctcaaaaaacagatatacatataaacttagaaatgtaaaaaaaaaatctgtattttgtgtaaatttacgaaaacaaaaaagaaagaaaagaaaagaaaatcactagcattttgcacctaatccagcaaacttatgatttgggttctattgtgtgaacgatgcaatcctactcgatttgggcccaataaagccatgggctacagcccaaagaaagtttaaatgaactttttaatttttcttttgattatttatgttaattgttaattagttgtttatttaatgtgttcaatgatttgttctaggatactgccactgcattagctggagcacgagacacatcacaaaatcctttcttagacttacagattaccaagaaaaagacaatcaagtcaaccttataatataaaaacgtaacaagttttaaaacaaaaaacaaaatgattatctttttataaaaaaaaaatcaaaatgattatcttatatgttatttattattgtacattttgcttcaatttaccaaccgacattttgtaacgtttctttccaattatttctcatgccttaaatacatacactaattcgaacctacataattgctgaatgctgatgataatactatattatatttactcttgttttactggcactctatagagttttatcattacatacaagataaataataataataaagaaaaaaactaccctgagctatagatgatatgtatgtactataatataaattctaaatcatcatgcaaatgttaatagtgctacaaaaaagatggtgatattttatctgtgagaatttctaaataatattattggtgtctagtatttttttcggtatcatattattataagtataattaagta

SEQ ID NO: 126074 - DNA, 1697 bp, Cannabis sativa
attaaaaaaaacaagttataatgtttatagataataaactccaatttattttaaagaaataaattaaagtgaaaatttcaaattaattcaaggttgaaaattaaaaacaaaataaaaaataaaaaattcaagattgaaatatcaagatatcccatttcaaaaattttaaaaaaaaaaggaaaaaaaaaaagaaaagaaatatcaagatatatagtaaaaagattattagttgataattcattattaaaaaattattgaaaatccactaaagtctcatgaaatgttggtactacctttcaattcaaaataaaaattgtcgtattggaatttataaaaggattatttcaagaaaaattattaaagttatgataaatatgacataaaaagtaagtgtcattaaatataatattatcaaactaatcaaactaaaaatatcaaatcatataaaatattaaaaataaaatctgaatttaagattcataaaaaataaaaacttaattgaattaacataaaaaatattaaaattcttttcatatttattttttaaaaaaaataaaaaaataaaattatagtgatcgccggagttgtcactcatactgaaaaagtcactggagtttgctatcggcaccagaaaaatcgtcggagtagctgccggtgctggaaaagtcattggagttgtcgtcggtgctaaaaaaattatctgaattagcattgtcatcaaaaaaatcacaggaaaaatcaccaagagatgaaaaaaccgatttcttttcttgatgaagaaaccagtttcttggggatttttccagtaattttaccggcgacaatgccaattacgacgactcttccggagtttgcagtgccaaaaaagttaccgaagtagatgtcagtatcggaaaagtcaccggagttactgccggcgtcgaaaagtcgtcaaaatattatttttataaactagaaaagtaatttatattgtaaaatttatttttaacttatgtttcgcagcaaacctaaataataatattattttttttataaactacaaaagtaaattatattttaaaatttatttttaacttatgtttcgtgacgaacctataaaaatttactatcgttgatgcaaaatttaaataatcaatagaaatatatataattaaaaaattattaaaattataataccacatattcataaatcaacaataaaatatattataaatgctaaaatataaaaatgtgaggggctaaaataagcttgtttggctttacagtttttaaaaattaataggggttgtttggcaaaattttttaaaattttttttttaaaaattgagttttaaaaaactagaaaacagaaaacatcaaaatgttgtttttaatattcaaaaacaatttttttgtctaacatattatattttatattttgttcacatactcggatcctagacctgaaaccataccgaacttggacccggatgggttaatgtcatggtatggtgttaaaatattggaaaaaaaaatctaaaaataatttttaaaaatttgagtcaaataccattaaatttttaaaatgacaaaaaattattttctattctcacttttaaaaaatgaaaaatgaaaacacagccaaacaaactctaaaattctctctagctattatatgtgtcagttagtatttatttttttttcttattattaatgta

SEQ ID NO: 126075 - DNA, 534 bp, Cannabis sativa
  modified_base (488)..(505): a, c, t, g, unknown or other
tcccatgtaagtttcatcatagcgattgtagcagtgcgctgcggaatgcccgtatctgccacaaacttgacaagttggctttgggccatttgatctgccacaactacggcctcccctgaatggtttccctctatttcctctatttagtgtgtttcctcctctgtttcctcgaccatttccaaagtttgatgggtttgagcctgaaccagctgtacctcctttgttagtaaggttcgcagatggtgcggttgatccatttagagtcttgatgctgtttccagacacagattgaagtctctccatcttgctgtcgaaactcagtaatatatcttgtagttgttgccatgaggtcaattttctagcttcgatgatgagtacaataggcaaatactcaaaatctaatccagagaggacatttgtgaccagttgagactccaggtatggtttgttgggttttgtggccaaaataaaacccatttcaatataannnnnnnnnnnnnnnnnnaaagataagaaataacattttatgttgca

SEQ ID NO: 126076 - DNA, 1398 bp, Cannabis sativa
cccccccccctcttgtgttatccattgttacaccattagccccctgtagttcaacatctccattatcatctatcatttcagctagcacttgaaagccattcgaagtgcttggtgccttgaaatcagatttttgctcttgcactttcttccctttcgatactgcctggtaaccctcttcatctacaatgacttcctcctttcttttatcttctttgataacccattcttgtttagaactattcctctttttgcattctacagctaggtgccccattccagagcaattggtacataggtcaggtttccattcatatttcactcccacagttgtattacttccatgttcatcttcaaactccagtaaattgggaaaattctggttcatgagcacttcaaccaaaatcctagggtaattcaaacgatccctttcccgagtgaccgagtcaaccatcacatgtttgccaagttgccccactattttaaagagagacctctgtccccaatatttaagctcaagtccttcaatctgaatccatatgggaaaaatcttgacatcctcctttttgaagtttgtatctgcatcccagggcttcatgatcaccggccttcgattgaaaaaaatgtaacctccattgagcacctgatcccggaattccatagaactgaatcgaatgatgaacactccataggtgagcattcgcaccttatccacctggtctttccatagtcgtttggcaaaaccttctaatatatgcagagggggatttgatcccaggacatagcatacaatagatggttgccaaaaattaacctcttcttctatgtcatctaaagaaatcttaactttgctagccttctctgattgattcaaagaatgttccagattcctattaattgaaccagatcgcaaaatagggggagtgaaaaacttacctctagctaaatcactgttacattgattattcacatgaataaactgcaacaaatcattcctcacttcatcaatgcgttgaatttccttcagcgaagatttaggagacaaaggaggttgaaacatgtcttcctgtgagttacagctccttctccctgcgattacatcatcctcatcctccgacaactccagaggagttataccaataatctcatcgatcgattttgtaagaatgacatcagagacagaatcaggacctttcttcctcactttcttagcagaaatcttagccttcccctgagtttttgacctagtttttgccatggcaccagcttcaagctgctagagcaaaaacgagagaaaagctcaaaataggaacaaaattaatatctttaaccacttactttaatggttttaaccattgctagaaatttatgaaatttttcaaacatttcaactttctttgc

SEQ ID NO: 126077 - DNA, 2458 bp, Cannabis sativa
gaaggaagtatttgatgatccccaaaagtaaagtgaagtgaagtaagattgaacccacctcacctcaatactaggcgccaaaatccaggtcaatgccccctccaacctaatctttctctctcctgcccggggtcagctattaatcacgggcaagcaaagagcaaggataacctcacctcacctctctcctctttagtttcctttaatcttttactgcttatgtcacgcgtttcctcgggttcttttcttattttctttttaaaagaaaaaaaaaatatcaaacaaaattaattagtacaataaataaacaagagaaagaataaccattaaactcgactcttcttcttctcatttaaaaccccgtatcttactccctctttttctttgttatttttctttctttctttctttcttttcttattctctcttcaaaaaaaaaggccatctttatatacagctttctcctttttctttttcattcactgaaactttcatacaaaccaaccaaactcataccttatttcattccttttaaacccttctctttccttcaagtttctatttttattactttccctaaccccaaaaaaatttaaaattaaaaaaacgatctttattcctttatttatatataatagcgatatcagagctttagagttgaattttcgatacttttttcaaaatgggtctttctgagaagaagcagcatcaagtaatggacgtgggtttagattcagacacggccaacaaaaaatgggtcatcgccggaattccctcacgaacaccattaaagcctatatacactaccaataatccacggccgccggcgccggaatcaataaggggttccgatcaaggccaggtcaaccatgatattgaggatgatgagtactgtatttcgacgacaccgacgggagaagaatcaaagattccaaggattctgacgtgtccaccggcgccgaagaagaagaagcgttattcatcaaagtgtaaaatctatggttcttctgttattagagagttctttactacgcctccagattttgaaaccgtattcacacgccatcatcatgttgaaagggctaattaattatatataactcatcaattcattagagttagaaaaaaaaaaaaagctttaattagcttgtactaattaattaagtccatattttgattttgctaccactttttttttttaatttgtaacaattaactctatggataatcatataaatattatgttataggctaagctgatgattttgttatgactagaagtggaatttatatttgacttgatcatatctagttatatatatagcactagctataggtgatatgtatatataaatttttcaaatttctcaatttctttatatagattttggttaattttgatgagttgatttacacatacaaaacttaagtctgttgtgatgttattgatgatgatgagatgaggaaagaaccaaatggcagtaaagatagattttttttttaaagtttgggcggtttgatggtacttttcagtttttatatactgttttttttcttcccttttttcccctttctttctttctaaaaagcaagttaattatctctatggtgatgttttgatcttgtgttttatgaatctatagatatctacatgagattttttcagtacaacctcttttttaattttatttttttcttataatcgtctagttatttaggattacacttaaatttttaaatttttttgaatggtttatagtattaaaaagaaaatctaaatagttatttaccactaacttaacttgtataaaaaaaataagtctaaataagtataatatacacaactataaaaagaaattaatttgaatgtttatcgaaacatttctatataaacattgtctagtacactcttcagtatcataccaaaattaatataattaggtattgggtcatatataacttaaaaaaataatttttagcgaatattcgttagtcaatcatagacgccacttatagaagttaaataatactaatgtctaataataatatgtggattattaattatattatttattaaattaaattatgtaaaatttaatattaatttgtttcaataataatatcactttctttatagtgggatgttattagcatttctcaatctatatataagaatatattatagtgtatgtgatgtactgttgattggtcatgcgcaggagtgtgacacatgcaagtcaaaatctagctataagaaaccaaaattaaagtgttattcaagcaaaagttaaatagggactaataataaggttatttatcataagctaattagatcaatatttatagttcttattctggttcagagctgattgactatgtgaaaagaaaactctcccccacatagctctttaggggtgggcatccgatccaatccaacctttttttcctcatccgatcc

SEQ ID NO: 126078 - DNA, 747 bp, Cannabis sativa
ggattgatgcttcaaattgaaagggttagattacaaacggctatatatatatttgtagaatgaaacctaaacctaatttatgctattgaactttttggagtgggcttatatttgggcaaacaaattaatctctccaatcaacaaacacattcctccaatcataaaattggaatttggggattttgttggcattagatccttaacagagtgaagtgtgtgtttggtgtttgtgttataatcaaattttttaggggtattagatcacaactatatcaacatcaataaaatccttcatatttaactaatcaaccaattattattgtaacataatttcatcatcactcataaaagaatatatatcattatcaaaacatattaaaaagaagtgagatgaagagatgacctgagaagtgaaagagagaaccccacgcggaactacggaagaaacagacgctcagtttactccggccaaaggagaagagagaatcgtttagagagagagaggcaacttatgtgtaaaagcctttaactatttttttttacacacaaataggaaattaaatttttttaattttttttagttaacgtttacatatctatatatatttaaggctaattagtaatttttctccttgaaatgtagtaaattgtgcccttgaatttttttagccgttaaaaattctcctcgaactattgagattgttaaatttaaggacttttgtataattttattcaattttactgttt

SEQ ID NO: 126079 - DNA, 546 bp, Cannabis sativa
gtatcagtggtgtctaatacttttttatgtgttaatatcattattagttcaaatatatatcgggtctcatatagtttagtataataatttttaaggagtatcgttagccaatcacaagacgacatatctaaaggtgttaggcactattggtatccaataataatgctatacttatatatattcggggtaagtttacagtacatcctttaagggagtgtttcgatagacctcttatcattttacgatatctaagagagttttttaacttaattttttttatatataattgtgtatgttataattatttaggactacttataattttcattatttataatatcaaaaaataaaatttacatagtttatatgtaactgacagatattttattaactttcaacaaattttaaatacttttttggcatctaaaacatatttcaatactattaattacatgtgtattaatttgcggcgaaaccccctaatgttttaatttttacacacttaacccccttattttttttttgtggcaaaactcccttatgttt

SEQ ID NO: 126080 - DNA, 830 bp, Cannabis sativa
  modified_base (38)..(79): a, c, t, g, unknown or other
tatatgtgttttccttttatcgttttagaagttcatannnnnnnnnnnnnnnnnnnnnnnnnnnnnnnnnnnnnnnnnnctggtaaaataattccaacatttagggctttacctttggttttctattccaaaacttcttcaatgcttgctggaaaccttgaaattatgtcaaattcttgtctggttttggttcaagagaggtcatgagagagagagactttgactgattttctttatttaattctaacttaaccttattttttataatatttgattttatatttagttaataatcaacaataaacttaggaaattccactaaaatccaaagctaaccacttaggtaaaattactagtttacccctttacttcaagcttaagtagccataaggctcaggggtagaatggtcaaacaccataatcccgcctaatcttgatattccaaatatcaaacatattttccccagcaaataaaaggctctaaactaaagtcacgtgactctaatagccaaaccgtcgtatttctatcgttatcgagcgaaaatcataaaaatataaattttcacattcatcatatatagtacacctacagtttaaaaaaatcttcaaaaatgaaaaattataactctaatgcccatttcataaaaataggaatcatattataaaataatcacatttaatcatataatatagttaattaatgttaatttccttcctaaacccatattctaagtagaataattatcttttttaccccctgtacttatgacactatactattatgccccttaatctattcagcttgttacaaatagtccttgtataatttt

SEQ ID NO: 126081 - DNA, 516 bp, Cannabis sativa
tttgttacactttttcattttacacacatgaaaaactcttctatatattgtcttgttcccattatattatcttgagtaatatcttattctctatgatttgtttactatttattatttttcttttaaaacaaaacttgtttaatatatattgttaattgcaattgacaaaaacaattaattaattagtataatcaacaacaatacatgcatgaatttcggtatctcaattttgttatgtttatgtctgttgtcatatttggttatccaatatgtgtttacaatattcataaaagtacattattcaaatattcctagattgtacattatattgatatgaactttgtattatgtgtggtgacaacctcttctacaaagtaatattaatggcaccactctaatctctctatagctattattattcataatcacacacaccaaactcaaactttcttggccttgattacacccttttatacacagcttaagttaagtaacagaaaaagaaaaaaaaaaaaa

SEQ ID NO: 126082 - DNA, 705 bp, Cannabis sativa
ttctaagatctacatgtaaaagaataggagagaatagtatttaataaaataaaagattgtatcttttgttactcaagctaaaatctcttttttgtaatagtatgtgatatttattgtcctaatgtttctatttattctcatataattgttttgtagagaccaaaggtgattttttgagcaatgcacctatttttcatctttttatatttaaaattattactttttaaaagtgcctttatatcaattttggaaaataaattaatatattaatgctagtcatcaactaccattatcaatcattaaacaaaatgtggttataagtatgtttttggtaggagaattgctattgggtaccagttgtaaataatgccttatgattggttagtcatattttctaaaagttattttttaaattatatagggcttgatatttaattacaccaattggtatgacattgaggaggtgctaggtaccagtgatacattttagcaattctcttttgccagctctaacatgatccaataagatatttcttatttgtggaggttcattgaaagcattgatatattgacagtatttaatgcaatttgttagagggaagaaatgaatgagtttcaacttgggaaagtagtcatgacattattatggatcactataacatggcaagtttacttcattggagtagtgggtctagtactagaagt

SEQ ID NO: 126083 - DNA, 651 bp, Cannabis sativa
tatatatatatttaatatacataaaattataagagagctaataaaataaaattatgggccacaatttcaattttgataatattaaaaaaataaaaataattatggtgtataatatgatttaatgttaaaaatggaggataatgaagaaaccaagaattggacgtaacatggaaaaagacaataaaagttattttattctttggtaggtttctattgattgatattgaattagatcataatataatatgatcttggccgtccaaattaataaaatggttggtgggaaattgttgaccaatttaaccaaatacatggcaacactaaatcataaagttgaaatcccacttttaccctacaataatattagagaatattattccatatatccaataataaatacaaagacaaatacaactctattgcaataaaattacaagaaaaatgtgattgattaaatgaaagttacaacacatgtgtactagttacaagtaaatatgcattttattggatagaaaaaaatccctccataccgatctatgactctatcacttttatctattaaccgtatccatacttaaaaaatataagtaaataaaggtgccgtttggtaacatttttgttttttaatattttaatcacaaaatgaaagta

SEQ ID NO: 126084 - DNA, 1064 bp, Cannabis sativa
tctataaccgtcgcctatacgaccatcgtaaaacgggcataataggcgacggttcaaaactgtggcgctaatgtgggttttctgacggttttaaattgtcgcctataactgggtataggcgacggtttatagccatgccttatactataggcgacgatttcatttggtgatgtccaagcgattcagagcagtgtttttatacctttacagtttggtcttattgttcaaggtgttcaaaatttgcttttggctttatcttttattgatttgttttgtaaaacgatctgcaaataagttggttcattgcttggcaagagactcttgtttctctacaggtcgtgtgcttcaactggagaattcttcctctgaagtgcattagattgttttgaacgaatttattaattagtaaatcttataatttttattcaaagaaaaatataaaagcaaagggaaaatagtcatcctctaaaataataataataaaaatatatatatatatatattagttagttatcatatatataatgaaaaataatatatatatatacataatattagatttattcaagtagattgtataatggattacaagttaaggtttaaatttcacattagagttttattctttttctaggtttatttttaccttctactttaaaagaaattacgtccactcactggttgaccactgtacagtggttcttagcctgaaatattactttaatttttaaattagtttaagtgatttttattatatttttttttataatttttatatatatttattaacttcttaaaaatgatttgatagtaaatacgcaatgcattaaaacattagtcttctttatagctacaacaaatatttaggtatttaaatattgtaattaaccaactctaattatttttacatatcttttcttaaaaaaatatatatatatatatatatatatatttacatatttatttttccaacaagcatagagtcttacatggttttctctaacgcgtttagtaggaaaatattttgaagtgacttagtcccacatggattgtgaatgaatttt

SEQ ID NO: 126085 - DNA, 803 bp, Cannabis sativa
tgactgtatacacccacttaatagagaacaaagatataagtatttaaggttttaagtggcataattcttgtatttattttagcaggtatttaatgtttgtaaaagtataatttttctctaattttgtcagtacactttgttattgtcttaaacatgacacatataaggctcaaattcaaaatcattgagtctagacaaaaacatgtatgtagtatcaattatttttaaatgttcgtttaataaatttaaattggagtatgcacaaacgaaaataaagaaaaattacagttttacaaatattgagtacttatgccactaaaaataaacattaagtttatgtcatttacaaacttaaaactttaagtacttatgtcactatttaccttataatatataaaagttgaataaaaaacgtttactgtgattgtgatcaaaaaatcacacatatatcccttacataatgcacgatcaacttttgaaaaattcaacttatgtctttggagtcgtgaggtttggatgtctagttgggtctcaaatctcaatggtcgtcttacaatgaggccaggattcactctttaaatccgaattcattttgttaagtagaatttttacacaaaaaaaaaaatttataacacgtaaataatggtatacatgattatctacaaaagcacaattttaccatataattaacaatttatgttttatgcaaaaacaatccatatatattatatattcatatatgtcatacatatctattctatataaagtatgcctatataataaaattcttggtttatgagaaa

SEQ ID NO: 126086 - DNA, 619 bp, Cannabis sativa
agtatcgctaactaattgtgacacatctagaaggtgctagactggtgcccaataacaatgctcgtttgttaattaattgtttgaaagttgaaatttgagactacaaagccagcacagcagtaaataaaccccgaagctattggaggcttgcaactatatataaaataataataattaaaagaaaaacagtagaattagtgagacttagtcaagatgggtccactaattaaacagtttactttatgaaatccacgtcattggataagtgctggtaagtttttttcttttttttttttttttctatagaaagtgctggtaagttaataatctcaatctagatctaccaaacataagaatagattttctatccaaaaaagaaataaaaataaacacacacaacaatagataggatgagtgggatccacgtcttgtcacgtgacagagattttgcatcaaaactcattcatacagatatatatatctccacataatcgtagtaaaaaatgtctatttttcttctcgtgaataaaaaatatctacttaagctacagccttccagtataagtaggggtgttcacaaagtatcctatccaatttaatccgcacgatccaatccaat

SEQ ID NO: 126087 - DNA, 758 bp, Cannabis sativa
  modified_base (693)..(710): a, c, t, g, unknown or other
gcataaaacccaacagggggatcctatatctccattactatttgttctgggaatggaatatctctctagattaatgtgacaggtgggtgagaaagaggactttcatttccatgatagatgctctgaacttaagctcaaccatctagcttttgctgatgatgtcttgctgttttgtcatggagatatcaagagtatcctttatatcctacatgccttgaaattgttctctctttcatctagattgcatcccaatgcaagtaaaaccaccatcttttgtagcaatatgcaaaatgaaactgtgaatcacataatgcagctttctgggtttattaggtaagctatgacttttacttatctggggactccaatttatgggaagaagaaatctggcaaagagtgtgaactattaggagaaagaatgacagctataatcaagagttggagctccagaaacctctcctttgctgggagaatcacacttataaactctgtattaattgctatccaggcctattggagtcagatgatgatcatgcctaagaaagtgttgaaagctattgaagcaatttgcatggcattcttctggaaaggtcaggctctcttccatggggctggtgcagtagcctggaataacatttgtcagcctaaatctgtaagtggtttgggaattaaatgttgggttttgtgccctannnnnnnnnnnnnnnnnnataatcaaatttactaataaagatcagaaatcacattttatgttgcat

SEQ ID NO: 126088 - DNA, 1065 bp, Cannabis sativa
tagaataatataaagtacaaatattttactattctctcaattatgatacatcatctgaaattataaataacaactaagtatttaattttttaaaattttagatagtttttaattttcttttcaaactattattatgaattttttttctcaaaattttaagccatgcttttttcttttcaaattactatttatttttttcatactttatatatatcaaatatttttaaaatcactgataagacatcaattactgcaacaattaaaaattataatacatttagaaaaatagcatagtataacaaagtagacatgcattgcacgtaactttaatctagtatatatataaatctattattgatgcagttttttatcaacgagtctaagaaaatcgtaaacgagcaagataaacacatgtaaatatcgatcgaaacaaaccgatttatgaaaagaaatttgacaatggtgaacaatgaatttttatagtggttcactccttcgtcgataataagctagtccagttttattgatcttaatgcttaagaaaagttcttcaaaattattattctattctcaagtgagttcttttagaataagagagtgtgtgtccttttacaactcactttatgatctttttataggttttcatcgtagagcttagaatttcttaaccagatatatcttttttcttaactagagttaagttaggtttaaaatacaaaataataataaaataacattccaaaataaatatcatcaaaaaatgataatttgttgtagatgtccatggagtagcgctgatggcacgtgtgtagcacgagagtgcatcttgcttagaacctaggtgcacgagtacctattgtcctaatggactctgagggttggcatgggaaaatggactttgagggttgaccttccttgatggacgacgagggtcgggtgcccaagcgtatggaccttaagggttggccctccctgatggactttgagagtcgacccaggtgcattgtaacaccctactagcttaggcgtgctaacgtaatttttaacttaactgtgcagctcatt

SEQ ID NO: 126089 - DNA, 1992 bp, Cannabis sativa
accgcatactcgcatacggtccctccattccaaatgttactttgatgaagatgttgaactaatgcctcagtcatgctgactcttcacccctcgacatttcaatgttgccttagtaccttagtcctcctgactttcaccttaggccaacatttccatgatgttatcttactacctgagtcctgcaaatttcaccctaaataaccagcactgcctgtgtcttaagtcttcttgactttacatcctgaacaaaatccatctccatgatacacatctcgatgcttgtaatgaatccctagcctgatgagtgaaccgtgaggatctctttcccacttcatttgttagtgtcctcgacaacatgcccacacgcgaatgccttatcgcctaactcttcatgcataccatgccatctaaaagtgaatcctgcatgatgtgactctcaaatcaacaatctcaaatagcacccctcttgatttccatatacgtgcattatccactcaatcatccaactaattcacactagaatcctgcccttccagttcccacgatgtactaagttccaatgatcaaaccctctggccatcatgcaaactctagcacccctcttgacctttgcatactcacatgactactgagtcttgctggcacaacccttggccttcactcaaactctagcaccatctcaatgcgtgtactcggccctcttagccatgttggcttctttgatgcattcattccacaacggtgcatctctatcgatgcctttgtgtgacttatgaccactggcgcttttacaagccaacacatcccacttaactgtctcggcactcgcataaggatcaaataatgctcacatgcaaacatctccaagtacaatcatcgtttgatgattgcggcatctgacccccccccccttggtctccatatgcatccctcttgacacgcacacgtagcaactgaagcatcccatgtctatcccaatttgaaccatctcagtcaacaactctcgaccactgttgcgactaacaagaatctgagagcccctaaaatactttaacaccgctgccaacaagcttcctttttaacaaaagtgccctatggcttatgatgtcactcaagaaaactcgacctagtgtaccaagcatacaatatggattgcccaataaaccttgtactatgccaacaagtttcaaacattttgttgcgcctctccacaattgcacgtggtagttgcctttctagcatcttccacacgcctacatcccctctaggataggacaaccaggttcacctcccacttagatgaacttggccctgatacaaactgccatgggctcaccttttcaggcagtagaacacccttgcaggaccttgacttctctaatccaagtcacccttccaaccgttcgagtaacagtgggcttatttttcgcgcaaccgtgtgcctcgtgcacatttcagtctctcaaacaactctcgtcgagtcatgctcacaagcatccatgagtgcatccatgcatcgaggctctcaagccaagatactcataatgtccataggttctcattatgataagataaatcccaacactgacgctcacctcgtcactcgtgaccaaggtaacatgtgtggcaagatgtcaacaccaagctaacctgccaatgcttctatcatgccccattcaatattgttcgaatagtctcccttgttgcccaaggactcccatacgtccatggaccaattcttaaggcaccatgccttcacacatgttagtaggccctcgagacatgccaccgaactagttgcatgtattagacctctatctttttccagcatggtacatccatcccatacgtgaatgaaaactagcccacgaatgactacccgtgtcatctcatgttgcgacttgtggcaaaggcacaccacgcatctcttagaggtttatgccacgtctcgtgcaagcggcataccaacaagccaatgaaaacgtacctgct

SEQ ID NO: 126090 - DNA, 724 bp, Cannabis sativa
tcaaaataacgaaattctaaaactgcccttaatcccatatggagcacctcgatgtgaccacaaatagcctagtcacgacaattgtgttaagtcaaaaatcattgtttctatgaatgatctcgccgcagtgacagttagtcgcaaccgattgcagcctcgccgcgagtagcttcaggaatttttactatattttcttcgatttctaactcgtcttgtccttttgatatttaacagattttgcccttgaaaatcttgtgaaacctataactaagaaaaacaagcgtaaaaccgtctagaaagtaacaacaaagaagaaaaacaactctagaaagtgatccgaaagttaggctaaaaatatcctaacatttaatttttacaatacaattaaagtttaaacagcatgagtaaaatttaatttcaaattaaaattttgaaccacaactactaaatacttatcaactctctttccccattttacacttttttcttcacatatttgatataaaagtattcaagtaatactaaataatggcacagaagtactaaagtttattttttgggaaaaatttacagtaaaattctaaaaagtttgttttgatgcagattaatcccctacctcgagaaatagcggcaatagttctcaaggtcgcaccctttgtaagtccgttagtcctaaatttaactgctccactaatttattcaagagtgccacgtgttgaagcct

SEQ ID NO: 126091 - DNA, 1528 bp, Cannabis sativa
  modified_base (903)..(904): a, c, t, g, unknown or other
tcaaagggattattgagaaattggataataacactcacaacgaagcttatgttagtccgagtgtgagttaggtatactaactttcccacaaaactttgatagcttcctcgatcaacttttgtttcgtttgtctgtacttcaagtttggtattatggtccattggagtttcacttggcttgcatctgatcatcccagttttctgtaagtgatcaaggacatatttttgttgagtcactgagataccttggttagatcttgcaacttccatccttaaaaagtatcttaattggtctagatctttaatctcaaattcactggagagaagttgcttgagatgagaaatttcttctatgaaattacctataaccacaatatcacataagcgatcaatgctgttaattttccaccaactgaatgctttataaacaaagtatgatttgattggtactgagtgtaataatctcttttcaacacttttgtaaacctgtcaaaccaggctcgaggggattgcatgaagccgtagagagatttttttagtttgcacactttttcctttgagaatcgctcctcaaatcttggaggaatgtccatgtatacttcttccacaaggtcgccgttaagaaaatcattctctacttcaagctgaaaaaaagaccattcattcttgactgcaatagataagagatctcggatggtgttcaacttagcaacaagagcaaatgtctcttggtaatcaatgccatatgattgggtgaatcttttagccactaatccgactttgaatctttcaatgctcccatcagccttatactcgactaagaagatccatttacaaccaattgtgcgtttgccattaggcagatcagtgatgatttacgttttattcttttcaagtgtttttnnttcctccattgtggcaacattccaattgggatcatgtagagcttcctgaattgaatttggaatttgaacttgatccagagtggtgatagtagctttataagtaggagataagcttgagtaactcaaatagttgttgatgggatgttgagtgcaagagcgaatccttttcctgagagcaatgggaatgcttagatcgtcacacacatcttccataataggttcagctcgagcatcttcttgtgtttgttcaagaatgaatggaatcagattatattcttgattttgctgagtttgagtggtagcttgttcaatgtttgctagattcttcttttttcttgagtaaactcgaatttctatgtttggaatgtggacaggatttgaaaaggttggataaagagtttttggctcatgtgaattggctaaaaggttgggttggtccttgttgatcggaacaaaacttaaaggaaggaattagatgaggatttcttggctcatgtgatttgactgaatagtttggagtatgggtaacagaaggatgagtagtttttgaagcaatggtgttgtcagaagaagaagaacgaggatcaatgagtgaaacaaaaggatgagtagtttttggagcaa

SEQ ID NO: 126092 - DNA, 1416 bp, Cannabis sativa
gtacatttacttaagcattttataagcagcttggtgaggaggatctctctctggaagaaaataagtatagtggagttgattattatttaaatgtaaagacattaaaatacacaattttttaaaactcatggggttactattactacctcatctctgtttatcaccaagaatgaaataaaaagagtatctttttatgtctctaaactaattttggttaggtatacatataatattatttgatattttttttaattacgtagttaaattaagcatacaaatttaaatttgtgattttattattcgttattagatcaaaatttcgatggtcatgatatttttaaaattaatatttatagttaaatttatttaataaccattcatcggtaatacccattaacaagtgttccaagtatataaatatttaaaattaatatatatatatatagatatataatattatctagattttttgtttttttttttcagcttataacattagaaagttgaattgaatataaaacaagaaacgaaatgaaattatattaatttaaagtgaggataaatttttatggatggttgtcagtcatcgaccgtaccaataagtatttgaaaattaataaaagtgttgttaactaattaaacttacacattagtacctaaaatgaacatttcatgattattgttaaatatactggaaaaagtattccacaagtagtactgccagagcctctgtccaacaacttgaccatcttcttttagtttcatttatacatataaaattgttaatgattcttgatatttatggtccactattcaatttaaaatttgcaactacacataattatatttaagcaataattattgctttttaaacgaccctgcttacaattaaatttcatttttattttatatatattattgcaatgaaaaagtatatgttttcagttttcgcagaacgaagccagtacgtagtgcacagctaaaattattagtatgtataagatttgttaaatgatataaaaatatccaagcataatgtatagctaagaataaaaaaaaatatacgtagaatagcttattcttttcatgatgatttatttatgtacaaataataaccacaaaaaaattaaattagcatcccacgtcctttacttttatgtaaacccatatatttaattatatgacctaacattcttatagggttttccttaatgtttaatgttgttctgttcgttaaactccaatgttctagctaataaaattatacaaaatattgttattggatattatttttaacttcacctagaagtgacatcatacctatttcaaaaagaaaaaaaaatgacatcctaccaataattgaaaatatttattaaaagttaatattttaaattatatgaaatttaatacttaatt

SEQ ID NO: 126093 - DNA, 662 bp, Cannabis sativa
ggatagaaaagtgaatgatacgatataaagcgattcaaaaatgagaaccgatacttgtttattaataactgaaaaaacagtaattaataatttttgattatttttaatttggcctctcatctaattaaaaattatctttatagtatccacatattaaaatcatgacaatcatgcttttaagtcataaattttattccaaaatataaaccacataaatttgacttatttatttgatgactcaacacatattttatatatacaattgtgatcccaataaattttcaacacttacaccattcataggtgaggacaaggaactatatgaattgttgattgtgcatataaaagttgattaagtagagatatctagctgaaagaacaatagaacttgttgttggtgacttctattgccaaaggaaatcattttgtacttagggtttttttgacctaatatgctaagttttgtttaataacttgtatatatatatgtgatttatttagggtttagtatctttaaatatacatgttagctggtgtaattacttacatatatgcaaatttgtaatgtgattgaacggtacaaaccaaagaacgaaggctaataatactagggaaatttcacttttttcccataacaaaacccccaatattaaaatttagac

SEQ ID NO: 126094 - DNA, 1292 bp, Cannabis sativa
aagggggctgaacctctataaaatattaagtcttatttacttttctattcttattgtgtaacacgtggcaagcatcaacaataaatacaactccgctgtcagttggccaaatctgaggtcaacagtttggtgctttcattaagagcaagttgttaatttatcttatcaaacacaatgattaacacaaggagaactctgactacaacttctaccccatcagttcttcctcaagaccctatggtgactgatcctgatgttcgtgttctagccacaattggaatctccacaaagccaatggatgtggccaactctaccatctcgacaggcatcacaaacctagccaccgcaactggtcaggtggactctaccaacccggttggtcttaatggccaacctttgccgcctagggaggatgctcagctggcgcctcgtactgaaggaatggccaacgtggagcaacccccaatcaccactactgaatctagtcctcggtattatgctggagagacaaggccaggaattggcgagccccatgtagacttgggagaagattttgagttagccagacttagataggttgtttgtcaagtcagccaaattgaagaaccgtgcgttgttggttgtaatgcattcacacaataaagacacaaatttttgagatggatggaggaccaagagtacatcctctgatctcatcaggtggagctagactactgcaacaaagaagttagcagtctgataaggcgattgaatgaaagaatagtcagaagaggtcaagatctcattagagatcctcaccaaaggaggctaatcgatagattggggaagggctataggtagacagtacaaccatgttcctcgagaactaggacaaaccttccccagggcgaaggaggacatgtcttgccacaaatatctagtggtgagaacaactctggcaaccagtggcctagggggatggccagggattactaacacaataacacctcgctttgccaacctttggctggccaacatcttagtggtccaaagtccaatctttaatcgataaggtccaaaaacaggtggaaacacctaagacaacaataacttgataagtgagaccaatcactccagatacttgggtcgacctaactccagcaattgatgtgatctacccctatcaacgcataggctacaatagtcagtcaaggaagaatgggcgactaggccctatccagcatagggcttgctggccaaagccagctgccaggcttagggctggccaaccatgtgttaggttttgtgcccta

SEQ ID NO: 126095 - DNA, 1068 bp, Cannabis sativa
tgactgatggtggaattaggaccaataaccaatatatcatccacataaacaagaagaagcacaagtgtctatcctgaaccaaaaacaaagagagaatttccataccgagacactttgaatccccactgcagtaaggtggttttaagcttatcattccaggcacgaggagcctgcttgagactatataaagctttgtgtaatttgtaaacacggttaggtttggaaggatcaacaaagctaaggggttgctgcatatataccacttcattaagagtgccacttaggaaggcattgctaacatcaagctgctgaataggctaactggaagagacaaccaagattaacacagttcaaaccgtagtcgatttacctacatggatgaatgtttcttcataatcaattccaagcttttggagataccctttagcaaaaaggcgagaattgtaattatcaagactaccatctgcattcaactttatcttgtgaacccacctatttcgaataagataagtacttggatcatatgaaaccaaagtctaagtaccctatttagtgagagctttgaattcattattcatggagccataccattttggatctttgagggcagctctaatattggttggcttaattggtaaaagggcctctagaagtgggtgatgagtagctaaataggcctttggtttatagattgcatgttgggatctagtaaccatcttgtgaactcaaacatgagaggatgatgttctacaactattctagtattgagagaaacattttctggaataagagaagaaccaagggcttcactagtagatgcagatggtaactgaaccagtattgcaaaaactgcaccaaaaggcacaacaagagcagaagcaacaacaataggtgcaagacttggagattgagacacaacattagtctcagaagaagaggcaataattacatcaagtgtgatagcattgacagatgttgcagcatgagttgcagcaggattttcaaaaccataatggattggagtagcaactgttgggttttatgcccttaataaaactcatttcaata

SEQ ID NO: 126096 - DNA, 525 bp, Cannabis sativa
agccaccaggacttcatcgtcctcggagacgggttctccgtcctcattgaaatcaccaaaaggaagtacctagacttcctcttcttcctctcctccttctcccttggcctcagaaggggtggcaggacgggcctcgccttggtcctccacttcttggacctcaatgtccccctcaaaaatttatccttccttggtcagaggtctagctttctccattcttgttgtagcaaacagtcgagcatagtgtgggtcagtttataaagccttcctcatggtctactttgtctgctccatcattctacatttgggcggaggctttgattcattggtatgttttacaatagtcacagcaaagtcagctacaacagctcccttagcagacagagctagtcaagcttcaggcaatgtctcagtaaccccaggctggaccttgtacgtacaggacgcaggaagataacactttcaacctttctttaattcccagataaaatgcccatacccttctccacgtatttggtcggggta

SEQ ID NO: 126097 - DNA, 1301 bp, Cannabis sativa
tttggcagttttgtaccaaggggagggtaatcctccggtgattcccatcaattttcttaatcaatgaacgagtagttctttcaaaaaaaaaaaaaaaaggttatcactaaaaatttgtttttagccacaaaaattatagtctattttaaattagtaaaaatttatacgtaaatactcttttttaatggtaagtaacacttgaatattgctaatgaaattttattgtacaaaaataaaaataaaaataaatgacttgattattttcaatgaaaggccatggtaattgataaaaaataaaattaaatatatattattttttcttgctgcagaaaaaaaaatgttaattatattttgtcgtttataaaatgttcttattgtaaaaaaacaaaaagaaaaattgacagacaaaagttgatcatagcttgccaaaatcataacagaataataattccagtgtagaagataatgatcaatcatgagataataatggttatggcgaatgcaaatgaaatgatatgctttaaatattttcctaatcataaaaactgttaatccaagtaattgggatatctgatgccactatctcctaataataataataaattaataatattaataacgattaaagtagaagttgattgtcatataattaaatcacaaagtgataagagtttattttgtattaatctctgactcagcataatccaccacatagaaaagctaagctaataaataataattaaaaaaacataaacacttttttattattttcttttttctttttattactagaaaaaagattgaacacttacagcagtaattgtcagcattttgtttgtgaaagaaccgagaagtgtgcagaataattaatgggccttgtgggttttatgtggcccattcgatcccaaaagctaattagatgacaaaggccggtctatttacataagatggtggacatagtttgggcttatccagtccagctataattgagtgttatagtttattcgggtttttacaaaaatactaaaatttgagtaaaagtttacaattttactgttacacggaattttttataaaaatattatttttttttataaaataaccgtaaaacaacagaatagaacaattaaaacaacagtggaacaactaaaaaatacttgtggaacaacagtgaaaacttaatacagtgcacagtataaccagggccgacccaagcattttggggcctttgtgcgaaattttaaaattgggccctttaaaaaaaaaaaaaaaccatgtacattaaaactacaattctatca

SEQ ID NO: 126098 - DNA, 514 bp, Cannabis sativa
ttacctaatttgatctctgtattagtgaagaactgctaatgagaaaggtcatacacacaaattaaagcaacatagtatataagacaattaagtctaacctgcccaccgaagttgagaatagctagcttcacatcctcttcaatccctagttccttcctcacctaaagaagaaactataatgagattgtgaattggttaattaatcaattaatgggtttacaaaaaaactgtgagccttaaacctccttgcgggatttgtgcaatcttctaacaaccaggggaacatcaataacatctcgaaaagcaggcactgaaattatataagtataaaattaaagagagattagttaaaaatctggtaaaagccaagatgtagaatatatgtcaaataaacttactcgggcagtatccagggaggcgtatcaaaaattcacaatgagaataatcttctgctatctgtatgacattttaagtttaagagagacaacccaaataataacacactaaactaaga

SEQ ID NO: 126099 - DNA, 697 bp, Cannabis sativa
aaagatacctgatattgttcctattatagagcctatttcaaattttcatggggaaggggatatcattgggagagatgatgtgaattatttggttgactcggtcaacccgtgctcttctattgggcctgtgagccagttggcttgtgttgtgatagagctggttaggaagggtacgactgggccccaggctgcccctaactatttttttctttatgggccgaactgtaaaatttgtgcttttgggcccaatgttgaggcccgtgtctccccttgtcatgtgatgggtcataagatttcaaaagatatttttgatgtggggcccaggcataatattaatggttcagatttatgtggatcgtgtgactctgtgggactgaataaattgaggaaggggaaaagtgtgattattaaatcaaaggataaaagtagggtgtcgtgtgggccctttgaatgtcacatgagtttgaagattgggccaagttctttgggccttttggaccttttggagcaatcaaaaaatagctcaactcttagacaagagattatttttcaacaagatgagcctcttgatagtgatgaagtggccaagcaggggagttctaagacctccgcaaatgtatctctgcaagttagcatgccagtttctctgggacagtcctctagactgacggcttggaaggccaaggcccgtttggcg

SEQ ID NO: 126100 - DNA, 796 bp, Cannabis sativa
tatatatattatttattaaattaatgtgagaccctatgttgaattagatgaataaggatttgttacatatttgtggcattaattacgtatgttctcttttaacatttctcattttttttataattcaataaggggatcgcgtagatagatcctttctctacttcttcggtcattttgacaatctgagagattatgtatcagttataagagttttatacctcaatctatcttaattgaatcattagtaatcacctcaaggatttctatgacacagatgacaccaactacagcagctacccttcagagagttaagcctttttaatcccttcaacaaggcctatggtagatttcgaacccttaatctaaacaagaaagatgtcagtatagacaatccctaccactaaaccacacacattgacatttctcattttatataatggagagtcaactttgcacggctagcacacttagtaagccttgatcgattatcaatcaatgcatttttttcatgttaaacattgtcaaatgtgcatttttccatttattaagatatttccacataaaagatttttaaattcacatcaaacaactgttagttcgtttggtatgttgtattataccgtatagcattacatcaaattgtatttcatgcaatatatttatttaaaattatatgtgttattaacttttacaggtacctaaaaatataatattttagtataaattaaagtttaacataatattatataaaaatatgatatataatccaatttaatataatataatacgacctaat

SEQ ID NO: 126101 - DNA, 2245 bp, Cannabis sativa
  modified_base (59)..(62): a, c, t, g, unknown or other
ttgtaaaactgtaattttcttccaattcgtcagcacagactctgttttaaatttattannnnaacatttggaagtaactgatgctacatatttttatttagacccaatgatatttaagaatttaggtcttatatatgccttatttaagacaataacagaatctgtactgataaaattagagaaaattacagttttataaacattgggtatttataccgctaaaaataaatattgaatttatgctgcttacaaacataaaattttagttacttatggctttatgtcctatttaccctttactttaactttagataatttattgcatttggtggtctaattattttgattgtcttactcacatgatattatttaattatggattttttcccactgaattcactatgcaggttatcatgaattaaatttgatgattttgaaattaatgttatttaagaaatcaagtggtgtattttgttcaagtaattaagtggtggatagaattattggactgtacatgtacataggttgaattgaatgaatgaaatcaaaatgggcagtcaattcaattcccccatgaaatgatatgatggaattgaaaagacaactcaatatggagtttaaagaagaaataaaggttgatgaggcaaggccacaaggccactcgccacttcaatgtcctatattttttttatgctatgctttactacaaaatatgaaatgtgagtatataaatatatagataattcatatatctagcatatatattaagagcatcttcaactggagttgcttataaagttatttttgccactgtgattattacttttaatataattttatcaatatcaatatctatatttaacaacacatatgtaatattactttatctttttcttttcaaaaaaattactttatggtattattttatagtatttaataaaatttaattatttaaatagtgacatgtgggaccatagtagataatttttgaagttgttaactattagagtaatttttatatgaaaagttatcaaatcttatgagtgagaaaataaaaaaatatatattttaggatgatgagtgcacttttgacaactataagtgttgcttctattagagattgtaacttccccgcttcaagcctccattgggtcttcacgtacagacacatgactcttatacacgggtacgctagtactctggtagtcctggactgacgactggccctatagaccaacacaagtattttagtgtgctttgtctttactcgcacgcttcttgggaaaactttctaggagatcacccatcttgaaattacctcaggtcaagcacgcttacctgtggagttcttttgtgatggactgatataagtaatatcaatcaatttatttaagcccttttcaactatgtaatctcatacctacacaacctcagaatcatcacacttgaccttccccaggtggtacgggattgcacagcttaattacacggtatttccccttacggatcacaagactactgactgtcacaatcacatcccttaaggggtccgacgtcctcgtcgatcacacttatggatgggtcaaggctctgataccatttgtaatgtctctacttcaagcctccattgggccttccccatggactaatgactcttatacacgggtacgccactctggctgcttccacgattaatgactgacactacataccaacacgagtgttttcagcgtgctttgttactcgcacgcttcctaagaaaacttcccaagaggtcacccatcctgaaattattccatgtcaagcacgcttaactgtggagttcttttgtgatgggctaccaaaagacaagatgcatcttgttaatataggttgtactaatcaatcaatttaagtcatcttcaactgtgtagttccatacctacacagtctcagaatcatcacacttgaccttgcccaggcggtgtgatattgcatagcttacccgatagtttttcttatagatcacgaaacttttgactatcacggctctaatgggtaagtttatactacatcccctaaaataatatttaattaaacttttttttctttctatgttcaagagaattttttagttaatttttttatgatcacgtgtgataattatttaggatcatcaatatatttttgaaaaaatcttaatagtataatacaatgttaaaaataaaatttaaatatttaatgatacttgtaactgttttttttt

SEQ ID NO: 126102 - DNA, 1208 bp, Cannabis sativa
actaactaaacaactaatcaagaatagaaataacagaaaagagctaacagccaacaacaacaataacaaactcataactgcctaactaactctcaacagtacccttaacaatcatgcatctctctcacatttcattcttatcttatattattattatcaattttgtttctattaattttcagaaacagtaatgatattgattgatcgtaaataaaaaaaaagtagttgtaacaattcattgtgaataatgaatattgttcaaatgttattgaatgcgtgttaaagttgttctgggttaaaagaaagaaaaaagaaaaagaaaaatgagtttattgggttaagagggcttacaataaaactctagtcctaattctgatatttcaattatatttccttgcaaaaaaaaaaattaattatattttttaaatagaataaatattattatctctcccacaactctaattcttgaaatttttgttgttgaatttatttttctcttttttttttcaaaacttcatctcaaactgtgcaaaataattgcaaatatctattcaattacattcaattcatttttaaaataatttatttatataattataaattacaaatataattgcaatacaaatgcttatttagcagcttcaacttacttaaaatttaatttattaacattaaacatacatatactatctctaagaatatgaatatacatattcacatcatttatcattagattattatttaagcgtttatttttgcatgaattcttaaattactaagggtgttcataaataaccaacccaatccaatttataaatatttatataaatttataaaaaaaaatatatacagttaatattttaataaaaaaaagaagtaatttaaaaatctaatccacttagtataaatatattttcaaaacttaatatatcaaatttatatttcatacttacatataatttttgtttacatacaatttaaacaaattaaacatttttttttacatataatttttttcttccttcgatttttttttatttattttaatttgttgttggatacataaaacaaccataatttattttattttgttgatagttactgaaaagtagtcaatccaaaataattatccaatccgcattttcacggattggatttttgagttattgtgcggattaaattagatctaaaatatgaaattcgcactt

SEQ ID NO: 126103 - DNA, 1767 bp, Cannabis sativa
catcattccgtgggtgtaaaggcccaatgaaggcttgaagcggggacgttacacccttcttctcagggcttgagaagcaccggtcagttgtcgttttactgtagtggttagctcgatatcaaagatcgatggaggagcactgtaagaactctgaatccatgactgatttttcttttcttttttaagcatttggtaatttgagtagggcagtggtgagtatcggttaattaatttttgaataaacattaatgaaatagcttcttgtagagttctttttttctcgtctctttgtgttgtgtaaattttttgtatattaatttgtacaagagtttgcatttgcagaactctaatttgtgttttcgttgcgttttgtagtgtatcggtttttgtgttttggggttgttttcagaaaaattatctgaagaaacattgatataatacttggctcatattttcatttgaatgatttgatatataatttaatagatttctttgtaaactaaaaaagaagcatgattatttatatattttctcataggtttttagctaccaaacatgaagttttggtgacctttacattacaagttttgattagttaggtttcttaggactcgtttggtacgctgtataacggtcgtattgtattaaataataaataacactatgtttggataaagcaatgtattgtattaattattacgaccaaattttttaatacaatgtatgttgtattatttaatacataataaatggtgcgtattagcttgtattataatatttacaaaggatttgggatcagcaccaatctccaacccgagactcgagacccggacccgactcggacccgaacccagacccaacccggaccggacttggtcccagacccggacccgaacctggactcggatcggacatagacccggaccggacacggacccagactgaacacaaacccggactgggaccaggaccaagacctagacccggactcggaccgaaacccggacgcggacccgtagttggtgttgggatcgagtgtataaaaaatacattataactttacacaatcaattaatacaagtcaatgctaaacactgtattgtattaaatattactaatacaatacaatacaatacaacacaacacaatataatacaatacattacaatacggcgtaccaaacgagcctttaatttctaaatttaaattcaatatttttgtttggctgtgatactctaaaatactttaaatatctttatttattttcttcgtcgtctctgaacagggtatcatatactattatatcaaaaatataattaaaaatcattatttattaataaatatattaattaatataaaaatctatttaaatataaaaataatttataaaatgaaatttacaactttgggaggagccctcttagtgcctattggttaaagtaggggtgtttatcaaaccgttcaaaccacttgcaccgtaaaaaaaatacggtttgaaattctttgcggtgcagtcacggtttgaatttttcctaaaccgcgcggtgcagtgtagtttgcggtttttaattgttaatatgcggttcaaaccgcaccacaccacacattataaaaataccaatttttatatttacttaggtccaagatgtgaatgtccaacccaaaatctaggggtgagcataaaatccagaaaaccaaaaaaatcgttcaaaccgacctaccgaacaccattaaaatcgaaactgacgaaaccgaaaaccgaaaaaa

SEQ ID NO: 126104 - DNA, 736 bp, Cannabis sativa
  modified_base (54)..(56): a, c, t, g, unknown or other
atcttataaataatttgtaatagtaaattttatatttctttcatctgtgtaaannnagtaacatgatagggcccatccaaatcaatttgacttgtgtgagcctatatatttgcttataagcttagatgcataaaggaagtccatttatttctaaacatttaaatggactaggttgctagaataaaatagaaaaaattacgctagagaacctcaatatcaatttatttacggatttgttgttagctatttaaataccattgtattttagatatatttgtgatacgtataccgaagtaaaaatgatgaagctattttttttgtttttgtcctaggcgtatacatgttattatcttcctgacaagcttttcattttcctcataagcttccactaatattttttcttactctcttttttcttttttacattcacactactaaatttttatatttaaaaaaatatttctctttcatatttctttttcataagtttaaaatattttttttcggctatactgataattgtttggtctcaaaaattatactatttcgatctactctttaaaatgatcattttaatatgtgagaagcatattttttttcattatcagcaaatatgactaaaataaaaaataaccttttagttttttttttttcgttaaccaataagcaatttttttttttattttgaaaagataagtattgttttccaattaaatttattttataatttaaattt

SEQ ID NO: 126105 - DNA, 826 bp, Cannabis sativa
  modified_base (769)..(772): a, c, t, g, unknown or other
agatttaagatcctggtaaaataaattccaacataggagcagtagtgggtgcttcatttgtgttgtcattaggagcaacagggacattaaccatagtaggatgagtaggaggagcagtaggtgcttcatttatgttgtcatttgtaggggccagagatggggcacgatttggagggttagagtcacaagtaatctctggaataggtgggttgatgatgttttaaatatttgagactgcagttgatggagtagtttgtacaacagtcgtgtcaagcatagtggttggtacctgcacaggcaaagaggagttgcaaggagtatgggtgttagtgagagatgagtggtaccttagtggtggaacagtatggtgagatattgtagagtacatagtgagaatagtggctgagggataaaaggatgacacgacatcaacagtgataggagggtggttttgggaagcatggggaaaaaatacactcatcgaatatgacatcccttgaaatgtagactctaccagattggtccaaacatttatatcctttgtgatttagaatataaccaataaaaatgcatggggaagacctaaactgaagcttatgtttattgtaaggtcttatatttgggtaacaagaacagccgaaggttttgaagctggtgtaattcggagtgatattgaaaagagtttcaatgggatatttatgcatgaggacaggtgtaggcaatctattatggatgtatacagctatcctaatgttgggttttatgcccnnnntaaaactcattttaatataatcaactttatttattaatatagatcaaaaataac

SEQ ID NO: 126106 - DNA, 1187 bp, Cannabis sativa
  modified_base (29)..(50): a, c, t, g, unknown or other
  modified_base (1126)..(1144): a, c, t, g, unknown or other
tattgatatttaaatgatagagattacannnnnnnnnnnnnnnnnnnnnngcataaaacccaacagttgattgcgatgtattagctcagtagagatgcaaattcctaagatggatggatgaccaagagtacatcttttgatctcaccagacaaagttggatcatcgcaataaagaagccaacggcctgataaggcagttcaattagagaaccaatggaagaggcaaggatctcatcagagatccactccaagaaagactagtttatagatcagggagggtctatcaacaagctgaccaaaattactccttaaaagtatatatttttgtagcatcttaatgggctgtcaaggctcaactcgtagcttggcttgctatccacagatgaaggttgcgcatcaatgtcctgctacggccagccatatacacctgcatgatgaggtctggctagccatgcgcgctcctgccaggatctagtaggtcctattcctgttagggtttgacaggtcatgttcctaccagggtctagcaggtcatgttcctaccagggtttaacaggtcatgttcctaccagggtttgacaggttatgttcctttcagcttcaccaaaaggaggctggcctttggcaagtggatgccagctttgtacacatttttcttgcagaggttaggttctcttggtcaaacgaaagcccctttggtctgaaagtcactttttggccggccagcttgtgcccagataatggctgaccatataagctcatcttggtcggcctatagacttcccttggctggcgagacatgttggtacagttacttgacgacttgctccactcctttcgcttgttgctttgcagttttatcatatataccttgtaatgagaccttgtcttatggcaaggctctgttcctcatgtactctgtcttggtttatgttgacatgccatatcaggtgggtgaaatttgggataacatttgccccctaagtccctgttcgaacatctggtcggataggatgtttctagctctcgtcttgtttgtagtagtctctctcgagtagccttatttggccaagtgttggcttttcgcatggcatgcttttagatcttttctctctctctctctctnnnnnnnnnnnnnnnnnnntatatatatatatatgtttcatcttatcttctttgatatctct

SEQ ID NO: 126107 - DNA, 1116 bp, Cannabis sativa
tggtcgggttaacccgtttaaaccaatctttattttttattgttttattattgttagtttttggtgttcaactaattgatttgaaaaaaaataagtatagtatatatatacctttcaagattaaaatagttatagttcaaattaatattaaaagaacaaatatgaattgaataaacattaaaaaatattaaacaacatttttttaaaaaaatagaataaaaaaaatatactcatatgtaaattcttaatttcaactttaatattcaaatacaatcaaaattatcaactataaattttaaatatcaaattaaatattaaatacaacctttaaatgtaaaatagtttaactattaaacgtaatttatatattatgttataaataattttagtaaaaaaatatataaatcggtttattcagcttattcgggttttttgggcgggttaaaataatattcaacccgcccaatatattcattgggcggtttgaatttttcgtaaagttattcaggttgtattttttatcgatttattcggtttggtttgggcggtttattcgagttgagcggtttgttaattttttgaagagccctactttgcgacagtacaggatctaatttgctatcatgtacgattaattatttacataataatctaacaacctaaaacatgctttatgcaaaacgattaaataaattggttcgttctgttaaatctctcttactcatgattctttttctgtagtagggtattgttaagtgatgaatctggatcgtgttcttatgaatagcaattatatactatacagtctttcacaaaaacttgagtatcactttaactggtgaagggttagcgcattaggtgtccctaagggttggcctaagcgtatctcttaaaggtgccaacccttcaccaccttagttgcactgaggtggaggtttcttcttcgtccgaacaatctttcattatatttcattttgacctttcttttccaattttgaatgaataacaaagaattttctttacacaaattctcctgttaacaccgtgtataaaaaatctcttctttacattcaaaacaataaaataagtgttataaatattaataattatgtggat

SEQ ID NO: 126108 - DNA, 1858 bp, Cannabis sativa
aaaaagaaggtaaaaataaaaaaggacaatataaaaagggtatagagtgtaatttcctctaaaaatttccaatgaaattgggccacagttgtgctccttttgtaacaactgcagcctttactttccccaaaatataggaaattgggcccagtgttgtactcatatttagaaggaaattatattgtacactcactttattttatttgttttaatttttattttcattttcatattctttaaatgtttaaatgagtatattttaataaaatatagagtattttttattaataaatacaaaaaaataaaaataaaataaggattcctcaacttatccccacatttagcttgaacttagatcttctttctatttccatgcttaccactttttattattatttttttttaaaaaaaatagaaatatattcaaatttgctcttatcaactaaaagtaaagtatgtagcttgggagatcgtgagaatgaggggttgaagatgtggtagaagaggatgaatgtattttggtaaaagtaggtaaaatgtattataataaattgtttttttttataaaattaattttatctttttttacaagatatgtccacaaatatgacttttttctatgtgttttaattttccatgttattgtacaaaattcttaagctaaggtttaatcattagtgaggattcttttcttcttttttgctggtttttcagtgaccagaaattttggtaatttttttttttgacgcggtgatccaaatcacacataattaacaaaacagcaatccacaatcggcggcggcacctcctcaaaccaggatagctcattgtctaaccgaagaacatattttgtcaaaccatatgctgcagaattcgcatcccgagccacatggacaaaactaataatgtgagaaaattacaattaaagatacagaatcaaatcaactaaactttaaacaatcaaacaattcataatgacaattaataaatcacgaacaattaaagcagtaaatcaataaaatcaacaccaagatatatactggttcatgtctgatagatcgatgtgatctatggctctactccagttttagaacaccaccaaatcctctttaagaataggtaccatacaatcgagatcgattctctgatgagttctctcaaagtgtttcaactctcatactcttacccaagtatcttcttcatctataatagattcttcttacaaaacctaaactcaatctctctattttctttgtacctctctctctacctctcaatcttctctctctctctcaatctcaactcgatcgctctctcgaaatgataagtgaatgtggtatttgtagccttaggatcaagatcctaaagtcgatggctgcaagaagttaagttgttatgttagttagacaataactaacttaacaactctcttttaagcgagaactccgcatcagcataagtaagagtgcatccgggatgagtacgaggactcctagagtcacgcatcaaggcactctttgaaagaccttcccggataggaacaagctagctggagtcgactatttgagagtaccttcccaagaactcctttccggactaactttcttgaagactaccctcgaagtggacatgatagtcatctgagaacatccttccaagaggacaactatcattccacgagactacttcaggagagcaagaaagctatccaagaacaaacttccaggcagggtcggcccaagcattttggggtcctcgtgcaaattttaaaattgggcttttttttttaaaaaaaaaaaaaaaaaccgtgtacattaaaactacaattttattactattttttttttttcaagattta

SEQ ID NO: 126109 - DNA, 533 bp, Cannabis sativa
  modified_base (461)..(466): a, c, t, g, unknown or other
taagctcaaggttagcataagctagaattttctagctatttaaagttggctacaccaaccgactatggatagtataaataggacattgggtccttagtggtgtatcatccaaacaaaggtgtcccaaagaaaagagtcaaagtgtagtgtgagttttcttatttaagtgtgtcttagagagttacatatataagcttgataattaaattataagtgggtgctctaaataaagtgtccaagtattttaagagtattgtggtcaaattattgtatataagtcttggtgtaataacttctacaataataaaaagtaattacgtttctcacgtgttgtgttgtccaacaagtggtatcagagccagatcgagtttgttctgaaagagtcctttgttgtgtttcttagagtgatcgtgtgtggtttagtactacaaaatttgcacgatgggtgaccttcaagtggnnnnnngaattaagaaacttaacaaccaaaattacaacacgtggtcgatgcacatggaggcatatctccaagg

SEQ ID NO: 126110 - DNA, 2654 bp, Cannabis sativa
  modified_base (1277)..(1291): a, c, t, g, unknown or other
gatttagatatccatcacaaaatcacaatacccatgttctttctctcgatggattcgccacagaattttgactcggtgtttaacaacatgaattataaaaaagaagtagctagtgtaaactctacaacattgtattcagctaaagtttcagttgttcatccatggaatatatcaagtgaaccagattttatcaaactcacagaaggagaccattttctaatggagttggtatgaaggtaaaataaagggaaatttgcggcaaaagtcctcaaaaagttcagtttgatacagataagtccccaacttccaaaaatagcggtaatagtcctcgaactcatattttttatttgtccgttagtcctaattttaactgagccgttaactcttttaaaattgtcacgtgtgaaaatataattggtccaaattattattttaattttaacaaataaaaataaataaataatttaaaatactttttttttctttttctttcttttcttcttcgtcttcttcttctcagaccaatctagcccaatccaagttcaagctctagccaatccagcccaacaacccctgatcccagctcaggccaaccaaccccacctcaaactcaaactcaaacttcccctcctccaccgcaggactcaaacctagtcccacctccgcccaatgctaaacccgtttcacagtctccgccgccacctagtcctgacctaactcagtcgccgccatcacaatcgccgccgcaagtggctgtttaggcatatttgattgaaacaatggaacccttatttttcgaatgcatatttttgccctttgattttgaatagtttttcttttgcgaaaatatggcatcgcgattctggacccaggtattgttttttgaatgaaaacctaattttgtgttggattgagaaaaaaaagaaattaaacttagaaacccttttgaaaatgtaattttttttgtgtttaatttcagcctggaagtgactctaaggaggaagagagtgacattgacgagaaaatatattattggatcgtgtctaatctgggatgggtcaaggttagggctgaagaggctatctgggttcattctaatgagatgggcagtgagagatgcattgactcagcttcttggtttgttgtattttggagaaattgaagaccagtattcattttttaagctatttgtgaggttgaaacttataccattctctgttatgtcttcatggattcgtgcagagaagaagaagaagacgaagaagaaaagaaagaannnnnnnnnnnnnnnaaaaagaaaagaaaaagaaaaagtaaaaaaataaattattttaaaattatttatttatttatttttatttgttaaaattaaaataataatttggaccaatgatatttcgatacgtggcaattttaatagagttaacggctcagttaaaattaggactaacacacaaataaaaaacatgagtttgaggacttatctgtatcaaactaaacttttggatgacttttgctgcaaatttcccttaaataaaccatcttttgatagataggaaaaaaaaaaatacttgtaccactttgttaatgtttttccaaacccttgtactcttatttttattttattttttttaggttttaggggaggggtatatcatttttatttttaatttttttaatctgtagatttattttgtattatttgttactgatggaagatattctctaaagaaatctctacgttgtaatcaaacattcttgatcttatattgtttatcggttcaaattcaagattgttcatttttaactttgaaatattactttcttgaccttgaaaatacatttttttgttgtatatgtattcttgatcttatattgtaaattgtaaatttttattcaaaattcagtgtttttgtaatttttatttaatttacattaaaataacaattaagatatcaaatcataccttctgaacttttaaggtcgttaaaaatggcttctgaacttataatttattttccgtgatgtaggaatgagtataactcataactttttcatattatgaatttcctttattcactaagatcctacaaattgtatttttttttatacaaatataatattaaatataaacatactttcattgaaaagatactctgcaatgaaattatagaattggtatgatgtgacataatatttctttttaattttcctttctcttttgcctttagagaattcgttgaatgaggtgaggactgggaactgttgggaagagatcactctcactcatggacatgtcatcttcttctcttcttattaataataataaaaaagtgttgtttgataagatcttattcttacttttgctatttttcattatgtataggagtatagtatagtatttgaggttttatactataatgatgatcttcttctgtcaaattactttgctcacttacaacttttaatgagcaaaaataataaaaattcacaattctttgtttgattaaatagagtgagtaatgtttggagtgatatattatgaacatctgtttaattagtgttaattccatttttagcatatttaattgacaaaaatattttattattctttgtatattttggttggcatatattgatatggtttccctatt

SEQ ID NO: 126111 - DNA, 3448 bp, Cannabis sativa
  modified_base (2482)..(2484): a, c, t, g, unknown or other
gccagcgtagtttgcgaaatgcgctggtaaaagttacttttaccttttaccagcgcagtagcgaactgtgctagtaaaagtgacatttcttgcagtgaaaggttctgctatagacgactgaaactacaataccctaagtaacaaggaatcacccaaccaaggctctgaaactaacacaaatcaacgaattggattgctcgggaaacctgtcccaaaaccagttaaccggtcttacaggacctggcaaaccggttcaccagtttgcaccaggtttccccaagcaatccaaaaccttatcaaaacatgtccaaacttcaccaaaaccttcataacacctatattgacctcaaataatataatccaagcaatagaatccagaaaacatccaaaattaaaatatgccatggatgaaccaagcttgagttttcaaactcaaacttgtgcatccaccacaacaaacccctaaaccagctgcaagaactcaattctaacttaaattgatccaagaaactgaccaataaccctaacaaccacaataacacaaaattacaagataaaatcccatgtaaagcttaaataacacaaaacctatatttttagggtttaccttcactaaatactcttgaatctttgctaaaactctagaaaataagatgaattaaggtttctcctgatggttgtgtggtggtcgagcacaagagagagaaagggtgatgagtttcttaatttcctttgattttttttttctctatttttcttctaagtgaacaaagcttaatttttaaattaatcatatgctgaaaataaactagctaggtgtcacacaacccaccaaccacctatccccttaccaaatgactaaaatgcccttggtgcttaaacttaagataattcaagccttggggtaaaatgtttaaaaaccataaccccgctcaaacttggtattctatttatctccaatatttatcccactaagaaaaaggttctagacttacccatgtgactcaaatggccacccatcacattttccctcgtcaccgagcaaaaatcataaaaattgcatatttcatatataatacaaataatacctctagagtttaataaaatcttcagaattgagaaattataagtctaatgcccatttctacatatgggatccacaacataatatattcatgcataattataaaaatatcaataattaacgctaattgcctttactaatccataaggtcattacaattatccccccgttaaaaagattttgtcttcaaattctaacttgaatagctctggatattgaattctcatgtcagactctaattcccaggtggcttcctccaccttgctgttcttccagagtactttgagcaaaactatggtcttatttcgaagaaccttctccttcccatcgaggatttgaactggctgttcctcgtaggataagtctgactacagttcaagggcttcataactcaagacatgactcggatctgaaacatatttcctcaacattgaaatatggaatacattatgaacagccgatagtgctggtgataaggctagtcaatacgctacctgcctgaccttcttgagtatctgaaatggccccatgaacctagggcttaacttgccactctttctaaagcgtctaatgccctttactggagaaactcacagaaaaatatgttcccctacctgaaatgtaatgtctctgcgcttcggatcaacataacttttctacaagctttatgaagcaagcatctgtgccttgatcttatctatagcttcattggtcttctgaactaattccagacccaattacttcctttctccagtttcatcccaatggattggggaacgacacttcctaccatacaacatctcataaggagccattcctattgtactttggtagctgttgttgtaggagaactcaatcaaaggcaagtacttactccatgaacccttgaagtccataacacaggcttgtaataagtcttctagtatctgaatggttttctccgacttcccatcagtctgagggtgaaaagttgtactgaactttagctttgtgcccatagctctctgaagacttacctagaactttgatgtaaactttggatctctgtctgaaataatggatttaggagctccatggagacgaactatctccttcacatacaattcagcatactaattcactgtataggtaatctttactggcagaaaatgagctaacttcgtaaaacggtccattatgacccatactgaatcatacattcctatggttctaggcaaactaaccacgaagtccattgtaatatccttccacttccactcaggaacggctaatggttgcaacaaccctgccggcttctaatgttcaactttgatttgttggctggttaaacacttaaatacatactctactgcatctcttttcatctcataccaccaaaaatagggttttagatcctgnnncattttggtggttcccggatgcagcgaataaggtgtggtgtgggcttcatcaaggatttccttcttaagttcaccattatgaggaacacaaactcgagctttatatagtaacattctgttattcgagattgaaaagtccttaggccgactaaccaatacttcatctcgaatttcgactagctcatgatcttccaactgcaccattctgattctttctaacaaatcttattgaagtgtcatgttgtgtagctttccaaccacaaattcaatttcagccttaactatttttgaagccagttgaggagctatcatcacggtgctgaaaacttgcctaggacctcttctacttaaagcatctaccacaacattagcttttccagggtgatacaaaatcttgcaattgtaatctttaaccaattccaaccaccatctctgcctcatattttaatctttctgagtgaagatgtacttgaggctcttatgatctgtgtaaatctcgcatttttcaccataaaggtaatgtcgccatatttttagagcaaatactacaacaacaatctctaaatcatgcgttggatagcgttgctcataatccttcagttgacgggaggcataggccataactctatcagcttccatcaaacacatcctagaccctatttgtatgcatcacaataaataacgaacttttctcgatctgatggtaaagctagaactagtgctatcatcagtcgttgtttcaactcctgaaaacttgcttcacatttatctgaccatatgaaccattgattcttcttagttaactcagttagtggcacaaaaatcttcgagaatccttcgacaaaacgtcgataataccctgctaatctaagaataaacaatgtccatgtaacaaatgtgaaataagatatttattactcatataattaaattattacttaactaaccaactaaattttaaaaa

SEQ ID NO: 126112 - DNA, 690 bp, Cannabis sativa
cttcatccctttcaactaaattttgacaggcatcaggcaaccatcgggggtacatcggaccccatcgaactagacaaaaaaattggcagaaaccatgaaaatacagtattcacagacaacaagcattttaacacacaaaacagtaaaataacagcattaatccacagatcaagcataaaaacaacatcactactagaaaaatataatttagcaacacttgtttagtaacactttaaaaaaaagtgtggttaaattgtttaatttttaaattagaaacacttaaaaaaaatgttgcaaaataattatatgtttataaatttttaatttttataatttattaaaatatgcaaacacaacactataaatataagtgttgctatttataatttcagatgataagaaaacaacggtttttttaaaagtatgtctaaatgtatgttgtttattttttatattttttttacatttttttattaacaaaaaaatattcttttttattcattcttgctcattcccaccttagcaaatcagcccatttgattttagcaaaaaaaagaaaaaaaaatccattcaaattcttcttatttattcacactttaccaataaataaataaataaaagaaatatttgcaccaacaactattattattaaattatttaagaatttacctttacctattttaatactca

SEQ ID NO: 126113 - DNA, 1086 bp, Cannabis sativa
taaatatatattatacatatataacacacataattaaaatcttcttaattgataaataatatcatatttacttatttttctaataatatgctttatttctaatttttacatattatttcataatttaatataatatattgatgaattactaattttttatgtttagttaggtagtcattacaataggctaaaatatgcatgcaccacactttaagcccccaaatgctcttgggcaattgtaattagccaaaaacaatttttttttggttgtatttgaggttgcaataaaatttttgcttgcttactaaaaaaaagtaaataaataagtcattatggtttaaaaaaaattctaaaagaataatggattcttttgaaataatgagatctatatataatatatataatacaaaaattatctttttaagcactcaaattaaatatcccatctaacacctggatgtttgttaataatatacgacattcaatttttgaagttgttaggcaaataattataaagcaaaaaatgatttaattattattattttttattagataaatacttttttagactcaatatattgtaaaaactattgagtggactatttgttttgttaaataaaaaattattaaaccttgtattttttaaaatagcataaaatagtaccttaaactgattttttatcaaattaaaatttaataataagttgatctagaggtgttataataagaatcgttaaatttttttgtattcgttcatgctaaaaattatcttcaaatatattacattaaaaaaaatcaaaaattaaactcaaagtactattttataatattttaaaagttaaaagaatcaatttttttttaaaaaaaaatttgttatctcgtaataacttttacaaaataaatacaaaaattattcacctttttcatcttcagcacaaaacaagagaaaacaaataaataaacattgtcctagacaattgaacaatacactacgacaatcataaagttgaatcaaaatcatatctttatatataaaatgtgattatttaattgtttttgttagtttaacaaaatattttaagaata

SEQ ID NO: 126114 - DNA, 692 bp, Cannabis sativa
aaagtaatctaaatttctttccacatgaacaagtgacaaatcaacctttctaatgctattaaccaaaactccagaataacaattcccttgttcaacctaggaaaaaagacattaacataagaacaaattatgatcgtagttgccaataggggatggcaaaatgagttttgacatggcagacaaacacgaacacgatatgaactttacgggttagggtcgagaaaattagatgtgggtcgaaaacaggtcgacacgacttgacacaaaatataaacgcattaaacacgacacgacccgcttaacacgaatttaatccttttaacataattttttaaaatataataaaataaaaattattaataataatataattatatacaaatatatatttagtaattcaaagttaagttaaaattttaaatttaattttttttaacatgaaaatgaaaatattttaaaatttttaatttttattatatatataacaaactatttatacataaataaatgtatataagttttttaatagaatctaaatctatcgtttttctctataatctaacttcaataatagcgaaatggatcacagtaggtcgacaagcacacgatacgatttttttacaagtcgagttagggttgagaaaattagacacaagtcaaaaaatgggtcgacacgcttgacacgaaatata

SEQ ID NO: 126115 - DNA, 1516 bp, Cannabis sativa
agttcctggtaaaataacttccaacaataacaagatcattatgaagtaattacctcttgtaggttgctcgacataacagacttctacctgatcggatgtcttctctacaactctactcgggtaatcgacaattatagatgctgatgaattatgtgcaggctgttagggacatttacctctgcccaggtattagaaatgtaggacatgtgtcgctcgatcctctcgccacgtcaatgtgcaaaaaactggataacaatatctattcaaaccaaaaattaagtaattttcaaaattttcatgttattttgacaaaaatataaatttttaattaaaataaatatctaataagataaaacatctaaactaacatttttctaatctcataattcaaattaataaaaaaaaattcaaaataacaaatttttgaaaatcaaatacggttagtaaatttgaaattctaactagattatttctaagatttattagtattttaatatcaaaataagatcaattaaaattttaataataaaataaataataaaaaatttcaaaattaaccataagacttgtttgtggaaaaattaaaattttcaaattcaaagactactaatatctaaaaataattttaattaactaaaaaattaataaaaattaattttattatgataattagatttttatttgaaaatttagattctacacaaaattttaccaaaatttaaattttgtttcactgaaaaattatttttgaaagcaaaagtatcacaaaaataaaaaatggcacatggggtatgcattgcatacccttgcgcgcgcgtaagtgggattttgtgcgagggagaggctacaatgcaacccttttgaccgagctagcttgacgtggtgcacattctgacaagatcatgtttgagacaccttggtcacgagctgtctgaacctcggtcttgaccgaggttcatcccttcatctgcgcgcgtgcaagtgtgcatcgaattgagatattttcatccaaattcaaaaaattataactaattcataaaaaatccaaattgagtactataaaagcctaaatttataaatttttcatctactttctaaaaaaaatactttcagaacgaaactaaaaatatttatcatcgtaaaattataatctccatacaatcatcaaataattacataaaccaacatgaacacatccaaatcaacacaatgattattttaaatccatatttcatgaaagtaaatcattatcaaggctttaaggccagttgttggggattgtttcactaggatatggatttactaccatgtatgttgataaacaccctaaacataaatttcttaatcaatggaaaacacatataaagttcaagaaaccttacattggttgtagcaaaataaattgactcattccactcagatctctaacccttgttcctctttgtcgcagagtattatcaagatctgagcctgattctccttcaagtgttggattcttcacagtcttacacgctat

SEQ ID NO: 126116 - DNA, 3537 bp, Cannabis sativa
  modified_base (51)..(70): a, c, t, g, unknown or other
atggggttccaactcaaaaccaattggcaatgagtagagtagcccatgttnnnnnnnnnnnnnnnnnnnntttacatttaatccatgtgggacaatgtcctccaatatcctcaacacaatacagttgtaaatatgctcattttgttaaacttttttttttaagaataaaaactttattattataaattaatgaagaaactcatttacaataacaaagtatataagtagaggaatagtctccaaccaatagtaagcttcaaccaagccaatggcatatctagcaaagccatgagcagccatattaactgtacgtttgacatgaacaatactcactaggaagaaaagaaagaagactaaaaatatcaacaattaaatccttgaaagttgcaattaattgcaaataaagatgcattaaaagcattagaaaccattaagacatctatttctacttgtaaaacttgtagttgcagctgcaggggccaattcaaactaagaaacattgcctttactttcattttacgagatgcaaaattactaacaatgggatagacaagggctggaactacttgagcagaatcattacgaataacactgattccggcaatatttcattgactatccattgccgcatccacgttgatttttagagtacccagaggaggaggctaccacggcgtaggcaaaacatggcataaaaagaaaataattaaaattttgcaacagcttttaaactagccataacagcatcatcatcctcaacaggtagctgcccatcaattttttcttttttctcatcgttgacaacatcttttgatacctcaacatcattaccactatccccttaaccactaccatctatatcattatcctcatcattaatgatacctttgatatcatttttttcacctcgagaaacatcctcattcacacccccttcattctcttcattatcaccctcttcattctcaccatcatcctcatcatcatcttccacatcatcttcatctccatgagaagcttcctcaatcttaacatcttccttattatcatattcctcaacatcatgagaatccttcacataaaaaaataaacaaaaattaatacttcttgaaaaataaacaaaaatttaaagtttaataacaacaaaccttgggaggaggtcttgacaacaacaagtcaatttttttatgcatagatttcaaagaatgcatcatattcttaaaatcttattttaaaataaaaaaaaaaatcagcagaaaatgcttcctgcttagcagaaatatctgtcaatctcctatgaaactctgcaaatttaaaacatgaactattttcatcaacagaaccttgagtaccaacatcatcaatctgcagagattttcctttcctcatgtcatctaaattcttatccacaaagaatccatccaaatgtaagcttaataattcctcctcaattgggaacaatttcttaactttaagctgtaacaaaaataaaacaggaaaaaaaaataataaacacataaaataaacaaaaaaataacattgaaacaaaattttaaaaactaaatataccttggatagagaaatactgaagatagaattcttgaactccttaagagaaggaacattatcattagaacagttcagaattctaggaatacgagcatgcaatttagaacaatgaatgtcatcaatgtacgtaaacacaacattcattgaacaaaacttgaaaaatataggtcaaacctctcaacctataaaaacctattttttctccattatcacctttattaattttaacaagattctttgcaatcgcatttctaaccaaatcaagaaataaataataagactctttaccccaagcatattcattgaacctcccactatcaataatatccaactctaagttagatacttttttagtgactgaatcacttaaaacaaaacactgaacaaagtacaaaacaataactttcaacgcaagctcatcatcatcgccgaaaattttcccaacaaaagctttctcctcgtccttcttgttaatttctttaaaaccagcaaaaatcttctcattcaacaaattttttcttgtttacacctacacttgtcacattgacaagaacaatcaaggcctaaaaccaaagcaaatttctcaatgctaaaccttagcatccgaccagcaatattaaaccacaactcgttatcattcggctaccacctccctcaacaacaaactatggggcaactggtatattgcaaaacataagaaggagttcttaaaaagcatccaaacacagtttatccaaagatttccttctgttcactggaaaaaattgaattgatagtctcaattattttaaaagagcaagttgaagccacacccgcgtgtagtatgaaaatcttcattactaaatttattatcccataactgaaaagtcaaaatagtaaaattaataaaacagtaaaacaacaacaattataaaataaacataaaaaaataatacataaacaaccaataagaaagaacaaataaataaacaaaatgtaaactaaaaaaaacagaaatagcaaaaaaaaaaaccaataaaaaatagattatacacatttatatttgaaaaatggaaaatgaaacccacaacatcaaatgaacaaggaataaaaaaatataaaaaaaaaatcctaaaaatcaacaaataaacaaataacatataattcaacaaaaaataacaaaattatatgaaaacaatcacattcttgataaaaaaaaaaggctaaaaagaaaatttccaacaaaaattgaagaaaaacatgaaaaataaaacatattacaataaaaattataagttaaaacatgaataaccccataacaatatataaataaaaaatcaacaaaaaaatacatataaaacataacttaggattgaacaaattaaaatgaagaaaattatatataaataaataaacaacgaaatagagaacatacaaaaataatttgtaaaattaaaattgaaacccacaacatcaaaacaacaaagaaaaaaatcctaaactcaaaaaattaatcaaataaacagataataacacatttgaattaaaaataaaaaaccaaaaggaaacaacaaatcaacaaaaaaataaaaaaaaaataattcaaaaatacatttctaggacgcacagtaacgaaatcatcattattatcatttctcttcctcgtagttttcctagcatcaccaaagatataatcagaggaagctcagatgatggctcatcaccaacatcaacaacaactttgagtttctgattagggagtttcaaaatttttcgagcaacagatttcagtttagattgtttaataggctttttttttcttaggataaggggacaatgagcttgaacgagatcgagtaacagccgttactcaaaaacaaagatgaaacgaataaagaccactcaaaaaacaaaaaaaaagaaaagaaaagaagacgatgatgatgagaatgatgaaggagaaggaattcaaaattaaaaaaaaaaaaa

SEQ ID NO: 126117 - DNA, 887 bp, Cannabis sativa
  modified_base (733)..(750): a, c, t, g, unknown or other
taaaatttgcataaccttacactttttttatttattattggcatgaagcctgaagtgatgttgggctgtaataagttatccgataagcaacacggataaggacacgtgtgatattttgcattgctagaaaagcatccttcgaagataatgataagtggagcttcgtttggctcccgttatttattttatttttttgaaagaagcccccaaattttcaatgataaaaaaataatgttctttttggccccctcaaaatttatttttccatttcgagcacaactagtaactgcattcaagcaaaaaaagaaattcgggtgtattattaataactatggtgtcgtttggtaatacttttttaatccattttctgtttttaaaattgaaaaaagtgaaaatatttttcaaaaacatgttttataaaactgttttattttaaaaacaaaaaaaaaatcaattccaatatttttttaaacagtttttttttttaatcaatatcttggacttcgatcatgactcagacccaaatccccccacggtcctagcggtgaatccggcctctcacttgaacccaaatccgaccccgggcctagacccgacataaataaaagtaaaaaaatgaaaatgaactttagagaacacacttttgttttctgtttttaaaaattgaaaaataaaagtggttacataacgcatttttatttttcaaaggcaaaatttttaaaaacaaaaattnnnnnnnnnnnnnnnnnntaaaaaattagaaaacaaaaatgttaccaaacgacacctatatttgataagaaatcaattatctaataagatagttatatatatatatgaaacactttccatcgaattttgatctaataacgaataatgaaatcaca

SEQ ID NO: 126118 - DNA, 1278 bp, Cannabis sativa
  modified_base (35)..(70): a, c, t, g, unknown or other
tttatatgtttttatttacattgttttagaaattnnnnnnnnnnnnnnnnnnnnnnnnnnnnnnnnnnnnatctagatcttggtaaaatataatccaagaaccctttcttagagcagctctccttttgttatgtacttgatgatgaggtccatccagtccagttcttgatcattggtagccactatctctttggttttgatgctaggttttcgacaagtaccacccccagcctttctacctcgttgtccgaggctaggttagctaagtagtctgcctgagcattcttttctcgcgggattcgctccactttgtattctttaaattcttagagcaatttcctgacaaccgccacataagtggccatcttttctccacgggtttggtattctcctaacacttggttgaccactagatgtgaatcactgtaaacttctacttttttggctcctacaaccttggccaatctcaatcctgcgattaaggcttcatattcggctacattgttagaagctgggaacgtgagccgcagagcggcctggagtcataacccatctagtgagatcattgctattccggcacgagagccactttcatttgacgccccattgacatataccttccatgctagtattttctgagctgacatactagcgttggcctccgtctcgttacactccacgatgaagtccaccagtgcctgtccttttatagagatgcgcggaacatattgtatgttgaattggcttaactccatggcccatttaaggattcgtcctgaggcctaaggcttctgtagaacctgccggagtgggtggttcataaatactttgatggaatagacctggaagtagggcctgagttttcttgaagcaatcaggaggcagaaagctactttttcaattagggggtacaaagtttcggcccatatcatgcgtttgctaacatagtataccgggtgttgaactttttcttcctccaggaccagagctgcactgacgacgttctcggagacggctaaatataagaacacgtcttctctgtgaactagtttcgatagtattggtggtttggccatgtgctctttcaattttctgaatgcctcctcgcattctttagtccatttgaatttttgacatttctttaaaatattgatgaacgggatgcatttgtcagttgagcgggagatgaatcgacttagggcaacaaccttccccattaagctttgcacatccttgtgtttattcagggagggcatgttttgttgggttttatgccct

SEQ ID NO: 126119 - DNA, 1951 bp, Cannabis sativa
  modified_base (1900)..(1903): a, c, t, g, unknown or other
gaatactcgcaattgttcttcatataattttcttcttgtcattaataatatcatatacatttggtgttgcgaattttgctcgacaacgtcatcaatccaaatctgctttgttttgcagtttttgaatacttccacttcttcttgaatctcttctgttagatattctcattatggatcctttcattcgtaaaatgaaggctacaatgactttagctgataatgaaaaaactgtttttgccattactgatgatgtctctcgtgaagaagtcccccaagaagaattctctctgtttgctcgagtaattacgcataagaaggtctagctttcaactttccagcgtcaaatggcggaacattgggatggtcgctttaaggttaatattaaggagcacttctcaggccttttatcctttgttttggatgtgaaggtgatcgtttgagggctctggacaaagaaccttggcattttcaaagtcaacatattgttctttatccaccaatggctttacaaaatgtatcccctgaatctatgatttttttctccattttgggtccaagcatataggcttcctttccttagtaagtcaaggtcactagccaaatcattgggtaatttgctaggggagtttgtgactgtttatgaagactctttgaatgaaggatgtggtcattttttaagatttaaagtgcggttggatattacgaaacctttgcttcggggcaaaatgatttccttgccaaaagtgcgagatgaattttgggttgagttctgctatgaacgccttcctaattattgtatggaatgtggtattattggtcatttgtatcagaaatgtccctagtttttagaaaatcttgataattgcatcgaactggaattttcatatggtcttgtgttgaatggatctcctctcccatcttcatcatatgatcgttaccactctgatttttctaaggggaatgcgtggccattactaactcgattggctaggaattctttaactgcaaccattccaaggattaataaccgaccccctgctcatccacaaaatctgctgattgatgaaggctctaattctcgagttgtttcccccccatatggtccaattaatgcttcaacaaataaccaaaatttggctgcctctacttttttcactccaggtgttttgacaaattcttcacttattcctaccacttcagtcaaaacaacaactcatccatcatttactgagcttatggacaccccatcgacctcctcctctctgcctggaacatctactacacactttgatgtttatatacctaatattggaaatcattctcccaatatctctactactcaacttactcctccctttgctacttatcctcccattgattccacataccataaattgaccacgtctgttttgcctatgccatctgttacaacctgttgttccactactcagccaattattaacttttcatctggttttggctgtcatgcacaaggaccggttgatcaagaaaatatcaatcctaatcgcagagttaagaggcagaaggaatcaaaatcattgagacaaacacttaaaagatgccgtggtaaccaaggctttgaaacttcctttttgtcagtcgaagtggacactcaactttcggtttctgatgatgcaatgcaatcccgctcttcatcatgaaactgctcaattggaatgcacaggggttggggaatctgagtgcattccgtcgtctacgattgcttgttagtgagcaatctcctcaggtgttatttctaatggaaacaaagttatgtgatggtgctctttctcgttttaaaacgtctttaaattttaatgatgatttaaaatgtctttaaatcaataaattttcatttaaatgattaattaaaataaannnnctaaaatatattataatttgaaattaaattaattagtcaatgaaagtc

SEQ ID NO: 126120 - DNA, 552 bp, Cannabis sativa
atgtgcgctggtaaaactttgacctttttgccagtgcagtttgccaaatgcgctggtaaaagttactttaaagtagcaaactgtgctggtaaacgtgacatttcttgtagtgaaataaatcatacttttacttctctactcagtttcaaggatgagactcctaactacctccaaaagaattaccattgttctcccgtgaaaatcatgatagatggaacttttaggttgaacattattttttattaacccaaacgattgagactctcatgctcgagtctgctatgattggactagaagggaatgcattaacttaatttcaatgggtaaacaaatgaaccaataacatcataggcaaaaaattctatagtttatgcaaatgatccttttgagattttgagcattgctagtcaagtcacttccagcagcatatgttcgttcatcaagaaaacaaggtgaagaactattgaatcaaatgggaggtgttggcttcgtgagtcgctaatggccctgtttagcttagctaagctcttttttaacttttagaattaaaaa

SEQ ID NO: 126121 - DNA, 1281 bp, Cannabis sativa
  modified_base (1227)..(1237): a, c, t, g, unknown or other
aatccttcttcattgtaggccaaaaataccctaatgaaggattttctttgatagactgggcccgaatgtatgatttttgcaaaagccacgatgaatctcgtggatcatggtgctgatttttgttcttgaaatgcacctcaagtatggcattaaaagtcctcgacgataaagctttccatccatgattacataacgaggagcctggtactgaacttttctagagtcggccttatctgcaagaagctctcctgaactcagaaagttatagatggccatccgagaatgtgagttgtcaactatggcatttacccctacacttcaatgcttggtctttctaggtgacagatttggactactctgtgttggatgatcttaggatctgttgcaagtttggcgagcatgtctacaaatgaattttgttccctcaaaacctggcgaatattgtagcctttgagcccttacagtaactcttgagacatcatgatgtacgcatgcatcttttcaccttttgtttaatacttaccaaaaatttgattcaccactagctaggactcatgatgtatttctatttgttgggctcccacatttttagcaaattttaagcctaacagcatagctttgtgttcttcctcattgttggaggcacggcagctaaaacgtaggcactctgaagttggtgcccttatggagggatcagaatgatctcggttctggctcccttctagtttgaggctccgtgaacgtagaccttacagaagtgcaatgccaggattggctcttctaggaggtcgttcaggctggaacactctactatgaagttggcgaggccttgacctttaacaggcacctgcagctggtactggatgtcaaattggctaagttccatagcctattttagcagcctgtcggaggactctagcttgtgaagcacctggcggagaggataatttgtcagtacatttatggtgtaggcttggaagtatggtcttagttttcaagacgtggttagtaagtagtatgtcaacttcttgatcatagggcatctggattctgcacccagcaatcttttacatacgtaatagaactggaactagaccttttcttcctcccgcacaagtgtggcactaatagcatgatcgaacactgccaggtaaaaatacaaatcttccccctccacaagtttcaacaaaattggagcttgagttagatgtgttgggttttatgccnnnnnnnnnnntccatttcaatgtaatctttatcttttaaatatcaataaagaaa

SEQ ID NO: 126122 - DNA, 1651 bp, Cannabis sativa
  modified_base (1443)..(1444): a, c, t, g, unknown or other
ttttcttttctagtgtaactctatttagttataaactctcaattagaatataatttacttggtcctaagtgtattcttagatagaagttctactgtagtagtttttctttgagatatccaagaaacaaataaaaatccaaaacagtatgtatcctttaagatatccaaaataaattaacatattaaaaataaaaagttctttttgttcataaaaaaatatttaagaaatttgataaattttttgagaaatttagaataatttataatactgaaaaataaaatttaatttttatttttaatatgttaatttattttggatatcttaaaggataaatactgttttggatttttatttgttttgtaaatattattgatcagactctttattttgttaaatgaaaattaaaccttatattttttttaaaaaaaaagtattttatattaattttttgtcaaaataaaaattaataatcatttaaattagtacatttttttacatctaaaaatcatattcaaattgattatagaaaaaaaaaattatcaaaaattaaatttaaaatactattttatattatttttaaaaaaaatatattacttaatttatcattttacaaaataaacattcaaatccgtaacttctataaaacagtttctctaaaatagtatttggaattctacaatgtatccccttaaaagggatacactgatacactttctatttgtttcggcatctaaaagaagttgttagtctaatttttttaatatatttgtgtacgttatagttatttaggatatcctacaaagttttaagaaattcgaaataatttataatgtagaaaagtgttcaaacagtatattgtacacgcgtatataataaaatagtcacgcattcaatatactatttgaaccctgtttcagtatattaaatttttcaaacttttacaaaatgtcttaaataactataacgtacatgatcatgagaaaagatttaattaaaaaattacttaaaaactaaaccaaataaaaaaaaaaaaaatatatatatcctgtaaaagggtgcatataaaattattgacttttattagataagtcaaagaaaaagtgtccaatcatctaaattgcttgtgaaatggacatttgtcaatagtttttcggttttttaaaagggtttttttaatattatacctaaaaataattttatttataaaaatacttttaagagaattatttccacaaataccgattgtcacgtcagcatacatatcgaaattcaaaataattaccgaaaaatagaaaaaattggaaaattttcattttttgagagttttgaaaaagcaaccatttagttacttttgatgtaaataagatatcaattgattactattctattaaaaatattattttaaaattttacacatatatataaataataaaataattatnntaatatgtgagaaacatatatttttttgtctctgaaaaaggatgactaatattaaaagtaactttttttgtttcttatttatatttttaagctatactatgttattttattgtttaagatattttgaggttactttttttttttaatgtaaatgtttcagatactattcaatttatttataagttattttataaacttatttattta

SEQ ID NO: 126123 - DNA, 1811 bp, Cannabis sativa
tacacttgcgtgtgcaaaatatcgcaacaataacaccattaacaaggaaagaataagaaatagtcttaggacagaaaagtatcagctgcaccaaggtgtttccaaaccccatttttagcataacatgctcaagaaagtgccattctacacgatcgaatgccttactcatgtctaatttcatagctgcatatcctttggaacctcttttcctatttttgagttaatgtagaacttcaaatgcaataagaccattatccatgataagtcattgagagagaaaagaactttggaattccaatatcaccataggaagataaggatggagacgaagcacaattgtcttagaaacaagtttgtacaaaaattataaagacttattggtcaaaactgagtgagctgtagcggttttttcacttttgagattagagtgattaaagttttattaagaagagaaggatcacaaccattgttaagcacattgagaattgtagtagagacaagaggaccaaaaatattccaataatttaagtaaaacgttcctgaaattccatccacacctggactgctatcacttgacattgaatgtaagttttcgaaaacctcatctgccttgtatgacaaagaaatatcggctctcgaagcttctaaaatatttgtaagaatagtagctagaaccgtatccaaagcctgatgatcgacaccttcggaggagaaaataccagaaaaattctattaatctatgtatttcctgattactagtgtgagtgatactcgccgtataacgaaacttttgatataattattggcctttctagcattagttccctgatggaataacttcatattggaatctctagatttaagccatgaaattcttgatctttgatgccaacaatcctcttcttgtgcaaggagtaatctaaaattgcttcagattttttaagagtcgagaagtgagaagaatcagtcttattcgagttctgcaaagctgagacaagatcatgggaatttttaatgcaccgttttatgttaccaaattcgtggtgatgccaagactataagtgagtagaacatgaggataaattggatgagattggagaaattgcattgtttgaatcattgatccaaaggttatgaatagtgttagtacactcatcttctttaagccaaagcttctcaaatcgaaatcttgatctgaaaataggtgtagaagctatatcaccagcagccaaaacgtgcaacttcaaagctctatggtcggaatgataaaaatccaagtgatgcaaggttggagattgaaaaaaatcaagccaatagtcattgacaaaacaataatcaagtttttccttcacatttcctcccccttgatttttattagacaatgtggtgtgagcacctttcaaagaaacttgagatagtaaacaagagtgaatagcatattggaaggcctcaatttgagactgatttcttagaggtcctctaactttatcttcatttgaaagaactttattaaagtcacccataacagactaaggttcttgaggagccacatcataacatcttttaagcaaagtccaagtatgatgacgtttgctagaagaaggatgaccatagaaacccgtaaattgaaaacaaggacaatcatgacaattaataaaacaatctatgtggttggtggatgttatcctattttttgcactatgacgtggcaaggcatactggtgacactgattggattttatgccctaaataaaacccatttaattctaatctgatttattatcaataaaagattagaagtcatttatgtt

SEQ ID NO: 126124 - DNA, 572 bp, Cannabis sativa
tggtgcaaacaactctaacaaaggtggacaaagtggtgttcctgccttcattgcaactcccgagatggttgatgacacaacttggtatgccgacagtggtgctaataatcacatcacagcgatgccaatcaaaagactcaaaagaatgagtacaatggtaaggagacattgacagtgggtaatggttctaaactcagcatcaatcgtgttggttctctttatttaccctcttgtactccaaacactttgctgctgaaagatgtcctgcatgtacctgagattactaaaaatttgattagcatatcaaaactaacccatgataataatgtttcggttgaatttttctctgatttctttgttgtgaaggacatggtaacaaggaaggtgctcctccaagggaagcttaaggaaggtctatatcagtttgaggagttactgtcaaagaaatcaaaattctcagccaccagtacctcttcatcaaagaaaaattctcatgtttcaaagtctgctttaatttctattgtgaaatctgtgtcaatcaaggataagtggcacaagagacttggccaccc

SEQ ID NO: 126125 - DNA, 869 bp, Cannabis sativa
agaaagggttactttatgaagtaataattatagttagtcttattgaacaaatatttgtgtagttttggaatgttatacatatgtggttatctgcttatttgtgattgtttagaattatatgtatggttgacacgtgattattgcttttacttttcttgttgggtctttgtgactcaagggtaccttgtggtgcaggtaaggataagggtaaactagggcagccatgagtcaacagtcttcttcgacaaatgtacatatcaatcttttcggcttgcataaccgagttgttagggggtgttttggcattgtatagtattttggatacaaacttagtactaaaccttttgtaataggggatccccgaaactaaatatttattgatgtaaccttttcagtttaagtttattttattaaagaattttaattgaagcgttagtttattaattaatttataaaagcacctataaatacccttctctcatatgtgagagggagttgaaaaattaattttacaatcacataatttgaaatgatacaaaataattttttctctctactccgaataccaatttagagtttaaattttcattttatcttcatcttaaccctaaattttaaactcagattttgattttctgagtttcgaacgtcattaataaattgataataaataagtcttaaatcatatttaaattaatttagtgattcatttttctctaaaataacttaattaagttaataattaataaaaaaaatttaaattaattttattaattgttgataaatttcagtatacatattaatttttaataaattagagtatttttttttttgagaaaaataaattagagtatctaaaatcatatttt

SEQ ID NO: 126126 - DNA, 887 bp, Cannabis sativa
  modified_base (27)..(54): a, c, t, g, unknown or other
tatgatatataatccaattcaatatannnnnnnnnnnnnnnnnnnnnnnnnnnncggcgttccaaacgagcccttatattattttataacataaacaacataatttgagcaaattttaaggtgtaattaatgagtgtaaaattgtaaaagtatattaaattaaaaaggattgtaacatataagtcatatataatagtttgtaaaagattttgtatagttacgtcatttatatgttataatttcaagccttagcgtaggtaataaattatttttggtattggttattttgtatttatacttttggtataagttgggaatctgtctacttctcctttgaaaaaaaggctgtaattggtcatctccaattataggctatttgaaatcaaatgttgatgcaacaataaataacatttcttagacgatcggaataggagccattataaggaattcgaatggttctatagttgcttgcctttctaaattattaatgagtaattttaattattatttagtgatttttttttttaaagaaaactccccttcaatatatatactacatatatttatatttatatataattttattataatcttaatatcttcattattattgttatgattattagcttgagttaataagtttgtcttgttaatttatcttttattagttctttgagagttaatgctattttattggtattattttgcaggttgtttttcagctattcaagcagagtgtttggctttacttgtagcattagattggcctcttactatgggtctttctgttgaataaaatccacttataaccagtccttttacaaatatccacatcagcaattacaaacagatttaaaaacaagtaagactcgatcctagggtggctt

SEQ ID NO: 126127 - DNA, 1344 bp, Cannabis sativa
tcccaaaacactgcttaacactcgcataagaatatttagggtttcctaccaaaccctgtagttcaaatacactaaaataaattttatattttggctctaaatcatacaccataatttagagcttgttgcaagcttcaaaacagcatatagaacgtccaaaacggacacccgagtgaaaagttatgacaaaaatatgatttgagatctccctggaatttctagaaatggccgactgattttgggcaaaaaaatctcaatttcgcactcaccgaaacacccctgaaatctatccaagttactccaaacttcatgtagcacatttatattatatatactacagtccaaactaaccaaaattaaaaacgagcccttaaacgaaaaacgccattaacgtttggacataagctatagagggttctaaactcaaaattctaactcaaaatctcatcaaattcaacaaaaaaaatatcgaaactagtcacatgactacccgagaataattttataagctcagaacttccataactattgtaattcacaaaactcttatatgaaaccaatcatttttcacttaaaagaaaattaaaccataccttaagctttccctcttgaaggatttgctatcccgctgctatttgagcttagatcgttaggtttcaggttaaaaattgaagaaaatagatcgagaagagaaaatttttgtcgaaggaggtgaaggatttcatttggttcttcgctttatgttttaaaatttttaatgtatatatatataaactgataaacgttaataataataatatattaataatattaataagatttttattattaatagttatattattatttcttaaccactaagaaatttttaattttagggtatttggccaactccaagtaccccaaaatatcccaatatttctaaaataaacttatttctataatcccaataatatttctaactaaaactgttgtaatatttttggcctccaataggatctccaaggttgccgaatctaaaaatatttttatctctaaaattacttattttatatttacatatttcaaataaatctctgtaattattttaatttatgttaatatgaaattgaaaattttccaacttaagtataaatttctatttaattaatttattaaaataaaaacaaataattaagcatcttgaataaaattaacttaattatcaattctaatctaatatctaaatataatattctaattaaagttgttctaaaattaataaaaattaatttttaacttaaatatattttacttatttaattaaatttcttaaaatagaaattaataattaagtatcttgaa

SEQ ID NO: 126128 - DNA, 951 bp, Cannabis sativa
taataattatataattttcactttttattatttaattttgaaaagaaaattatgatattacaaattttgttttcttactatatgaataaacttcattgaaaataatcataatatcaagtatgtaatgcaaatattagtaattttttaatttaaattaatacgtaatattatttgtttattttttttttctgaaacttgcaatacaagagagttggcttgttctaatatgtcctcacaagtaaaccttctcagggatagtttttcttttaatttttttcatcaaaacgagtatctcttcttattcgataattatttagcacgaacattctatgactgacataagatgtcttactaatcaatccaatcaaagttgtgtcttcattacacgtaatacatgttagattttatgccctaaataaaatctaaattaaatttaatattattttcaactaatcaagctcagaaattatattttgattttatcaatcacttggttcacatgttttattacgagattatatatttaatgtataaattttattaatacgagaacatgtagttattcataattatagtgatcacatcatcacagtaaaagataattatgattatatgctttgaatatttttagtcccttgatttattagtccactgaatttacactgatgtgattatcagcaataaagtttatttacacttttgttgcacttaacgtcttttctatgacattaagcaagataaacttaaaactggatgtatagggtatacaccgggacgagcccgatattgaaaaatagaatagttactgtaatctaacggttacaactattattgttatattatttgttaaaatataatatagattaaaatatttaaatgtgacaaattacatattaataggagattaatatatattatgtgttggagattgtattatatcatatataatat

SEQ ID NO: 126129 - DNA, 502 bp, Cannabis sativa
acaacaatcatttttgttcatagataattatggcatggaaagcttcattttttttttcttttttttttgagctgtcaatggtgttaaaccaagtaatgggaatgacacagtatcgtgaatggtgaggttggaaaaaatccttggacttttttttttttttgaaatttaatataatttttttaaaaaaataaataaaagtgatgcagtttgattatactttttaattgtatgatagtttatatgtcctgaatatactctatgtacttacattattatatattttcttttttatattaattttattttttaaaagcatagaaaggtgattaccatatatattttcttttttatattattgattttatttcttaaaagcatagaaaggtgattttatattattgattttatattgattttaggaaaagaaaaaaaaacagaaaaatacaaaaaaagaaaaaaaattacaaaaatagtatgggccggcccattaaacatttataca

SEQ ID NO: 126130 - DNA, 3708 bp, Cannabis sativa
  modified_base (1437)..(1441): a, c, t, g, unknown or other
ttttttttttttttttttccagtacttttaaaagtgataccatgactctgatacctttctactttcatagtactgaaatcctttgcctcttccataatcgtgagtttaacattgaacctgtcaggaagtactcgtactatctttcttactaaaatagaatcatcaagtttctcaccaagaacaaaatattcattagaaatgtcagataacctttcatagaattcagattatgtttcaaaatcagtcattcttagatcatcaaacctaatttataacatgataaatctagatcttttaacatctgcagttctttcaaattgggtttgaaggacagtccatgcatcttcagcaaaaatacaagtagaaacaagtttaatgaaactttctccaacaccattaaagatagcatgaagagatttattgctataactagataacttctcttcttctgtattccataaaagttcagattttacttttgtgctatcatcctcattttcctccgagggaggagacaatccaaataaaattacttttcatgctttttcatcttgtgctttaatgaaagctctcatcctcactttctagtagggatagtttgtgtcattgagtaacggaggatgagataccgaacttccttgtgtaaagaaagacatttcacacaagaaataatttaaacggaaattaaagacaagatctcattaagattttagtgaaccgctctaataccaattgaaattctatttttataattaccaagtaaaattattaaacaatttaaataatgcaaagctgtagtaaattgtttgaacataatttatctttgttctatcagacacagaatctgacagagcagaaatatactgtagaaagtaaaaatgcagaaaataaaatgacacacaatattttatacgtggtatcaacaactctttcgaattgctcctagtccacagggccacacccatagaatgaaatttattagatgaatatcaaatgattacaaaatcaaattgacttatacaaataaagactcaatctttgaagttgccgcaactgttgtaatctattcttctaattaaaattctgaagtaccgagaccttgaactcccttcaaattgcagcacctgtacacttcatccagaagagtgactcacatgcaatcttctccccgaagagtgtctaacttgcaatcttcctcccaaagactgactcacttgcaatctttctcccgaagagtgactaacttgcaatcttccttccgaagagtgactcacttgcacttttcctctcgaaaagtgactcatgaacaagacttctcccgaagcttgatgaacaatatctaaggtgtttagcttgcacaatttcaacaagaaacaatacagaataacacaacaataaaacactaagcacttgttggactcaagttcttcacacaannnnnaaaatactctctaactttgaaagtaattttagaaataatacaccaagagagctaaccaataccagcgacctatgagagtatttatacactttagaaaccctctaggttgtggtcaaataaccaagaaacaatcaggtcaataaataaaaattttcccaaatagaaaagtcaaagtctgtttaaacaaacagtcagtccattcaaatagatacattgaacttggacagggtttttcagcaaaatttccataagcaaataaggaaactttgacaacctttacacacagcacacagtttcttagtcaaatcagataaaaaggaaataaatatgattaagaatttcctttacatacaaggataatatcaaatattttaaataaggaaaattcatatttaactcaaaaagtcaaaagtgaatagaatatgatttcgaaaatcttttcacactaaaaaaggaaattatattttcgaaaataaagaataaacaaataaaccaatttcaaaaataccacaaatattatttttgtctattttatcaaatatgccgataaataattttacagtagcatactattattgatgtatttcaatatcagttcccacaaattttaatttaataaaaggtttaaaaaattgctaaccagatattatgtatcatattagtatggtattgagtaccttaaggtactatatagcaataatagtgcaaaaaatcaattataaaaaaatatagtataaagattatttataaaaaaattaaaaaaaaaaagacaaaagacaaaaaaaattgctagccaattattgtgtaccacatcattatgtcattgagcaccttaagatactagaagataatttgtaaaaaaaatcctaaaagataaaaaaaagtagaaacgacataaacaagttattttcctttcttattatatagtattgtggatgatgtgccatagacacgtagctcccgttaaaatcctcgttaaaacttgtatgttatagtcatatactttatttttatcattataattatacaattatcgaaaaaaaactatgttaaacaaggacatagtatattataatatagtattaggtattttaagatgctaaataataatattttattaataatgattaaataattcaccgaaaaaaattatacaaaaattataaataaaaatctaagaatagctgttgtaaaaaaaaaaattataaacaagcaccacaaaagctgacatctagttattggtgtattttagtttccacaaattttaatttaatatgatttaaaaaattactaactaattattgtgtacgtgaattagtatggtattgaacaacataacaataataatacaaaaaattatttaaaaaaatagtacaaaaattatttttttaaaaaaaacacaaaagacaaaaaaaaagcactaactaattattggataaaacccacaaacgacaaagacaagtcgtttcactttgttttattcaaacatcaatttatatatagatgttattggtagaaaatataagattattagttttataataattataagtaactatatttttaaaataataataataattagtgaatattttttattaattaatttcctgtacaaatttttaaagaagaaatcaataaaacaacacacacaaaacaaaaaaaaaaaaaagtggaggggaaaggaattggtgaaaatacaaatttagcattttaccctaatataaattctgtaaatataaaaaaaattattttgttaatatgttttgaacttaggctatagtgcaaattgcactaccacatactgaaatttttaattttttttcttattttattgtggggtagaattttttttcaaaaacactgtatttttttttctttcaaaaatactggataaattttatattgtgtactatgttattcattgttgttccacgattgttttttggttattttcttgttattttcaattattttattttgttattttaccgttgttttataaaaagacagtatttttgaaaaaatttcgcgtggcagtaaaattgtaaacttttacttaaaattcagtatttttataaaaaccctataaaaaaagaaaattttttatttttatagtttttaaagtataagtttgtaaaaatataaatttttctaaaaaatattattttatgggaaaatttaaaaaaagaaagaaaaaagagcattagatacatggctacctcctatggtagggtacctaattacctttacctaattttctctct

SEQ ID NO: 126131 - DNA, 2467 bp, Cannabis sativa
  modified_base (1038)..(1057): a, c, t, g, unknown or other
  modified_base (1188)..(1188): a, c, t, g, unknown or other
tagatctctcttttatctttctgatctctcttttatctttctgtaacattttatctttctgtaacatcttgagcaatatcgagagagttatggccaaaatactatcagtcaaagtaacagaaaaatcatcgtcgaaacgaagccatgtaatgaaactccaacacgtgccgcggcccaggccttgtggggccgcagtccacacccctaaactgtacaaaaatcatctttttctctcacgtgagttttagtggtttcctaattcgaataggcatttaacatgtgcgcttttatatttttttagtccctaaaagcctatataaagggtgaactggagttgatttcaaaaagcaattaaaaaagaaaaatgagtacgaatttcagagacagaagtcaatactagaggcattctgcagaggattttcagcattattttattctctatcttcttctcttttctaaagttaatatgtgtgatttttcttccatgaacatgtgtagctaaacacttgattagagtctagatggatgttgtttgacattgctttatggtttaaatatgatttaattttccctctaatttttatgtattctatttcatgtgcttaattacttttaattgcctggccatcaattaattattttatgatttcgatgcgagatctaagaagtgagtgtcgattatgctatagtaaaatagaattgaattttgatatattggacgagagtacctgtatggtttagataacttatagggtttctgtgtttaatgcttgttgcatgttaaatttatcacaaaagtagaaagtttgcatgtgattgagatttatatatataagaagactataaattaccttagtaaacctgctattgcataaaaattgataataggaagatattcatattaaggcataattcaatggatacaattgaaatcgaagccctagttttcattaacggttaatttccctaaattgtttctcctttcactgtttttattattttctagttttaaactattcttaatttttatttaaccannnnnnnnnnnnnnnnnnnntttaacgtacttaactacaatcttcgtgggatcgacctcactattagtgagtttactacttgttacgatacgtacacttgtgtgtgcaaaaatatcacaacataactttatctctactcgatgtagatcanctatagaggatctttgactatttgtattgaaacaatgggtaattcaaattacatctatttttgataatagagcgttctatttaataaagagttcaattctaaatttatagtagagtcagaaagaattaataagttagaaaatttacttgataaatttcatatctacttattgaaagtttgattacatagggtcatggtcccaaaattaaatgggataatattatgttgcattcttaattaattagttttaattattaattaattagttttaattaatcaattagaattctaaataagacttatgtcttgtttgtgaattttcaccaagaaatggcttaattgagaagaaaagagaattcaaggtttatttattaattaagagaccttgaaaggtctaattaataaatatatttacatagtaattttatttgataattatttataattattaaatatatagaattagtatttaaataactagaccaaaaaaaatggtattattaaagaaagacaagtttatttcattaaggaaacaaaataatggcaaaattctaactcatgggcttcattaaggaagtcggccatgagatgaattataacccattggatctttttaatcagcatattaagctttaaccttaaacttaatgaatccctataaatataaaagtatagctcttattttcataagacttcagtctcttttgtcagacaactagaaaataaagagagatcttcttcttcttcttccaatatcaaaattattcatcttctttgttgaataatttgaagtccatggtgattgagagtatgcccactcatatcaaaacaatacctagcatagtgtggaagactgtgtctaaccaaattgaaggagagaagatccaggttcagatcttaataatgctatgctacataaaggaatcaaggactagaaatctgaatggaatgagtcattattattccgctgccatcaatgtaaggatttattaatctcttatgtgttcatttcattattttagaaaattcatatttagaatgttagattatagattataatcaaacatacatattagtagatctaaatcttgttaaaataagttctgacaagtgcgagcagctggggtggtgctggtggtgtggagtagtcaacttggcgccttgtgcttccttagatgcactaggtgcatcgagtcctttggacccagggacggacgcagtaaagaaagtgtatatagcccccactaaaaaaaaaattagtgttaaaaaaaattaaata

SEQ ID NO: 126132 - DNA, 578 bp, Cannabis sativa
  modified_base (526)..(538): a, c, t, g, unknown or other
aaaaaaaaaaagaaaaatattagaatatgttttttttatgtactatgatatatgtatactattagatatgtttttagttatttatgttttaataatttatttatcttacacattatatcaatagcaattcctttacttttgtaattatttattcatttaaatttgtaggtcttatactttcaaatgtgaaaatataaatcacatatataaataaataaattgtggtaataatcatagcctaatagtactacataaagaggagatgcagctctagatcatgcattttatatttgaacaaataagatctattctattcaacttaaattattactaatttttctgcttattattgatttttttaattgttaaaaatttattttgaagtattttttattgaattacacctcttctctcaatttggctcacaaattatttatgtgattttatatttatttttcgaacaataaatgcacgagtcagattacgtgacacgtgattttgtcttagggtaaatactattttggannnnnnnnnnnnnaaaagttatcaattggaccctgtgttttgttaaatgacaa

SEQ ID NO: 126133 - DNA, 1028 bp, Cannabis sativa
tgtaggtaaggataaagcttggctggaggagcagtgagttggggctcggcaaggattatacatatcgcggcagtgcatcttgaaaggaatctgccttaccgtattttgagtcatattattattatcgccccgtggattgtaaaaaaataaatatgtatatataactatattatgatatatgtgtttttcaagagtggttttaaacttgggattctgactaagaagttttataaatataataaaatatgattgaatttcaaattagtaaattttcacgtacggacgttacaatttggtatctgagccatcaggttgttcactaaagaccgtcatgatatgtacaatcaaggcaagtgtcgagctcaactcacaattccgtaatttttttaccttttagcaaactatataaattgtgttgtatgtatgtgtgacatgttgtttaaaccctaaatgcggtcttggaaatatattgaccactgtttaacctatatgccttgtgggttcgctaggctaagtcctaggttatggatgcccaataaaacgttagaggacaaggcaaaacggttgacaccggaggtggtcggggtggtagaaattcccaaaacccccgtggatgcagcaaaagtagcggtcgtgctcaaggaaatggccaagagaattcaccataggctccattagatttggagtagaggatcacagagatggaagctataattcagcgacataatgaggaaattcagatgttgaaacaacaaaggtcgcccgtggtacctttaccccatatgccaattgtttcagttcgggagttaccagcggagcggagtatggctagcgatcaagtggaaccattgtataggggaaattggatccaagaatccccaatctttcaaggaaattctgatgtgatgagcgccttccagactagggaccctaaggaatttactctaaaacctcaagagattatgatggaaggtcgggtcaccactccccttattttcaattatggtggaggtggtagtggctctttg

SEQ ID NO: 126134 - DNA, 1222 bp, Cannabis sativa
gatattaggaatgtagtcatatattaccaatattattaagtatgtatttagggaaaaaattttaagattttctaagtatagaaaatcaaatttccctttgtatatttagtgctagctagtaaataattttttatgtaataataagtctaatttcacttgtaactttactcccatagtcacataagtaaattgttttgaaaaataaacaaattattgtaagttggaaaataatatttgcaacaatttacataattcagaggaattttcacaatagaaaaaaattcaaggatcaaactctaaaaaaattgtagttgaagagacaaaaatcatatatattctatatataaatcatgaaccaaataaatattttaaataataataataataaaatttatttttttattaattaattaattataattaagtagctgtaacattattgagccaagggaaattataacgtggggcaaatacccatgaatcccatcttttccaactctccaataacattttgtataacattgttttagaaaatctctactatatttaaaaatatcataagtaccagaaccattttgccaacttaaattacaaaaaaaaaaatgttgtccctgaaaaattgactctaaatttccatgagaaaacatcccaatggaatcacatgaattcccaagtcatcatcttttaacttacaatgaattgttaagtcaaaattatcatctaaatcgttgaatattttcactgttgttttgtataatacaatatataccaccccaattttctccaacaccatgattttgaacatcttcttcttgagtagttgtaagagttgttgttgttgttgaagaaataactaatgatgataatactaataattatgaaatgtatatgtgtatatgtaagtattgcttcttcatgtttttgggaatagttagggttttttgtatgaagaggtttttgagatgaggagatgtatattattgtatatgatttagggtttgtatatatatataaagaagagagaatatatatattactacagctaccaattgtccaattaatactatatatatattattattatatatgtttgactaccttcttcagagttttttgttcttatcatgactaatatataatatcaactataacgtctccgcttcaagccttcattgggcccttacacccacggaataatagctcttatacacgagtacgccac

SEQ ID NO: 126135 - DNA, 827 bp, Cannabis sativa
tgagttgtaatcttggactcattctattgtgtagtactggctattcctattcaataaagatccaccattcattcattattgagttaagttttctttgtcttatttcaactaagttcaaattttggttttagttttgatttgtgtttcttagatattactactgctgtaacaacttgttttgagggtgaggtttcaccacagctgggtttggagccattgaagacgattctccaagcttttaattaagccctcgtcattgcccataaagtttttttccaagcctgaagatatctcctagtattattaatattgcgaagaagagtagtagtggcatcagggacagaatgaggccagaccttctttatttcctcacaacacgaggcttctatagaccaggcttcgaagaagcgaaaagaatgaatcctctcttggcaaacatgtgagaatcttaaaggatgggggcatggtcagagactgaagttggaaaattaagaatacccgaggaaggatattttgagatccaatcgcaggagccaatggctctattgagtctttcgcgaattaagccacccttgaacctcatattttgccaagtaaaattattccctttgaagcgtagatcaactcctccagtgtaatgaaaaaaattcatcaatcgtttagtgtcacgatgcttgacgcttgctccaccaaccctttcttcagcattactaatacaattaagatcaccaatgaccaaccatggattggcacatcggttaactttagcttctaaattcctccaaaatagctctttatctttcaaactagatgagagttacgtggcg

SEQ ID NO: 126136 - DNA, 939 bp, Cannabis sativa
caatccaggagggataactaaccagctggaacttctttctaaggaaagggtagctatcctgaagactgatcctggagagggcatgatactcatcagggaacaccacccttccagacacgactatcattccacgagataccttctgggattgataacagtgagtgaacagcttcccagaaatgacgattgcggagattttttcatttagaggagctataatagaaagtattgtcaacctagcttaatatatgaatatgacgcccctccaattccaatttcccaagttcaataattaattacatgccgttttggtcattttcaaacagtaatttcaagtgaaccaaaacgatgtactatagtaatatatattggctttagttttcaaagttcaagttatcacaaatgaattaataataatgcttcaactgatataagcgttattgctttcatctgtttatgaatgaacatgcacctaaattttatgaaagagtgggaacatgtagtagtcggtccactaaatgactccatcgactatgactttcatttaccacttatattattatatatatggtgctgatgatctattatgaaattttcattgtatatgtacattaatataaatatttttcacacaaagcaaatccattacgaatttagatataaaagtttttttttttttttttttgtaatatttgagaatgaattgcactttcaagagaattacaacttaattaggaaaaaacttacttccaattacagcagctctccaaaacattagatattggctcttattttttatttttatttcagcatatagaaaaattataattataatagatatcacacatgtttttaaaattttaaatataagatttaaatagttatttgtatatctttatatattaaaagtgtctatctaacggcatttcttggtttaac

SEQ ID NO: 126137 - DNA, 1171 bp, Cannabis sativa
gtggctgctgctttgcaagaaaggccgaagaatttgcaccagccgtttgagattagaactgactgcaaggtactggttgatgcaatctcagataatggcaactcccttggtgacatgcagccggttgtgaaccaaataaagcgacaccctgaattttccctttgtacaaagttctgtcatgtaaaaagagtccataatgtaggtgctcatagcttagctaagagaagccttgacaaaaaattaacccattctttttacgattcttttccggattggttagccattgtttgtaaggttaacctctctcattctttgtaagtttgttggtgttgcttaataaaagtttttattcaaaaaaaaaaaaaattgtgagactattatacggatgaaattaaattcaatataattgtatctccatttgaattaattatttagagaaacaagggtttaggatcaaccacttgtcaagttgtgcacgatagtaattttatttatttattattttaaaatttttgaaagttaacgattaatgttaaacttaacagaaagaaaaaaaaaagttaacggagaaaaaaaataaataccgttaaaccaataaatgacgttagataatcactttttatatataaagatatttgaaccgatcatctgatcttttcattattgtttaaagtattaactaaaatagagaaatttatacaatacttaaatttttttttacgattttatgatatttttttttacattttaatagacgatatatattttttagagggaaaacaattaaaaaaatttacaattaatgtataaattaatacaaaaataacaccctattaaattaccacatttttgcctaaactccaaaataccccctcataaacctactctcttttctctttcccttttcctaaatcatacaaatttctctcttcaccatactcaaaaactttgctatttgagcagttttcggactcattcctagtggaatttgaataaatttctatgaaacaagtcttatagagataggaggcaaatgtcaaaatttcaaggttttaggaatgagcatgttattttaataagttaatactcgttcacaagattattattttcattaatggaactattcgataagtgttctattattgttcgattagttttttttttttttttt

SEQ ID NO: 126138 - DNA, 1110 bp, Cannabis sativa
gataagatatgatacttatcataccaattcagttaaatatgatttgcaactaataatgcaattgcatagtattaaaaactttgagatgattttatgacatccgatccttatacatatacatatcaaatgtaagagaaataaattatgtttttatgcccattttcttttctttttattgttaacaataaatcattaattttattttccttatatttttagtcctatcataacaacaagaactggtgtatgtgtgggcatgttaatgctcttagtcacatataattttgttcttctttctcaatgaacacatataaactttaattatataataaagagaatgaaagaaaaaaaaaacctttgataagatgaggcatccaattggtcaaaaaatgaattaagggcctctagtgaaccaaaatcatagaggcctaaaccctcataaagaggattcattagagacggcgccatgtaaccgcttccggttacgacgtcagtgtttctctgcttaatctcttcggggagatcaagcagagaacgaacaacagtcttcatttcagacattagaggtgtgggaattccatggttgatgatcctgaaacaaccccattcctcacaagcttccctcagtttctggtaagctttttctgaatctaataagtcttcaaactctctcatatcaatcactggaatattactcttactattatcactctcttccataacaatattaatcacttcatcattattctccatttttttttaatttcctttcaacactcttgtatagagacactagtatttatatatgtgtgggaaaatagcatgaaaagaatgtataaaataaatatgtaatttattgatttatttatattaaataaatatgaaaattaaaaatgtatatcagtattttctgtattttatttaatgtctaaaaactaataatatctttatatataaaatgtaattacttaaagaatttttgttggtttgccagaatatttaaatatttaatgtactatcgaatatactgatatatctctatctattttagtatttcaaataattttttagtcaaattttttctcatgatcatgtaaattatagttattt

SEQ ID NO: 126139 - DNA, 1392 bp, Cannabis sativa
ttgataaaacaaagacgggagcccatcctcttctggagcctttgttggattcatgttaaggactgcacgctccacatcatcttccataaaatccaacagcaaagactcattagttatctctgtaactctaggttgtacaaccccaagtacctcttccatttcctcatcttgcacccgagaagtagtaaataacccctggtaataattttccactatgtgttgaaccaccaagctatccgtttgccaaattcctactgcatcagttagtcccccaatctcattctttttccttctagccgaagccttatggtgaaaatacttagtatttttgtccccccattttaaccacattgctctactcctttgcctccaatattgctcatctttttccaacaccacatttaattgattctcaacatgcttcaattccttccattgctccggctgttggttcgtggacagctcatggagagtctttttcaacctatcaaccctctcattcatgtctaatttctttctcttattccaaccaagaagaactttcccaactttaattgttttcctcctaaagcttcccaccgaggcctccccccgtccttccaaccaaaagttagacacaatatcactacactcctcctcaccacaccaagcctcctcaaaatgaaatcggcttttcctccttccttgaccacatctttcaccactccccccacatggaatatccacaactcatgcacggtggtccgattcccaccaatccaatagctggacatcggcccccattaattgttgcagccattgcaaattacacaccgccctatcaagtctctccatcacctgagtcgaactatgttcattccaccaagtaaagtcagacttaacagaacaaaaatcaaccaattggcattcatcaagcactttcctaaaagcctccattgctgatgatctcctatctcttcccccacttttctctgtcaagctaacaatttcattaaagtcccccacacacatccagggaccatgcgtttcatgacatatatctcgcaaaagttgccaagaaaaatgcctttccgaagcctcaggatgtccatagaaccccgtaagtgtccacggcaaaaaaccttccccagctatttgtgcaattatatgtcccggagagcttgatataactctcacattcaaaacgtcctgccacatcaaaatcaaacctcccccaagaccaactctatcaacaatccaaatattagacccaaaatttaacacctctcccaacctctctgcttgcgtccgagtaagcttactctcggccaagaaaataatacttggtttaaactcacggatatgggattgtaatgctcttaatgtccaagggttcccaattccttggacatt

SEQ ID NO: 126140 - DNA, 1269 bp, Cannabis sativa
ctctctctctctctctctctctcacctaaacaaaatctagtatttacttcaacgaccctaaaaagagtgatgctatccctatgctaagacagagttggaaagatccaactgaggcgacctgtcgccacatgaaggatcaaactgacaggaatttaattcttgaagaccctactataaaggcgataaattagaggaaattaattctactgatccgaaaaaataatcatgaagacatgcctgttgatgatgacgctaaaaaggaaggcgatctagatgagtcagatcctgtggtcaccatggccaggaagttaaaaatatttaaagataaattatcattgtaagaacaattctctttgttgatgcacgaaaaaatggtgagaatggaggttataattaaagtcatgattgctacatgcaaaaccaatcatgctgccccgaaagataacactgttgggaaagttgatcccaaaaatcttggaacatacaatcctcataaggacaaaaggaaagaaaaagtaggcgagacttcaaagaaagctaccaatactgaacaacaaaagaattctaaatttgccagcaaaacctcaaaagaagaaggaaggaaaccatgcctcaaggaaaggtgaacaaactacttctagaggcagagctgcatagaaagacaaatttgatgcttgaaccaagaagcctactacctggaaggacacaaatcattgtatcgattgttttagtcaaagtgatgatgtcaaacaggtgtatccgccattagatgaaaaagtggaaggatttccacgaatgatctttggacaaggatgaactccaaaacagaaaaggccaaatggagaaagccaaacctctcacagatgacctaagaaaccatatcaatgattgcatttgtggaagagagtcaccagacgctacaaatcaacgtttgaagtgtaaaattgaagagttaacaaagctccgagaaaagatctttgggaagtaaaatggaactgtatcagactcgtaggatgaggatgtagaaccatgtgtgaaaagaataatagatgaatagtttcgaaaatacttcagtatgcctcagatggaattgtatgaaggaagaacagaccccagggaccaactatccaagtataaccggacgatacatgtagcaaatgttagtttctatggtccatataagagttataaaagcagaagtagaatttgataaaaataatttttatccaatatgaattataagccaaaggatctcaacataatatatat

SEQ ID NO: 126141 - DNA, 2490 bp, Cannabis sativa
gatgtttcgaatggaaaaatatgtattttgtaaactatgtaatagattgagaagttatgggttaaagtccagtaaatggttgagacaagaagagtcagttgatatgtttatgatgattttaggatatgaaacaggtaatagaatgattcaagaacattttcaacattcaggtgaaactgttagtagacaatttacaaatgtattagaaaaaatgagtatgtttgctttggatgaaatcaaaccacctaaattttttgacaaagtctcgtattatatatgaaataattcaagatattggccctactttaaggtaatttgaatacacaatcttcacatatatatatatatgttactacctatgaatctttaaatttattatttttgtgaaattgttataataggattgtattagagctatagatggaatgcatgttcgagtttcacttcccgtagataaacaaattccatacattggaagaaagggttttcctacgcaaaatattatgattgtatgtggatttgatatgctattcacatttgtgtaggcaggatgggaaggaacaacacatgatactcgtatatttcttgaagcattaagaaatacaaatctaaattttcctaaaccacccaatggtatgttgtaatcacttataaatatcaattacgtgaatgtgatctgaaacttaatttaaagattgtttattttattttattgcaggtaagtattatttagttgatgcagggtatccaaatataaaatgttatttagctccatataaagggcaaagatatcatcttcctcaatttcaacaagatagtcaacctagtggccataaagaagtatttaaccatgcacattcatcattacgtagtgttattgagcgttgttttggtgtatggaaagcacgttggcaaattttgcatcgaatgccaaattatggatatgataagcaagtagctattgctactgcttcaatggctttacataattttattaggaggaaactattaataatatagactttccgtgttatgatgaagcaaataaatattttgtagacgatgatgtacaaaatattaacttagcaagagatgagagtgaaatgggagttgtccatgataaaattacagccgaactcatgttgagataaacacgagtattagtgttatttttgtaattatgtaataattgttttaaatgataattatgtaataaattaaagattagttttatatatttttattttttaagaataatttttttaaacaagaaaaagaattatattattattattattaaatttgatatatatattatttgtaagagcttttatattttactaccaattactgggtatgtattcaaacttagatctagagtagtgttttggtgtagcaaaagacaaccaacggtgtctttgacaaccacaaaaatagaatatagcagctcaaaaaagtacatggttgatgcaactaatgaaggatttacaccaatctacagattctatagtgctattttattgtgataatcagtctgctatccgtctagcagagaatctaatgtttcatgctcgaacaaagcatgtggaggtgcattatcattttttcaaaaagaaagtacttcaataagtactggagatgcaccaaataaaaaatgaaaaccaggtagcaaacttattcactaaatgactcaatgttttaagaattcaaaaattaagagaacaactcgatatgaaaagtcgttgttgagggggagtgttaaaagtcaacacctaccttgaacattctagaaactttgagaaagattgagataaattaagtgctatctagaacttgggcctttaacataagcccaaagaaattgctagaaattttagcaaatttttagttggtcaccaccgaccattaacatctatatatatatggaccttgggtcctttgtagtgtgtgcacaaacaagtaaagttttagggttgtgttaagttgtgtgtgttttaaagtgtcccaattgaaagataaagtattttaaaagtgtaagttatatataagtgtgtagtaaaggtatttagtggcaaaatagaatgtgagtacttagtatattgtggtctaataaaaaaaagtattcaaatcttaattacttttattgtaataaaagtaattacgtttttacatattatcgtgtccaaagagagagatttgacaaattattttcagtcatgtttcattgtttctttgtaattcagattataatttaaaattcaaaaaagttagtttaaattgtctaaccattcacctaaaaaaaatctctaaccatttggatttctattatatttatttatttgatggagaaacaatcaagtaaatgatttactttttttttggctaagtaaatgattacttattagttattatcgttaagtaagattacttcttatagagcaagcaatccagattttttttttttttttgaaaaagagaaagaggccaatg

SEQ ID NO: 126142 - DNA, 934 bp, Cannabis sativa
cggttaaaaagatggcttggccagagagtgacctcagagtcactcggccaatgccaattacgaagggtttggccaaagaatagtccccagagtcactcgaccaacactagttacgaaagttattgggccaaagaggcaccctcagagtcattcatccaaggccaagtaaaattgtttcttgacatattagcacaaagtaaagttcaaccaagggaaaccccccatacaaagggagccttgtctctgagaaaactaagagggtcccacgcctcggcaaggcagatcccccaacttattcagtctttaagaactcttaaaagaattcttgtatagtgggggcaagtgttaaccctaaaaattgacagtgttgattttcgagattagtcaacaatcagccctagcagtcgagacacatcaattgcaagagtcggtcgaagaatgattgactcaatgcatatggcctaaggatcattaatctttgaaatccatgcttacaagtctcggggtacacccgtggaactcgaaggtcaaccccgtaacaactcatgagtagagttagtatgatcaacttactaggtgacaattgttggaggattttcgtaatgatatgtttagaattcgatctttctacaaacaaaagattcaaatatctctttcttatctttccagcgcatcttgaatcatccaattctgatgtatatcgagaaagttatggctgaaataataagacggccaaattgtgacaacttggtatgcaagctgacaactctcatgcgagctgacagctcccatgcaagtcgatgagctgttgttcgaccccctggatattttgcaaccccatcaggtgttgtgcaaacccatggattgttacgagagtcgggggcctttgagtgagtcgtggaacctttatgcaagtggtggagcatccgttcga

SEQ ID NO: 126143 - DNA, 1525 bp, Cannabis sativa
  modified_base (172)..(191): a, c, t, g, unknown or other
agaggttcagccccgagaagttcggtaatatcctactccccttaatttgtattgacttaagaacaaagaatgcaatgattccttttcttagagcttttacaaagaatacaaagaatgaatatgtattcttagacaagattttcaaccctttgcccagtgagaatagatcacnnnnnnnnnnnnnnnnnnnnttgagggaaaagtttcccttttgtttacaatggatataattggcaagattacacattaaatacagaatacattgattaggggatttggacagcttaccatatctctgtgatatgatcccaaaattatagggatttcttctgtgattcacgatgcgagtgttgaaattgctaagtgttggcatgttgttcagactcccactgcctggttaaggaggctttgttcgtgcaaatatatgtggtgttctgttcgtcagagtgccaaaaatgggataacatttgcccccaaatctgtacgggacttttgaagttgcgtgtagacttcatccgaactacctttgcactttgaatgggtgacacgtgctaggtgcgtctatttgcgatttcatatgaggctgaccaggcgtctcttcagttttcggctaattaatgctctgacttaattagtgcctcaaaacccagtatttcacatcacattttgacgtttacacatgattgcatttgatttccaaatatttgcttttaggacggaaccgatgcgtctaaaggcattttgaaaagattacctttttcaccactctgcctataaataaggctgagccttcctcataacttttcttttactaatttctctatcaaacaaattcagagcaaaaaagggtttttacttcaagtctgtcgtgcgattcttaccaaaggtatccgagcagctttgtctcgactgaacctagacgtcgaacagtgagtgagttttcaatctccctcttcttttttttacttttactttgcatgtttaatttctaggtttcatacatgcgttctcgacttgttgtagaagatagttagtaaatctaggctcaaaactttgtgatttttctctgtaatagtgtgtatagcttcacagttcacgacatttgcctttaatcgcacattgttcgtctttgaccttgctcatctgaagcttcgtgaaatttaaccctaaacccaaaaaatttcaaatttctgggttttgacttgtttttctacatttcatccttgtaatctattgagtacttctggtcggcatattttcctgtttattgttcgatatcccgaccaaacactaatctcatgtgttgtcttttgtagatgaaccctggtgagttttggggaaacgaacaccgaatcgactaggacttgcttcaacttttgcacgaagatcaacctcgtcattgtgccagttcgtcctcttcgagtgacggactttctaactcaagctttgaagattgggaggtgagtagggatcgttatcctactccagaatgttggattttgtgccctaaataaaaccctttaca

SEQ ID NO: 126144 - DNA, 2610 bp, Cannabis sativa
  modified_base (751)..(755): a, c, t, g, unknown or other
tttcaagcagaccaactaaaccaagtctttttaaggaaattagttgcttaatttccctatgtttaaccaactaaaccaaaacgtatattatgttcattaatattacttttatttaaaaatatgtgttgcaactacctaaaatacatatacttttttttagggggcgactgccccacctcgcttctatgtggctctgtccttgttcatcgagattgaaaaaagcttctcgttggcattcatggcgatcggcaaagcttctacatcgccggtagtggtgttgatttcagatttaggattgtttggagaagcttcaccgattacggagcagctgacttattttgtgaaggagaagaagtcattttgggaacgtctgtagagattgtgtttttgaaaagtttttgttttctaattttatttattttttcaaatggtaatataaaagtaaagtttagacctaataaatctataatagaaaaaagccctatttttaaataaaaaaaaaaacaagaaaaaatataattggctaagtatatgaagtgggaccaattagacaactatttttgttggcgctattggagatgtccttagagcatctacaatggtgatattttttttaaagggtgtcaaaaatctccaaaccacttaaaaatataatattttattttctctctcttctacatcattttttatatttttgttctaaaatattctaatagtaagcacatctaaagattattattattattattannnnnattattattattattaaatatatattaaataattaaattttcttattttatgacaaaataataattagaaaataattaaagagaacatagcaggaatggtattgtgagacatcaatacttaacattctttttcactctaatggtaatcatttattaaaagatactaaaaatatatccatgtcaccaacattcatattaaagttactcttaaatgttaagtttgagtaccaacagttacaccaatttattgacgaccccagataaaaaaatgagtttaaattgcaattaaagtcttttttttgcttatttgtactgcaggtccttaaattataaaagttttggcaagttagtcctcaatttttttttttgcaaattggtccccaaactatatatgttttggcaagtttattcccaaaccttatttttttggtaaattggttcccaaacttttattttattagcattattaagtctcctcttagatattgatatttttattattttttatttattttactcactttaatttattttttgtgtttaattcaaataatttttttttttaattttaatattttgataaaataattgtgttgatatattttatttatttatttattttaattttttaagtattagtgtgacatttaattttttaccaaaatatttaaaatatgctttattcatatatactattaataagaaaaaagagcataaacactgccaaacccatataatgtctagaagaaattcccgccccctcatgtttttatattttagcatttatagtatattttactactgatttataagtatataatattattattttaataatttttttaattgaatatacttattaattatttaaattttgcataagcactggtaaaattttatgagttcgtcgtggagtataagttaaaaattcattttataatataatttactcagtaatttataaaaaaaaatattattttagctacaaaatataattttactatatatatatagatttcatactaagttttttctttcacatattgaagaaatgatcctcctctaatggtagggaaaatacaattaaagaatttgaaaacttttattgacttatatatagtttttttggtgcatgcacattaactatttgatgagaagaaatatttgcttaaagtgcagaggaactattaaataacgaaaatattttgtccaagtgttgttcataaaaagataaatcattggttcacatgtatatatatagttttgtaatattcaaaatatttcttgatttgattttaaaaaaatacatataaataaaaaaatatattttatttttcttattttggcatatttaaaaaatgtcttgatttttattttggcataattaaaaaaaatacatataaataaaaagaataattacggcaaaagttccaaaaaacttcaggttgatgcagattagtttttaacctcaaaaattgacagtactagtccttaaggccacgttttatatacgtctattggtctctctttctaattgatcagttagatactaataaaatatcacatgtcaatttttcattggtttaaataataattttaattaaaaataaaataaaataaaaaattattctagaatcataaaattatttattttatttattttttaattcttcgttttcttcacctatcgccaatctaatcctcaccctaccccattcccagtcacgaccttcaattatagacagattcaaacacaaatacatattagaaaattgaacaatgaattaacatatcaaatcaaagccaaacaatcaaagaaaggttttttttttttttttttaaaaaaaccccaatt

SEQ ID NO: 126145 - DNA, 1038 bp, Cannabis sativa
  modified_base (33)..(52): a, c, t, g, unknown or other
ttcatatttagggtattaatcaacatacttgtnnnnnnnnnnnnnnnnnnnntaaaataatttccaacatcacattccaacaagctacattacaactatccatgattaagtagagaaagacccctatcttatttcacaaggaatgttttctttggaataatccaatctttactctgttgtcgtttgttctctgctagtttcttctcttgagcattagcagttgctggtttttttctctttaatttctgcttttttcaagccttcaccttcttccttcttattctcacatttctgacattcagccatagtatgtccgtaattagagcaacttttgcatttgactggcaaccatttatagtcaatattttgctccattaactgaacatgttcatttaagaaacgtatgaatcgaggagggtcatctgtgatttccatctcaacaaggactctagcaaattgtatccttgtacgctccttggtatgttgatcaactataataggttttcctattgtactgaccaaagcactcagactcctattctccaaatattggaggcctaagtcgtaatatattctgatccataatgtcaccgagtgaatcatcttaacagccttcaggtgagtcgtccagggccttacattaccagtttcctgtcgaattgaaggacccctacctccagtacttgatcacgagaggcttcatcattaaacttcaccatgactaatcacataatcattttagtaacttgcactatcccaagatatcctcagacatgctttaagaatccctcaaatattgaatttatatatatatatatatatgtagtgattttaaaattgaattgtaataaaagcgtgtctacattttgggatatttttttacatatgtacaatttaaactcattgtacatatgtaaaaaatatctttctattatcatatatatttaaattattatttaaaaaataaaaaaaaatatataatattttaaaaaaattaaaagtattttcgtaaaactaaaattataattaataataaat

SEQ ID NO: 126146 - DNA, 977 bp, Cannabis sativa
  modified_base (81)..(82): a, c, t, g, unknown or other
  modified_base (936)..(952): a, c, t, g, unknown or other
acatgaaaactacatgtaaacataaatgacttctaatcttctattaataatatatcaaattatattgaaatgtgttttatnnagggcataaaatcccaacagcaacttgggagttggagtcacatatgcgggaccaatatcccaagctatttaggtaactttcaaggacaaaatttttataaggaggggatagttgtaatatcccgaaaattaatacagtattgaagtggacatattttattaaatatgtaattattttggtattgaaataagattatgatcttacttagagtaattagggtgaatttattaaatgatttaattaagcgtaatttattaataacgaagattattttagagtatgtgggtatcgtggataccatttctgaaattaaatgttttcgggcccgacgatcgtggaagctcggcggagtggttagaaatgtcacaaaaataaaggatggattattttaaaaatattttggactagtttagaattttgggttgtcgagttggcggaatagttagaattaccaaaatggtcttttattaattattaggttattttgccctaagtgaaattttctaggctaagatgaggattaatattgaatatatgtttaagttaaattaagtgttatttttgaaggaaataagatataacctagaaattcaagaaaaatagcataacatagctctttctctctctctctctctctttcctccggctcaagggaacccagaagcaaaatttgagattttcttcaattctctgtttaattcttgtagcaaacagtcttacattcaacctagaatcttgaggtaagtcttcttcttatgttaatggtgattttctaggttttttaagctaggttttgttagttgtctagggttttttggactgtaggtttagattcttgggttttatgccctaannnnnnnnnnnnnnnnnataattagatttacttattaatata

SEQ ID NO: 126147 - DNA, 2134 bp, Cannabis sativa
aagatcaagaaaactcaatttggtaagattcccaagttgtgaaggaatatttccaacaataggatttcctgaaagattgagatatttgagtcttgtaatggcacctatgaacttggggattgtaacaaagtcattgttactaagatccaagtgctctaaatgttgaagatcaaccaaagaggatccaatttgaccacttataggataccccattaaaccaagatgatgaaagtaattataatcgaaatgaagatcaagtttgataatatgattagttaagttattgcacctgattcctctccatgcacaacaatctttgcttttgtttttccaagaccataagaggtttccatcatcaacaaggccttctttgaaattgagaagagcatttctctccctttctatgcactttgcttgggaattttcactactcaataaatgagtagcagctagtaagaaaaataaccctgcaactttcatatttaaaaatacacaaaagtacatagtgagaggataaatatattactgagttagttggctgcctatatatatactaaaagaatttctttgttagggaaaaactggcattgttattggggccaagtgatctactactactattgttattatttttattttaagacagtctattaataattgttattttcaaaagtaaaatggtggtggaaattggttgagctagtatggtagtaatgcattaatgaatggaaaaagaaaaagaccattgacttagtcggctagtggggtagactctaaatttaatttcttcaactaaatagaactctaataccaacccctacaccaagttctaattagtccaacttaaacagtgacacatggaaaaacttttgtccaatggcgtgcttcttttagtttggtcgggattcagtcttggttgtattaattaggcatgagtggtgttagagtttcttacacattgtagggatattataacagttattaaataaaagtaggaaaatttgcctagtatactaatttttgttatttttttataaaaatacagtgaggtggtattttttatttttttactatatatttttataagtttcatactgcagtatactgtgtttattttttagtcttttttggtttattttagtgttgttttagtgttgttttactgttgtttttcataatttattttttaacgtcgatttcactgttcttgctccaccttgttggaattaatgattattttctggattctctcgtggtgctatggtggttttatccgtggatgtgaaagatgaaggctataaaatatagtttttcttcattctctatggttattttgtggttattatttttttttattttagttatcctaaaaatacagttaatgagttcactagaaaaaaagttttgaggtgtatcgttcttttatgtttttctaagtggttatctgcttattgttttacatttgtttttatgttattttagaagttattttgttctgattttataagattgggcttggaaatataactgctattgcaatggatattgagactgtgtagaacattttttagtttttttaatcatgttttcctttcttttgtttgatttgttttagtgttgttttaccatgattatttatttgacgccgattttacttttctttttctcaatctcaccgaaattaatggttgttttccgattgttccagtgttcctatggtagttctgtccgtgggtgtggaagatggaggcctcattttttttagtgtttacagtataacagaaaaaaaaatttagccaagacagtataaaagtaatttctgccgtgcgacaatatttttgtaaaaattgacccaaaaatcagtatttttgtaagttttccataaaaatatcaatacatacttacacaagggcccatttggtaatagttattaaataaaagggaaattctatttgcaccccactattaaaaaaatataaacttaaataatttttaaaaattaatcttaatatttttctaaaaaaaaattcctcacactatttctcgtaaatttcaacacttattttgattttattttcataattttttctaactcatatatatatatatatttattttttaagaaaattttata

SEQ ID NO: 126148 - DNA, 2146 bp, Cannabis sativa
ttaataaaatatgtccaattaaacataatttatattttttaggatattacaactatccccttcttacagaaatttcgttctcaaaatttacctcaacaactcaggatactgctcccgcatctgcgactctaactcccaagttgcttcttcaaccttgctatttctccacagtactttaactagcaaaataatcttattctaaaacactttcttcttctatctaaacaagttgttcctcctatgataagtccgtctaaagctcaatgtcctcataaactcagaatatgggtcattttagacacatatttctgaagcattaaaatatggaacatgttgtgaactctagataaagcagggggtaaagctagttaataggctacttgacctatcctttacaatattttgaagggaccaataaatctaggacttatttttcctttctttccaaatctctgaatccccttcattggtgacactcgaaggaaaataatgtccccaacctagaactcaatatctctacgcttcggataagcatagcttttctgtctactctgtgaggcaagcatacaagctcaaatcttctcaatagcctcactaattctttggactgcattgggtccaagatatctccattcaccggcttcatcctaatgaataggtgaacgacactttctcccatatagcatttcatacggagccatcttgataatactttgataactattgttataagaaactcgatcaaaggaaggtacttgttttaagaacctttgaagttcaatacacatgctcgtagcatatcctcaagtatctaaatagtcttttcagactgaccatcagtctaaggatgaaaagttgtaatgaactttaatttagtacccatagctcgctgtaaactctcccagaacttgaatgtaaaatttgtatctcgattttagatgatcgattttggagcaccatgaagccgaattatctcattaacatataaattagcatactgatctactgtatacgtagtctgcactggtaaaaagtgtgttgactttgtatatcgatccactattacctagataaaattatagaatcttgttgtccttggtaacccaaccacaaagtccatggttatatccttcaatttccactcaggaatctttagagattgaagtagttccgctggtctctgatgttttgctttaacttgttcacaagttagatattttgacatgtattccactatatcacccttcacacctagccatcagtacaatactttcacatattgatgcattttagttgttcctaagtgtaatgaatatggtgtggtatgaaactcatccagaatctcttgtttgataccatcgtcgactagaacacaaatcctgtctttatagcgcaataaccaatctgatgaaattaagaaaatcctttgttgatctagcctcaaacttctctttatactcttgtaacattggatcactttgttgggttatcttgattctctctagcaaatcagactgtaacgtaatgctgtctaatttcccaattacaaacttgattcttgctctagtcatatccttagccaattccggtgagatcttcatcaatttctaaacttgttttggactttttcgacttagagcatccgctaccatatttgctttcctaggatggtagaggatctagcagtcatagtccttaaccaattccaaccatcatcattgcctcatattcaagtccttctgagtgaaaaagtatctgaggcttttgtgatctgtgtaaattttgtacttttttccatacagataatgatgccaaactttcacagtaaaaaccattgttgccaattcaatattgtgtgtgggataccactgttcatactccttcagttgcctagacgcataggtaataaccttaccagactgcattaaaacttaacctaacccttgttttgaagtgtcacagtaaatcacgaatttctcatcactaatcggcaaggtcagtactggtgcagtaattaactctacttcaactcctgaaagctactttcacatttgtttgtccaaacaaacttacaattctttcgagttaattctgtgaagggcgtagaaatcttagcaaacctttccacaaatcttctgtagtatcc

SEQ ID NO: 126149 - DNA, 1122 bp, Cannabis sativa
attctttaactatgagctctctctgttgaattttatatgtatatatacatgagtaagttggataccaatatttattggtggatggtgatagaaattatgaataagggctttcactcgaagaaaagttgccactgttaagtaaggtaaatcgtccttgacaatataaattatatatcttgtaatcatatttcttttaaaaatatattacatttatttcttgggatgatttgcttgtaatacctctttctaagttcaattttttttcaagtgcatttggcattaaaagtaaatctttttacataccttaagcatgagaatatgtgtgataatatacattgatgtactttattatcttcaaagcatatagacttataaattttgacataatatttgtagagtcttaatctaattaagttttatttttttgatcacattgactaacttagtagattaaataagaatcttttaaggtatggttgatgttttcttttgaagctttcatgatatgtttatatgtataatatatggtcgtggagttttatggaatatatattatatttacacttcattgcgtgatgaaatatttataattgtagttttagctctccaagtttgatttcttatacatctaaaagtgacttctcgttattgtcttatattttcatcagtgttatctcataattcaacaaataagaaggtagtgacaactatcaggtatgtctaccattgctccagctatactactttgcaattgacatagtcatttgtttgaaaaaatcttgcttgtcgactgttatagtttttttaatactctgtttcatgataaaatctaagatgcatgttgaaggagatgttagaaagaaacaatcaattaaagtcatgacaattaaacatgttaattaacaattgatgcatattttaaatttaacatttaggtatcaggtcatttgagttgattgaagagtgcatatataatcactaaaacttgaaaactttttttttttattttttttttatttttttttttgaaggaagaaacttttttatttagtggagtttcaatatattatggtgccgtttggtaacacttttgttttttaattttataattacaaaatgaaa

SEQ ID NO: 126150 - DNA, 576 bp, Cannabis sativa
ttttttttttcatttttttaatttcttttttcatgaaatgattttattgaaaaaaattatatttttgttcacattgtatacattcctttgtcattatcaaacaatcacttagcctctgtatggttaataatttttgtaattttcactaaaaaaaagagaatttttttttatagttttttaattaatattttgcaaatatataagcatttaacatttcgtttttcttttcaattttatataatttttttttctttcataaatttgcaaatatatatttatataattgtgctatatattgataataattatgttggaggttaattttttttttctgtttatttgtttatatattttttatctttgttcattatttttttttttttgtccttcaattaattaataacttttaaagagtctattacaacgtataatatacaaatttatattgcatagataactatacgtatttttcaattagtacatgtctttattcaatacaaagatctttatcatatagtgcgcgcgactttgaatttatatcacttaagacatgtattaaattcttttagaattttt

SEQ ID NO: 126151 - DNA, 897 bp, Cannabis sativa
tttaggatattattttataaataacgtaaatcttttagaaaatatacatataattttaaaatattttagaaaaacatttgtacaattttttttattttttatttttttttataaaaagatagatgaattactaaataaaaaatttgattttgtggatttaattcgtgcctttattttgtgtttaagtgtcgtgctttcatgttgtgcttttgtgcttgtcgtgtcgtgcttaacaccttatattttatgtcgtgccgagtcccatatttatttgtgttgtgcagtgcaacatccccctttgggtggtatgtatcatgtcatcaagactagggcgagagaaatgttcttttaagtgtctacaaagatatataacatgctagatgcaataataaataaacaaggtaaaacttgcagtacaggatggacgaatttgacttggtcggagagatttaatcaacacctcatgcgacccgaccagaggaaaacgcgtgagatagattcattaaaattacttttccattttatatgtaatcaaattctaatttcaaagaattcccatatatattctcacggtttaggaaagtcatttattttctatttttatagtttccctataaataatggaaccattccattatgaaaggatccaaaaacatattttcaagagagctattacgctgttcaaattcctataaatgctttcgagagagatcaagttcttctttcgtctcttctcacaagttaaattcaacaaaaaaggaagtaagctatgggttgaacctctatacaatctcttgttcttagtttatgcttgatattaaactgttgtaattcaacaacacattaattcaacatgaacaataccaattcaataactataaacatcataaaagaatg

SEQ ID NO: 126152 - DNA, 723 bp, Cannabis sativa
ttaaaaaaaagtgttgccaaacattatttttctagtagtgatacctgtcaatattgttagcctaattagcacttaacgttgttggtggtaacaaatgtaacagaaaagtaacttgtggtatttaatccgtcgaaaaaaaaatataatataaaagtgtataaactcgaaaaatataaggtctttatactgcaaatttccctatataaaatgtggacgtctgcttattctccagtaaaaaaactttgttctttcttttaacttaagcctcataaaagaaaccttggctaatccaaaatcataaacttcacactcattacattatgacatttacataaaaagttcatttaactaaaacaattgtaaactcaaatttcatattcaccacataaaaatcataaaaacttatctagacattcaatccttctctctccctaagctcgtcgctcatggcagcctaacctcgacgactgttttctaaccacttatggtccaaacgaacctcagtaccagaatcctagagcctcaaatgcctagatccgcagacctcttcctagatctacttgatttctctctctcgcaaagttccttccttcacgtcttctctgccaaaactccgacctctctctatttcttctcaatccaaatctgctactctataatataagaatatttttatttaaggaaatatatttctatataaagaaataaatttctatttaagga

SEQ ID NO: 126153 - DNA, 1053 bp, Cannabis sativa
ccactagagcccaaaaggaagtctctacaacatttgtcaatggccgccgtgattttttgaggaagaaaaaacaaacccatccaataattcctaactccaaggaaaactgaatgaatcagttgagccctcccagcaaaagagaggttcctacttgcccaagtgtgcaaatgtttatgcaatttgtcaataatgataccacaatctgcagctcgccatttggtttgtctaagattcacaccgaggtacttcaaagggaagaatccctcctccatttgtaagatattagcaagtctctgtttgtaggaagtagagatacccccaaagaacaccgttgatttggccttattggctacaagacctgtggcctcactgaataaaaggaaagcctctttcaccacttgaacagacttatcattacccttgcaaaagataatgagatcatccgcaaagcataagttgacaaggcctagtgatttgcatagagggtgaaatctgaatcccttcttcttagacctctgaataagaagtcttgtcaaatattccattatgagcacaaagagaagcggggacatcgggtccccttggcgaagaccttttttacccttgaaagagccttgaattcttccattatgcattaggtcataagaggctccttgaagacaacttaagatccaggtaataaacttagaaggaaagcagagagcttttaagaggttagccacaaagcaccaatccaccgtatcataggccttgctcaagtcaatcttcataagaagagatgctcttcgtagtgtaacctttaagaagatcctgcaaaatcaacacattgtgagctaacatccttttttcaacaaaagcaccttggttttcatgtattagccaaggtagaacttccgagagtctggtacatatcatcttcgagatacatttgtaagttgtggtacaacaagaaatgggtctgtagtcgctagctccttgagggttatcaatcttggggataagtgatatggaagttttattcacttcctgaggaagcttaccagattgaaaaaa

SEQ ID NO: 126154 - DNA, 3114 bp, Cannabis sativa
gtctatccaaacaaacctcacgaccaacatcaggtaagacatcgagtatacttggaatattacataacatggatttatacttatcttagtgcttatctttgcagagatgactttcctgaagcaagctccagtcctcaaccgaaaacctaaggctggaactgtgacgacatctcctatcatcccgcagaagaggaagagtgaagtcgtcgcaactcccgcagctgactcttccaagaagcaggtcagacctgctaaagacaaggggaagaaagtcatgatcgaccttgccgttagggctcgcgactttgtgaccctccaagatagattcgtgagtgatgagttcgtgtcgaaggtcgaggcagttcccgccgaggaaatgatgtcactttctgcagaactggccacgcagttcatgaccgtgttctcgagggcattcgtccctggctccaaagaaatcaaccttttaaagaagcaaaacactcttcttcaggagaacatgaggaagatgaagcaagatgcgacttctagggaaaaggacatcgagaacctccaaaaagccaaagagcaggcggagaataaggccaacctttctcagtcgcgggttaaggaattaactcgcgatctggagattgaaaaggaaaatgggaagaaacagtacgaacaagctgtttctgactatatttatacgaccttatccaaaatgccagactttaacttcttcgttcttggagcggaagcaactgagatggcggaggcttttcgcgccatgtcgcctactcaaactcaaggatgcggaggaaacctttttcctaaggaagcggagactgctgatacggaggaagtcgttgatggagctgccaacaaggtcgtagatgactctactgctccaacttcttaatttatccaagtttttattattattattattaattatcgaaccttttagcggtacacgagtactcgcgttttgtacttgggacaaatttcaacttgctttctttttgttttaaacaatatatatctgtcttctttaagaagtactggggtactcgcatattttacagacttgtttaatctatttcacaatattattatagcttggtgtaataacttaaaaatgctaaaactcgcaaaaaattttaactttcgagaattcaataaaattttcattataacagtaatcaatagtacaaagtggttctatggtaggctataccccctatacttagaacatttatcaaaataaattggctaggtataattacagtgcgagtactattgataataatactttaagctttcaccattccaagcccttctgatcacagtgccatcgagttctgaaagtcgataggtttcattgccaattttttcagcgataaggtatggtccttcccaattatcaccaaaaactccatgtgctgggtttcttgtgtttggcatgacctttcgcagaaccaaatcgcctactcacaaagtttgctctttgaccttggaattaaaatagcgagcagttcgttgctgataggccgcattctttaaagagcctgaatcacgcttttcttctaaaagatcgagttgaagaaattgattttctgtattttaactaaggttaaatacatctctccgtagagatcttgccccaaccttgactgacaccatggctttgcacccataagagagcgagaagggggtttcaccagtcgtggatcgaggagttgtattatacgaccatagaacttgtggatgttcttctagccatacacatttgcattcttcgagcttacccttgatggtatgcttaatgatcttatttattgcctctgtctgaacattgctcggtggatatgcgactgctgaaaatgctttcttaatactcaactcatcgcataggtggcacatttccttacaatacaattattttctattgtcagagattaatttgtaaggtatgtcgaacctgcagatgatggcactgtatacaaactcacgcaatatagcagcagtgatagtagcaagaggcttggcttcagcacatttcgtgaagtaatcgacagcgactacgacgtattttactcctcatttcccttttggtaattctccaatcaaatctatgccccagaccgcgaaaggctagggacttgtgatttaatttacctggctgggtagtttgtttacatatgtaactattcgctgacatttgtcgcattttttagcaaaactagatgcatctgctcgcaatgtcagccagtagtacccttgcagcattatttttaaagcaagggaattacccccagcatggttgccgcagattccaccatgcacttctcggagcatatacccgcattcggtcccgtcgatacacttgagcagtggctgactaaaacttctatgatagagctgatcgtcataaatgacatatcgagcagctcggtatcgtagttttctggcttctactttatcttatggaatgactcctgttttcaagtattattggggtcatccaggtgacctctttgactatatcaacctccatcacctcatgtcgactaattatttgatgagttaacacatctacaggaattacatcgagtaattctgcttctcttgtcgaggccaaccgggccaaagcatctgcatgagaattgtgagcacgaggtattctagagataactatctttttaaatttttgtagtaactcactagtgagggtgagatatttggaaaaatgacctcctctggcaaggtattccccattcacctggcacacaacgatctgggagtcgttgtaggcttgtaagtactcgattttaatctcaagagcgagttttaatcctccgattagagcctcatactcagcttcattattagatgcgggaaattcaaacctacgggcaacatgtaccttgaatttattgggacttatgaggattacaccaccccttggtccttcactgttggatgccccatcaacatacaaagtccatcattgtttggtacgtcacgatcaactggctcttccgcgataatggctacttcgtcgcttggaaattcgagtatgaaatctacaagggcttgtcccttgattgctgatctattgacaattggactatg

SEQ ID NO: 126155 - DNA, 718 bp, Cannabis sativa
ttttgtatttttatagaattttacgtagaaacttctattaaaactgagcaatttaaatcgtaaccaaaattcgtatagcaacccacatagaaactaacggagaaatcattttagaaatctaaactataaatttaaaaaaaaaaattaaaaaatagtatctaaggtaataatttccctaaaataaaaataatgatgtttagtaattaatattaaaataatctttattaaaactgctatatatgtgtatcttaattagtttgtactacccttttcaaaaaaaaaaagaaaaatagttcctagtacgtactgatgattaattaattaaatatataattaaacgagaggagtataaactaattaaagtaaaattaagagggtattataaatgccaactattaatttgggcattaaaatttgccaactaattttatcatattaattttaatatattatttttaaaataataatacatttctatatattttgagtaatgtgcagtctttaattttgtaaattcgatatttcctatctcacgtcctgtccaaatttctattcctaagtcctaaccacattatcatgcaaaattatggtcattattaattaattaaggtcatggattagtatatatagttaattatatatttatactttagtatgtatatctttatatattaaaagtgtatacagaatattctgttaaatttaacgattaggtttg

SEQ ID NO: 126156 - DNA, 1249 bp, Cannabis sativa
  modified_base (1173)..(1218): a, c, t, g, unknown or other
gatcgttgatcgctttgcttcgggaatgcctatgaggcatcctgttcggaccataccgtccgagcagatactcaaagttgatttcacgtgtcaccatcaagtgatggcacgccagagtgtacaaattgggataacacttatatataataacgccaccgcatcttatgtctatattgtatagacatcatgtgttacacttacacgtctatcctatgtatatttaaggccttaatagggtttgtctcaatttgagttactgagtctaacctaactatgccttagtcgcatagcccttatcatttatgcataagctatgccttaattgcataacatctatcatttattcataagctataccttaatcgcataatccttatcatttattcacataatttatttaagacatgcctaaccatagaaattttagggtaataaccctaacacatttccacataaatatacatacatcatacaactgcgccattgcgctatactccaagtgcttagttcgatgtcttacttaaattctaaagtatgaggtgaattccaatccacatgtgattcacataatagggttaatctcaaaatcacatcaaatatttattcacatttaaaactccaaacctacattaagtaattgagctcgtcataatctttccaactgcataaagaacgtccaaaatagattttagagtcaaaaattatagtcaaaacaagtttcattaaatttttcctttgctgaatgcatgaaggtcgcggtgctcaagaatagagttgtggctcctaggttaaaaacactgatttgagtacctaaaaaggtaacaaactcaacaccaaatcaccatatcattctcacttaattagttgtgttatgtagtggtttccaagcctagattagagtgtaatgctcacataatcatgattaatgcacacataatcaaactcactaatcacataattcatgaaattaaaacattaagaaacccaatccaaaatcatgctcaaatttcactattttaatagtaaatacacaaggctaaattgacttaaaactcaaaatatgcataacccaaaaatcagatttcaaggttagcttaaaattacaacaaggttataacacaaaaccttaatttttcatgcaagaataatccgttgggttttatgccctaaatnnnnnnnnnnnnnnnnnnnnnnnnnnnnnnnnnnnnnnnnnnnnnnaaataacatttaatgttgcatgcttcacatg

SEQ ID NO: 126157 - DNA, 1005 bp, Cannabis sativa
actaagcgggctttacaattagttccacaacaaattgagtaaaaataaataacacataatacctcataaaccagttataattaaagaaaaaagatgtggatcaattctaaaaatattgaggcataaatctaaactgaaccggttccataacaaaatatataaaaattaataacacacaacagctcaaaatataagataaagaaactgattaaatttatcaacaagttaaaaatttgagacgaaaaaactgattccctaaagtaacaaagataaaaatttacacaaaaactagtaaaataaaataaattagttagaatttggttccttaaattaacaattaaaatttgattctcgaaatatctaaattgaaaattagttccttgaattaattaaattgaaaatcgatttttgaaataaatagaagaaccgtttcttagaaataactacataaaaaattagatgaaacataaattaaaatagaaccgattgcataacaaaatgattaaaacaaataacacacaatatcataaaaatcaattttattaaaaaaaaaaagacagaatcagttccaaaaatactaatacataaattaaaaattgaattggttcaacagcaaaattaataataataaaaaaataactcggtttcatttttcattacctttgcgaacatttgtgagcatgacaaaagccaagccactttacttagaaatcttcttcattaacatgttcttaccaataacaaatgtactatctagtgtcgattgatttcgttgttgtttccttccattatgcccaaaagagtatccaatacaacatcgttcctaatagagtaagaacactccttttgcttcaacctttggttgataattcccttaataagctctatgtgacgccccgatattttgccttattttacaaaaatactattttcatgcataatttgaaaagataaaaaaaataattcaaatacaacagtggattttaaaaaaatcaaaatgcaaca

SEQ ID NO: 126158 - DNA, 850 bp, Cannabis sativa
attatactcttgtggtaaatttatatgagattaattttcaaaataaattaaaataagggctagaatgttaaaaaaaagtttaatatccaacatcttcaatggtatagaatttggtgcgtcattaaagtgtaattgtgtgaagatttcacaccaatttagtgaaatggtacactattggaaatgctgaagctttttatacgatgttagaatttgagagttaggttaggaagctttttataccatgctagaatttgagggttaggttaggggtcttatggtatatagacttcttttttcctttgtaaggagtcttattatatagatttgttagttgaaaaaggaaatgtgacgtgttactacgtcgtgtacagggaatgcggcacacattaagacagagagagtattcctttatatagcaaattatgattatggacggatttatggtctccattcactttcacagtagttcatcaaaccacagagagaatcttcttgtgctataaatgagagagaggccatgccaatggcaatgtacgtagacaattacctaaccttcttttgaaatggcatcggcgaagagcaagatcttgttcattggcggaacagggtatatcggtaaattcatcgtggaagcgagtgcaaaggctggacacgacaccttcgtcttggtccgtgaatccactctttccaatccggacaaggctaagatcatcgatggcttcaaatctctgggggtcaaaatagtccacggtgatctcttcgaccaccagagtctgctcagtgcgattaagctggtcgacgttgtgatttcgaccgtcggccatgctcagttgcccgatcaggttaagat

SEQ ID NO: 126159 - DNA, 869 bp, Cannabis sativa
ttagacttcctaaatctacctgtgtttctattcaaagtttgactgccgaattctggtggggctctacttctgataagaggaaaattcactggaggaattggtctgccctttctgcctctaaattctttggaggtttgggttttcgttctcttacttctcataaccaaccccttctggctaagcaggcttggcggatctggtctactcctgattccctgctccattctcttcttaaagctcgttactttaagcatactgattttctccatgccccaaatggccacaatccttcctttacctggagaagccttctttggggttcctaactcctcaaaaaaggtctcatctggaaaatctgtttaggcagtgatatccctatctctgctcctaattggatcccccaaatctcccatccaaccattcttcaacccattgaatcttctctcgccactgtttctttttttgttaaccctgacaggacctggaatactgaaaaactgcaccagtttcttcctacctatcaagccaatgttgttctcaatattcctttggatcttggacccactgattccctcatttggggctttcatcactccgacattctcacagtcaattctgcttaccaccttgcccagtccactgccttcaccatttctccctcctcttatgatcctaacccttttaaggattggtggaaaaccctctagactttgaaccttcctcctaaaatcaagcatttcacctggaaggcttttaaccatcttcttccttgtgctctcaacctcttccacaagcatactatcccaagctcttgccgttcgttttgtgggggaagtgcagagtcggtctctcatgctcttcttcactgt

SEQ ID NO: 126160 - DNA, 678 bp, Cannabis sativa
ggtttatgttgaaaagtctgatctggtttttccatggtaatatctcggctgttgctgtgacttgacatagtccctgggctattttctgtgtcattcacattagatttatgagacatgggagattgagataaatcagtaaagtttgttacctgagccgagttttgatcattaggatcaagtgtagccgtggcagtttctgagggtgcttctccagggacttgtgagttgacaatggacttcgaatttttgagattatgatgcaaggactgaaacaatgttgaccatgagggaacactcacacacacagactgttctggttgataattgttcaagaatccagaatggaaaggaaagtcatcttcattgaagattacattccttgatatgtacatcctacccgtggagctaagacacttgtaacctttgtgagcatcactatacccaagattaacacatttcacagagtgaaattggaatttatgggtttgatatggtcttatgcacggatagcaagccactccaaaggttttgaggaagttgtagtccggtttcttgttgtaaacaatctgaaacggggactgaaatttcagaattggtgttggtagtctattaattaaatagacagccgtttggaaagaatcccaccaatacttgagaggcatatgagcttgggcaaga

SEQ ID NO: 126161 - DNA, 847 bp, Cannabis sativa
attttgacacgtgtgagcatgaaaatcgactatgaattttaatttgcactaatctaattcatatatattgttgtgattacacttagaagaagaagagttatttatttatttatttttttttataattgaagaagagttgtctgattatgaagaacaattaaccatggagaactacagcaatggcagaaaaatcattcctttctttgttaacaaagtcgaaaaccctcaaaaccacaaagcaactccattcatttctctacaaaaacgctcttcaaaaccatcctttactcttctccaaactcctcctccactgcgccataaccatcaccggcaacggctccggcgaagaacagcctctccactacgctcggcgtcttctctcccactcatctccaaacccacctgatgctttcatgtacaacacactcattcgaggtctaattgattttctccaaattactgtaaatacctttatggaaatgagattaaaacccttatcatctcccattgatagttttactttcgtttttcttattaaatcagctgctaatttgagatgtgttaggtttgggattcaacttcattgtcaagctttgattcatgggcttgatacacatctttttgttgggacaacactcgtgagtatgtactctgaatgtggggttttgaattttgctaagaaagtgtttgatgaaatgtctgaaccaaatgttgttgcatggaatgcttttcttaatggttgttttaaatgtggtgatttgagaagtggtgaagagttttttgaaatgatgcctattaggaatttgagttcttgggatattttgcttaatgggtatgttaagttagg

SEQ ID NO: 126162 - DNA, 940 bp, Cannabis sativa
tatatatctacatataaaaaatttgatgtttatatttgagtgagggctttagcccacatatgggctaaagtccctccgtccctgcgtatatataaaataaaagagttgcacgtacaacatacaacttgtattaatcatattttcaacgtgttaaattttttcaaatttatcaaaattctacaaaatgttttaaataactataattttcacgaacataaaaaaaaattgactaaaaaaatcttccaaataccgaaacaaataagagtatatcaatacactattttttttaaaaataaaataaaatatcaaaacactatttttaaaatagtgcatttgagattagttttgttgtttattacttcccaaatctcaaacacaaaagacttagttagtttaacctctttcacaagacatagttagctttacaaattaagcaaagcaaagcaaagagaaaatagtttagagttacagagtccttacttgcacgaaaacaacagtgccacgtgtcaaccaatcagaataataattcagattccattaaacaacaccacacgttcgctgccgacgtcatttaacacgtgtcttgttcctattcgtttgtcctgtattaaattccaccctcagagtcacagtaatcgcttatggataaaatcatattagatagtgggccccacacctcgagaactccaaacacgtggaccactccacgagccatctgatgcgccgagcttcatgagttaatagcttgacacgtacgctttcacccaatcattgctcggtttttagtcggctcggctcggcttgtcgtttttggtttttggttatttatttggcttggcttggcttgcgtgtgaagttggaccgtcttaagcgctccgtataaagttttacctcattatgacaatttattttgtcgttttgtggcttttttttttttttt

SEQ ID NO: 126163 - DNA, 932 bp, Cannabis sativa
aacatattaaatttttttctcatgctgcatcaaaatagtttttctttctatttcaaaataaaatagtcattctaattataccaaaatgatggaaaaattattttattggactaacatttcaatactttaaggtcatatttgcttacaaataaaaataaaataagaatagtaataaaattaggaatagaatctaatggaatatttattgttttgtttcataaagactatgaaattaataagagaataagaattactatatttaggattatatggaatggaatggatttttattattttgactaaattatcccatattcttctaaaatgaattttgatttatcaataccatcattttacaaattaaacaaataaataattgttgacagtggaaactcgtcaactagaaaacagtcaaaaaatcaagattcaatataaaatataacaaaatgaagataaataccaagaactttaaagtaaatctcagagctttagaaaagaaattgtttacaccaaaagtattcctgatgatgtggacatcaatatttgacacgtggcaagaaagatgaaatcttggagctgagtagtcccgagtcatagcaagtcaacctgggaggagtccatagtcctatgcccaagttgacttcgagaactctggagacttcgataactatctaactcactatgtttcagtattcagtaccatgaagacatggaacaactaaatccaagccttggaagctgaaaatacatgaacctacacaccgatagtcaacctgggtacctaagggtttcacctagcaccaaggtttacattctcaaccaagggtttagtttttgggaccatcttaatgcatatatgtcaaactttgcattgagacatgaactagacataccatagacatatttgaggcattagaatcagattcggagaa

SEQ ID NO: 126164 - DNA, 1321 bp, Cannabis sativa
atactacttcggaagaatatttcataggagtcaaatccattaaaatagacaacaaaagagttgttaattttgatacttctttgttgtccattaatgccactgatggagttggtggcactacccttagttcttcagttccttatgccgttttgcatagttccatctataaggctgttgtttccgattttgttaagaaagctgctactcggaatattaccagagtagcggctgtgaagccctttggtgcgtgtttcagcactaaaggggttcgttggacgagagcgggacccagagtcccgactattgatttagagttggaagggaagaataagagcgtgaattggagaatacacggtgctaattcgatggtgggagttaataagaatgtgatttgtttgggatttgtggatggtgggttggagccaagaacttcgattgttataggtgggattcaattggaggataatcttttggagtttgatttgacaacctctactcttggatttacttcttcacttctagttaaagacacttcctgttccaactcccaattctaggctcatctttaaattttcaaaaaatgtcatttttctttttatgcatattctctttaattattatggtagcaagtttattgtcttttgcaactattttgtttgtaattttttttttacataatcatggcttttttttttaaaaaaaaaaataataagctaacttcactaactaacatccttcaataacaaggataagatatgagtcgtaacattccccatactaatgatacaaccagttgtaaaacaaaatgctctagcaatactatgagcgatatcatttgttaatcgtttaataaacttgacagacatattatttagttgagatatcgaaaccttacactcttgaataattaaaccatatggagatacatattaacattacttgcaattgcagaagccacattcaaactatcggactccaagatcatatttgactatcctttttgtttaatccaactaaatacctccttcatgccaatagcctccaccatgttccagttcaaaatcctctttgagctagattggatagcttcaacaaaatccctttcattatctcgagccacaatatcatagccataatatcaaacattgtcaaacatagtcccatcaacattaaccttaatcattctcttttgcggtttcctccactgctcctgactctcctccactgctcctgactagggatgcacacggggcgaggaatgagcggggagtgctctccccgtccccatccccgttaagaattttaatccccatccccgccc

SEQ ID NO: 126165 - DNA, 509 bp, Cannabis sativa
aaaacatttctattgtggacaaggctgtgttaatatcatgttaatatctacaagtcaattggaaatttcttaatcaaatttcttttcgctatttttctctcactttcataatctacaagacaatagaagattctcatctcctattgatagactaaggagattgtgacaattgatgctctcaaactttgttcaggtttccagtccagcaaaactttcagggttcaacaaacagttatcataggggtgctactacccgaaaaaccagagcgtaacaaatccgtaatgcaaaaatacattcaatccataatgatcatattgcttggagaatttgatagggactgaaaagggtaggaatagagcgtaaccatgctctggtaaggttctataatatccagtggttaaatattcaacccttttactttctttaaccctcactctcttcgtctatttatttttttacctcaattgatccaatatttgtcgcgcctacagcagcaattgccataaac

SEQ ID NO: 126166 - DNA, 809 bp, Cannabis sativa
  modified_base (746)..(767): a, c, t, g, unknown or other
tgtgcgattggcggcaatggctggggaggttatcacggttcataacttagatgtctcaagaatggtggcgaatggctatttcaggttccaggtctggatgtcaattaaaaaaccagtatgtccgggatttcctctcccgtgttcggggaagaagaagtggattgcatttaagtatgatgagttgcctttcatgtgtttcaagtgtggaagaatcggccatagtctcaaatattgtcaccaagaaccaatcacagtcactggggatgataatgtcacagcttctgcatatgggatatggttgaaagtggagactgacactagagatggatttcaagatagaaggttgggacaggggaaccacattgcacaagggaacagggcgaatcaggagactctgggattggcacaaggagtcaaaatctctaattcctttgcttctttagatgagactacaacaagtgtggagaaccaattaataggaatttcttccaagaccgaatcattgaaacaaaatgtagaagtgggacaaagtttaatggcacaagttagtaaagaagttccaggaggtatggaaaatgaagtggataaaagaatcggtgaggatggagggagagggaagaaaagaatggtggaagaccaaggaattttgtggcaaggaaagttacaaaatactatcaatccttcatccttagaaactcagacacacaatctctacaacgttccaattgttggatatattttaccannnnnnnnnnnnnnnnnnnnnnatgtttcattaacatcctaataagaattctaaaacaatgaaa

SEQ ID NO: 126167 - DNA, 873 bp, Cannabis sativa
agaaagagatccaggttcatatcttaataatgctttgcgacagaaaggaatcaagggctgaatatcttgaacagaaggagtcattatattctgctacatctaatataaggttttctaaactcttatgtgtttaatttcactgttttagagatattcatggtccattgttttatgaactcaaatctttgattcttagtggtgatttgtataattgatgaattgttgttaatggataagttgaataccttgttttatgattaatatactattttggagctttcggataggtttggtgagtttttggctcgaatttggggaagaaacccaatgaattctggtctgctagaaccggtcgaccggttggttctagtgcatcagaactgctcgaccggttggttctggtgcaccagaaccggttgaccggttgtcctgtaggggaaattcaaagttttcttcaagttttgttttagcttgggtggtacctagtatctgatttaggttgattatgtgttgtatgacctatgttggagctaatgcagggtagggttgtccagttacgggaattagggtttttttcccagagttttgatttaagatatttatacaaatttttgttatcgtgacataggacggggatcgccctgctttgtttccactgaggtgagccggcacgccttattttttgactatggtaagaaaaagtgatacgcaccacttatggtcaaatgattaatgattatgattgttatagtgtaatatcccgaaaaataaataatatttaaataaacatattttattaaatctatagttattttagtaatgaagtaagactatgatcttgcttagggcaatcattgagaatttactcaatga

SEQ ID NO: 126168 - DNA, 2090 bp, Cannabis sativa
  modified_base (591)..(607): a, c, t, g, unknown or other
tatatatatatatatgttacttttggggtcaatctcaatgtatgtatatgtaatcgatcgagatggttacaattattgtacaaaaagcttgtaacataaagcttttgtggtctttttagaagaccatacgaataataatgaaacctttcactttatttattatttatatattcaattcttttttatttatataatataataataaggctaattatttttttgtccggtttttctagccgttaattttttttttttaaattattgaaattgttatatttaatttttttttttaatttcattcaattttattaattcggtgattgtccatgtactaaatcatgctccctgaattttgatatctactaaatcataattgtcccttgaactttgacatgtgccaaaatatacccctgaactttcatctatattattattttcttattaaaattagacaaaagtccttaaatctaacaatttcaatagttcaggaaaattttttaacagtctttaaagtttaggagacatgatttgatacatgtcaaaattcaagagacaaaaatcttaaataacctaataataataataataatnnnnnnnnnnnnnnnnntaataataataataatgagataagaatgttatctattccataaatatatttatttttcttaaaaaaagaatgtaatccatgcaagcgtgcctctcttttaacgtgcaaagtgatagattattaaaagtcataaaattagggtatatatggggtaacaatctttaggggttgaaaaaagaaaaaagatagttattgggagttggatcaatatcaagataaatagagttgttatttgaccatctatgcctcaaaatattttgaaatttgagtttttattaataaattatataagctactagcttaaaagtattctcattaagtgctaaactaaattaaaaaaagaaaattataaattttatgagttttatagtttttgtgtaaatatatatatttttttttcaaaaagattatattttgtaggaaaattaaatcaaaagttaaaaaataaaaaaaaattaggtaacgataaccggttactcttatggtaactaaataggtaatcaattaccataagaaggaaaccaagtaccttatgctgtttttttttttttcatattttttaatttttttctaaaaagttttgataaataatgaaaaaaaatcatattttttacaaatttatattttaaaccataaaaatgaaaaaatttcaatacaatgtgtaaatatgttagctagtgtgagaatttgacatatatacatacatagtgaattaatgtatttgtgtaaagatgatcctaaatgttatttatgagtatgtcggattataaaagtataatatatattgattttctaaatcgatagtataatttaatgaaaataaaattaattcagccataaaaaaacaaattataagagaaaacaaatatgatcgggagagttctatcttatataatagtcaaataataataaaattgtataatcatcaagattctttttcttttcatatggaaattacgtacataacttaaaacacaaatatgtaattctattttatattttacctttaagggtaaaatagtgaaggattatcatataccaatatgacacttttatattagtaaaaaataatagtatttgtttcctaaacaaaattttgaattagaagacatatgaaaaactttaaacgacaatccagtgcagcttgccctatttttgagtcggccctagattaaacgggcacaacaacctccttaaatccaagctaatgtataataaatcatgatatcatcatttaaaatatattttagggataagttgagaaatatctcttttttatatccattaatcaaaaataatcttatattttatttcattaaaatctacccacttttatgagtgagttgtctaatatattgttaccttccactgaagtgtagcacacgatttacatttataaaaggggtataataggtacatcatctataaaagtgggtatatctcaaagaatatggaaatgaaggtaaaaattaaaacaaataaa

SEQ ID NO: 126169 - DNA, 1798 bp, Cannabis sativa
aaccactttagaaacacaaaccgtaaatttgaaaaaaaaaattaaaaaaaaatatgtacggcaatttcccaaaattaaaattaaattttgggacctttctaaaaatatatataaaaaaaatatattaaaaaaaaagtatctttggactcaaatccccactattattatataatgtgtcatatactccaactaattaagttataaatatttgttatttaaaatatacttaattttacttaaataaataaacttttcattctttattttgtacttccaaaaaatgtgagtgctaattataaacttaacccacctatatttagggacccttgagtacaccattttaaagagttgattttatgtagaagctcccaaagttttacatcatgataatcaattattgagcaatactattactttctccttttcaaaacatctatccttttcattttctttttctttttctatttttaataagaaagaaaggtttcttattattatttcatttggagtaaaacttctcaatctagaatttagcaagcaacaacaaaaagatatggagtatctatccaatgcaactctgaatttgagaatattcatacacttactttgtatttttgaaatttgaacagttaagggactgtttgacttcataacttaaaaattgttttcagtttttaagaacataaaatagtttttaaaaactaataggaattgtttggtaaaattttttaaaaactgagttttaaaaaacatcaaaatgttgttttcaattttcaaaaactatttttttgtctcatattatagtttatatttttgctcacatactcggatcctagacccggacccgaatgggttcatattatggtatggtgttgaaaatatttaattttttttaataagaaaaaaattaaaaatagttttaaaatatatgtgccaaacaccattaaatttttaaaataacaaaaaactattttttattctcacttttaaaaacacaattttaaaaactgaaaattaaaaacacaaccaaacaaactctaaattctaattcttttttaatattatagtgtaaatttatatatttaaattattctacctttggttttattttttatttttttttaaaaaaaaataaattagtttacagtaaaaagaaatagttttcaaataatttgtttcacgtgagtatagaataaaaaaacatacttacaataaattttttgaatcttattttggtattctaaattatttgaattttttaaaaatttataaaatattctattaaatatatgtgatatatatacactgttatataaataatttataattatttctaatttttttttaaaaaaaaaccattgatacacttatttttaagaattatataatataatttctctaatatatatatactttttttaatatcaaaaagaggacaataatgtgtctttccaaatccaacactatcacttgaattattatttttttctaatattttatgtccttattttttgacctcataattttgagatagatgacgtttttttcactacaaatcacttgtccaataatatcctaacgaagctgatttcttttttgtttgtttttgaggaaaattatgaggtcaaaaaataaggacaaaactgaaaaagtctccattaattttgataagtgatgatgacaatattgatattgatgatgtctatgtctcccattcaattgcatgggacaacttaatttatagaaaatattactttaacaaattcagttacctttttttctaaactaaaggcacatt

SEQ ID NO: 126170 - DNA, 1149 bp, Cannabis sativa
gagagagagagagagagacttaggacagagaaactaatggaagaaaataaagaaaacgcagccattctcaaacatcaaaaattatataaataaacaaatggaatattttaatgttcgatcgaggaacagtgtgtatgattaagatatgtttaattacaaaaaaaaaaaaaaaaacttattatatgttatctttcctattcttattaatatttgtttataatttacacaaaagttgaagttcttctataatactacttttaactgtgagtaacgttgttaaattacatgttcgataatatgtgttgaaaaagaaaaaaccttaaattattattaacaaatattgctttaattatatctgtcttttaacacacgaaagaagaaaaatgagattagtttattaattctatgtttatcatcttaataaacactaagaaagggctattgtatcgcattttttttttttgaaataagaaattttttaaatcaaagattaattgttacaaaagaaattaagaatgtcgaaataacttttcctattgaactactaattattgaatgcagaatgatatatataacaaaaagcatcaccaaccaacaactaataatttgctaacacatcaataacatggtgatacaaaaaattattcaatttcctagtgacccataaaagcacaaaagttgaatcataaattttagtactagtttatacaagaattttaatttagtatgtatgaaatttaagttttcatgataagatacaaacgttattaaaaattaaaaatattaaaaaaacttaaagagtaaatctttctaatatttttgcgtaatttttttttttttcgaataataattttagggagttgtttagaaaaatcaaatattttttataggtgttgttataatataaatacagtagaacctctattcaagaatactctatttaagaataaattctaatttgttataaaaaaatcgactcacaatttgagtcaattataaataagaataacctcgaaattataactagttatacattttcttagtctcgtactaaccaagtatacctctatataagaataattacatcttaataaaatatatacatatattttgtaaatttatttatgtaattaataattttatttcaaa

SEQ ID NO: 126171 - DNA, 503 bp, Cannabis sativa
  modified_base (470)..(472): a, c, t, g, unknown or other
tttctttctgaaaatattttatttggattcattgtgaaaaattaagaattttgtttttttacagaactcgattccgataaaaattgcaaaagttatgaattttggaagtttcgggttgaaacaaggtcgagatagggtgcaccgcacgcacagaccctcagacaaggtagatccgcgtgcgcacgtgttcggatagccccctgtctgaactcagcgtgtagcccctcgttcagacaacacccgcccgcgtcccccctgcagttgaccaaggtttctcggtcagggaggctggaaatgctgagttttctcagcgtcactcactccctcgcacgcgcgtctcgactccttgcagccttcctaggctgcagtcgcgtagcatcctaggcagtaacctcacccaactcaatttttgtaggatttttttcccaaatttcagatttttcaattttcaaaccctaatatctaattannntattatttttatcatttaaacctaaatatca

SEQ ID NO: 126172 - DNA, 719 bp, Cannabis sativa
tctggctcaatggtttcccggaccatcagtacgggcaggtgggttgcaacgttgtaacattgtctcgcctccccctgatttcctctcaccgttcctattccaactattacaatgatttttcaaccctctcacatatgagaatgtgaaatttataggctttaatagcttgaggtagacttgtggtttccaagggacaagttggcatcatggtactgtgacctgcaagtgcaggaagtggtcttgcgccttgtaccattatctattgttaagtgatctcgagttgcataggtagtggccgatgtgtaccctttgtcgagatttcaatcccttcatattaaaaaaagattggaaaaaatgacaaaataaataatctaaatatcaaaataatccttaaaaaaatatttatactaaaaaagatattgtagagagtttaataactaatttcttctttttggtaaatatttttttggaccttgtgttttacaaaagttattaatggaccttctgttttgttaaatgacaaaataaactatgtatttttcaaaatagtaaaaataagacattaagcttaatttttgacaacacagagtccaaaatagtatttactcatttcttttccacccttctacctttattcctaatcctttttagattctccatactgcttactattagaatatttctaattaaggaaataaaataatattattgattctgat

SEQ ID NO: 126173 - DNA, 1536 bp, Cannabis sativa
tttttacttttagtcacaacacttttattgtgatcaaaagtaagatttttttatagtgattagtcagctctaaaagttaactttgtcaccatggctattatactatttcccaacagttcctaaaaccgttggctatgtgggtgtcataaaaaagcggaactttaaaagatggtttataactgttgagaaaagtcactttaaatgatggtttacaactgttgcgaaaaattactttaaatgacagtttataactgttggtaaaaatattatataaattaaattaaattacttttttgatatatattttttaaatattaaatatgtttaataatatttattttcatcaaaaaaataatattaattaaaataaataaaattaatatattcttataattaacaatatatacaatattattttaaaaaaaatacaattcaaaataaataataaaaatcaatactacaactttttctaaatcaatatatcataatatctaaacaaaaaattgtaataatatcaatattacagatattgttctaaaaaaaaaattacaatggatcttcttcaaatcttaaagcttctttgagtttaaacccatcatgaaccgatctttatggagaataaaaatgggtttcacatctgaatcttcttctcctgttagctatggttgccacaaacatcttccaacattcaacagccgaataatctcaaccattcatcaaacctcaaatgtaacttccaatagccattaaacatatactcttacctggagaccctctttcaaagcaaggcataagcaatgagatgaccaggaacaacattagacagatccagatctttatcatcaacatcaccgccatcgtcggagggcttcagcattgctttgataactcccatgtttatggaggctaaagcggtgacaaacagaacgcccttcaagcaccactgtcactgctagagacgacgactcaactggacccgtcgagatcgatggactttgttaccgaagatgactcgtccgagaagagagggagcagccccggcgataaccctgatccaaccttcattgtgcaagcctgtcgccgtctcttccaccaccccctgcgcaaagcctgtcgccgtctcctccaccgtccctgttcaaagagtcgtcgtctccttcgttgccccctgcgactgagagaaagatatggacgtttgaaatgtgcggctgtgttttaaattaggtttttgtctttagggttacacaattttttatatgtactctatttcattttacccaaattaattgttttattattttttttatataaaataaagtaaaatcttatacattttaattttatcccaattaattattaatttattatttatctatttaaaataaaataaaatttaatagtaaaagagaaattttatttataccccaaaagtttctaaaaataacatattttaataattttttatgtaaaatttatgtattaatttgtactaagtattttttactttttttttttttctaattcatattcttaaaa

SEQ ID NO: 126174 - DNA, 1990 bp, Cannabis sativa
  modified_base (1926)..(1926): a, c, t, g, unknown or other
gcctatgctagttagggtgttaaagtatcgttgccctctcatttagttttggtagtttttaggattaaacagtatttaggtcgatactagggttcaggcaatacgtaggttttttaagaatctccaactcaccacattcgggtttgataactttctctccagggattgggatttctttctgcttgcagcaatgtcccactctggttcaagaatttatcatccagaagatttagaatttgagtttcctacagaattagccatcccgtataaacccaaccactcaaaacccacttctaaattagagttgaacaatgctagggttagggaacacctagtgagaacccactaggaagataatgctagtcattataggcatttcttgcaagaaatctccgaaggcaaacgtcgattcttgtgagatgcagcctggccagaacctcccagcgtgtcctttattcctttggcaaagcctttgtttttacccaaagtcacgattgcttttgaaccaggtgacttggactttgaaataatgcctcccaagccacatacatcaatgactcccaggaccccagagtaacctttgaagctgagttgatagaatcgaaggtgcgatctatctcaggctacacatgtgatatactaaagacctgtggaatcgaacttgggcgatcatgccaaattaggtctgtgggagagggtgagttcagttattccccccttgcgcgcttttcaagcagtaccccaagggcctgtggtgagactagtaccaatggctcgactggcataagcgcttggagcctggagcatattagtgtagggccatagtccctcttcgagactacttcaaggattacataaatccccttggggttgccccattccagctgaatcctatctcttactggattctcgctagttcaaaggttttgtataaaattctgaaatgggaatgtcccgcaccagtacaatttgagtatatttattcggttaaggtcgttccagcgaggaagaatgccgccgggggcttctattatcttggtactcattctagcgagcctaaaatcattgtgatcttgccaaacaaagtgtcattcaaagacaacttcttttggacatctggtctttccccaatcgacacaaccacctttcccagacttcgtaagtgattattttcgtcttgctcagttggatttatccttgtccttcaattttctgacaaatgttttgtttgttttttacagctctcttgatgaggcccttccctacccctgagatggccagtcgagacaagggcttgatgactcttccttatggccttaagtcatgcgacttccttttgaacgagcccaatctgagatcgatgggccttctttctgacaaggaatatacctgtgattacaagtttctcaagtattcttcttggcagcagatcaccgttccagaggaggataaggcttgggatcacgtggcttgagcataatatcttcaaaacactgcccctcagaagccggtgaaggagcgtctcgaggttatcaatgtggttggtctcccacagtacttagggctgaacgtaacacattagtcaccttccgagactcctgccttaatttttatatttgggatttccttctcatagattgagttgctcataagattgacagctagtaccctagattccacgtccagattaactgtcatgagtcatattattgtatagttgagaaatatgtccctatcgcagatagggcaagtcatatagacgcgagttgggatacagaacccatcgagcccttggatatattcaacattacaggctgtagggattttagtggatactatggcccttctaccccttcttctagttatagctcgccttctagtgacttcagtaaatctcttaggtggaatatgttgggttttatgccntaaataaaactctgtttcaatgtaatctatattattcaatatcaataaagtaacataagtattt

SEQ ID NO: 126175 - DNA, 1122 bp, Cannabis sativa
ttctgaaccattcgagcatcatcttattaattaggatcttctaaaccaaatagatttaaataaaataactaataaattaaaatatacttgtaataacttaaactttaaaataaaataataaaaataatatttttacagtgaatatttaggaaactatatataacttcacaatatataatctatatttttcatttataattttctttaaaatatcattattacatatacatgggatagtactctatctaaaaagctataatttataaacatgtatattacaaaaaattaaaaaaaaaataaaagacaatttaataaaataagattattattaattattaataaatacagtaaaacctctatttaaaaatattttatttaagaataatttttaatttattataaaaaaaattaaatcttagactagctataaataagaataacttaaaaattataattagtaatatatttttcattctcgtattaaaaaatatatatttatataagaataattatatcttatatacatatatatatataaaattatcaaaaaatactattaatactaacaatttcagcgtcatactattattattagtataattaattatcaagttttatatatatacaataatcatcaactaaaaaaaccctagatcattatcgaaggagaaaattatagtattgatcttcttaattgatgccaaaaattttctcattcccacatcaacgtcttcttctgtgaagggttcaagagcagtcgtctgagagtggttcggttcggctcaacgacgtcctccgtttcaaatttttattttttatttattaatttactattattagtttaattctaattaatgtttttatgaagttagaattatatggatttcattccttaattaatctgatgtgatcgtatttatgtgttaaaatttaatttagtttttccattagtcttgtcttttgacatggttctttagtcttgtcttttgacatggttttttagtcttttttttttagttttttctattcgagtcttgtcttttggcatgagttgtatagctcagaattatcatggtgatatggtagaagcattcaaggaggggaagattggatgtgttcaac

SEQ ID NO: 126176 - DNA, 2652 bp, Cannabis sativa
  modified_base (42)..(43): a, c, t, g, unknown or other
  modified_base (1781)..(1789): a, c, t, g, unknown or other
  modified_base (2475)..(2477): a, c, t, g, unknown or other
ttttaattaatcacgattttcattaatctcgttgattagcanngagctgcacagtatgtttaaaataacgttaacacgcctatgctagttagggtgtttcacctaaactctaaacccaaaaccatatataccaaaccataagccctgaattctaaaccctaacacccaaaccctaaaccctaaatgcgaaaccctgaaccctgaaccctgaaccctcaaccttaaaccatgaaccctaacctctaaaccataaacgctaatccataaaccctacaccctaaacccaaaaccctaacccctaaacactaaaccctaaacattaaaccaaaaaccttaaaccctaaaccctaacccgtaaacaataaactttaaacgctaattcctaaaaactaatccataaactataaaccctaaaccctaaacacgaaacccctaaactgtaaacacattaaccctgaaccctataccttatgccttaaagcctaaaccctaaaccctaaactctaaatgctaaacccctaaaccctaaactcaaaaccctaaaccttaaaccttgtaccctatactatatgcccaaaatcctcaactgtaaaacctaaaccaaaaacccaaacccgaaaaactctaaaccctaaacaataaacattaaaccataagccctagattttaaaccctaaccccgaatccctaaaccctaaatgcaaaaccgtcatccgtaaaccctaaaccatcaaccctaaaccataaaccctaaccactaaaacctcaacgctaaaccctaaaccctacaccctaaaccaaaaatcctaaaccttataccctaacccctaaacccctaaacccttaaccttgcaccataagccctaaaccctaaatcctaaatgcaaacgctaaacctcaaaaccctaaaccctaaactctaaaccttaaaccataaaaactaaaccataagccctaatttctaaaccccaaccccccaaaccctaaaccctaaatgtgaaaccctcaaccctaaaccataaaccataaacattaaactctaaccgctaaacccaaaatgttaaaccctaaccactaaaccctacacccttaacccaaaaccttaaacacgaaaccctaaaccttataccctaacccctaaaccctaaaccctgaaccctaaaccataaattctaaagccctaaaccttatgccctaaaccgcaaaccctaaacaataaacctctaaccctaaacactaaacccctaaactctataccctaaacgctaaacccaaaaaaaatcgaaaccctaaactcaaaaccctaaaccctaagccctatactgtagaccgtaaatcctaaatcctaaactataaaccctaaacccaaaaccgtaaaccctcaaccctaaaccccaaaccctaaaccctaaacccttaaccctaaacttaaatccctaaaccttaaacactaaactcgtcaaccctataccctaaatcgtaaacccctaattcgtaaacccctaaaccctaagtcgtaaaccatacgctaaacccctaaacctaaaacaacaaacccaaaacccaaaacgctagaccttacaccctaaacattaacccctaaaccctaaaccctaatccctaacacctaacccctaaacactaaaccctaaaccttaaacagtaaacccttagccctaaaccctaaatccaaacgctaaaccctaacccctaacccctaacacctagaccctaaaccctaaacttaaaacctaaaatctaaccctaaaccctaaaccctnnnnnnnnnaccctaaaccctaaaccctaaccactaaacactaacccctaaacactaaaccctaaacacaaaaactgaaaccctaaacgctaaatcataaaccttaaaccctaaccctaaaaccctaaaaccctaaaccttaaaccataaacccgataccctaaaccttataacctaaaccctaacccctaaaccctaaatcctaaacccaaaaccctaattcctttacccaaaacctaaaccctaaaccctaaatacaaaaccctaaaccttatacctaaaccctgacccctaaaccctattctctaaatcctaaaccttaaatcctaaattgaaaaccataaaccctaaatccaaaaccatagagcctcaactctataccctaaaccataaaccctaaaccctaaaccttaaacattaaaccacgaaaccttataccctaaaccattaacccctaaaccctaaacactaaacccttaaaccctataccctaaacccaacaaacctataacccaaaaccctaaaccctaaaccctaaattgtaaatgtaaatcctaaactgcaaaccctacacccaaaacccttaaccataaaccccataccctaaagcctaaatcctaaatcctaaacccaaaatcctaaaccttaaaatgaaaaccctaaacctacaacttgttggaatatgttttaccagnnnctagatttactaccatgtatatttaacatcctaaatacgaatctctaacacaatgtaaataaacacatataaaaattcaaaaatcttacagtgggtgcagcggaataatagtggctccttccactcagatctctaacccttgtttcctgtctttagcagagtatcaccaagatct

SEQ ID NO: 126177 - DNA, 619 bp, Cannabis sativa
ttaacaagtaatcttcagagaaaatcgtatggattcgtttattctagagaaaaaatcgtatggattgttatttgttaggattttgaagaagggattgttaaaaatcctacggttagatttacctattttagtgtaaattatattttgttattagtatttttattaatacctattattatataatttccccaacttaacgtctaaattaacgtgaatagttaaagttaacggaaaagaaaaaaaaatatgttaaaccaagaattgtcgttagatagacacttttaatatataaaaattgctctcaaattacatttttaatcaaattgttaaaaagtattaagtatatatcattatttacaaataaattactgttgaattgttgagtaaaaaaaaaaaaaaaaactgttgaattgacgaaaatttaacaaaattaatcactttttaaatatgctcatcttttatagtttgaaggatttattacttactagattgagatgttaatagggttaattcaaataatgatctactttagtcatcatataataatgggtaaataccattttggaccctctgttttgcaaaagttatcaattggaccctgtgttttgttaaatgacaa

SEQ ID NO: 126178 - DNA, 972 bp, Cannabis sativa
ttttaatcaagctagttaatatatatttgactctactgtaaaattttaataaattcttaatatatagaaagaagttttactatcaaatattttacttaaatataattagttgttacaaatattatttctaatcttgtaattatttgttttagacataaggcttataaataacttgaaatacatatataagatggcgttacacgcattaattatagcttacatatattgatctatatgaacagtattgatctatatgtgataatgctagagggggaggtcatatataattaagcggcctctataccataaaatagatttttcggggaatacaaaaggtaaaatcaagtccaaaagaaattttagatcatactagacactttaagatgcttggcattacacataaatacacaaagtaaaaatttaattaattatatgggtaattgaatttgatacttggaataaataagatatataagatctcatatctctgcgcgcgtgacatgattgtgttcaaattaattatattcatgatcatcacgagattgaaatagttgaatgctaatttccagaaatatatataacagatgataatgatatatatcatctaggtatatatagagatgggaatatataggaaagtgatcatcgggaccaaaagccaacttaaagatatataggtcatcatctaataagcatccagtgcgacgcggaagctagtgacgcaaaaatgtacagtaaaacctttggaccacaaaagtacagaggaataatatatgtgcattcgattaaaatatatattcatagtaattgtaaaaaaaaaattcatttaattacatttattaaaattaggtctgtactattttaaatataatatgacattaatgtatacaccgtcaccgtgtaattctataagtattctttagatccacgtacatgtgaaggagactaatatagtagttattattggatttg

SEQ ID NO: 126179 - DNA, 810 bp, Cannabis sativa
attttcaataacctcgttgattagtaacgagctgcacagtacgttaaaaatcacgctaacacgcctttattagttagggtgttacaacaaacatatttgaggcatcgtaattagatttagagaactttcatttttgagcacttggaatacccgatgctcgggcaccgagcacccaggttgacaatttgtcaacttgggccacttccaagcatcaaactagaaatatgactcatgcatcttctttgtcttcatcaaaaatggggaaacaagttctttcatggaagaaacagacaaacttagggaccaaaataagggaccagcgcccaagttgacacttggaattagcccaaccccaggttgacatttttcaactgagctaatttcgaggagtttcttcaaaaagtctttagggctattctctgttttcatcaaagattaagattcaactatttttgagaaataaacaaaattgtctaagggccaagaactagacccagcgcccaggttgacaactaacactgggcccagcacccaggttgacatattgtaaacctaggttgtctccaatcagtttcctaaaaaagtgatcatgaatttttttcgtcatcagaattaacgaagattaaagtaaactagaggagaaaacgacaatcctaaggcatgaaaattgaccccagcccccaagttaactggtgatgacccagtgcccatgtaatatccagtttaaaatagtatttaatttttcgtttggatattaattgtgcgaggataattaattcatttatttgtgttgttagtgagttgatatta

SEQ ID NO: 126180 - DNA, 636 bp, Cannabis sativa
atagtgattcttattttatcttattattttgtacatatatttatagtgtgaaggtgattatatatataaaaccactataatatagaactactatatcacaaacacagaaaataaattttgtcacagattaaaccaaataataatttatatcataaaacccaaagtaaaatgctagcttgagaaaacaaaacacatttatattcctggatattgagttattttttgctagtaaacccaaagtaaaaatctacatatggaagagtgagagagggactaatagagagagtcagagctaagcgggcgctgctcaaacgagataggagagctgagccgaaagagggtcatcaatgccgtccacactcgagagaagagagccaaacaagagcttttcatgcacaaagggattcaagaggagagatgaggcggaaggagggaacacgcagttcaccaccgagagagagggcggagggaatcaaaaattgaataaaaaggagaatggaatgttggtgtgggttcaatttggggttattaacaaaaggaatatttgtttgtccaaaaaaaaaagaatattttgcgtcagttagaagcccacacataagtagtttgtttcggtgcatacatgaggcataggtagtt

SEQ ID NO: 126181 - DNA, 1692 bp, Cannabis sativa
ttttttaatttttattaaatttataaatattaaattaagtttataattaaactctaaacctaattatttttagttgaagcttattagtcctataatatatttaaatttgtggcataaatacataagtttaacttacggttgcaaataaatacctaagtttaattttttgcgataataatacctaagatggcgtttggttggaggtaataaaatagaatggaatagaaaagaaagtaaataatttccattccattcttttgtttggttgcatattaaagtattggaatgtcattctaatggaatgccctttacaatattttggtgaaataactattctattttgatagagaaggaaagactattctaatacacgatgagaaaaaaatcaataattttttatcaatttttgtatgcattttatattttattcaattccattcttattcctattctcattctcattattattcttatgttttcattccttctaaccaaacgtcatctaagttatatttctgtaactctacctaatccttaaatggttaaatgtgaagtcattatccacgagttattttcttattggtatatgtaaactaatatttttttaaaaaaaaataaaaattttaatgacttagactaataaaaaattaactagtgacaatttgaagtacatatcgaaattacacaattataactttaatattattaatgcattaagtatttattcttcaaattactcaatttcaaaacacttcattagcttatatatataggaaaatttttaggtgagatgagcaccacttttgctctcactcatgagaacatttattttaaattttgattggttggataatgaagatgtatagggttataatgagttgtggaatatgttattaattgttttaatattattttattttaatttttttataactttaataaaaaagttaattaatgggattttattttttttgatcaaaaatataaaatgattttctcaatcgttttttttttctattatagagaactctgaatatgattaaatctaaatttagtgaataccatacaatatttttttttattggtgaatctccaattttagtttgattgaggtgcatatattctaattgttttttgttttgagttgatacacatctaatcagtagccttagccttagccttagcctagcctagccctaggtacgttgttttgataatattatggctttgaatttgattatataattatacaggatcgattagttgtattgtaagaataatatttttcccttattattattattatatattacccttgtttaattgaaaataatattctatttctaggtttaattaatttgtttgtctaatctgataatctaatggtagagatggcagaagtggttgatgaaactaaagatggtaaaggtttgttagcacaagacacagagaaaaaagaaatagacttatcatccgatgaagaagaagataatgatgatgatgatgatgattatgactcaagatgaaaatgattttattatcgttgaagatgaaaggataaccaaatcaaggtattattattattattcttgttgttgtttcttataattaattgcttttctctctttttatgtgtaataatattcttattattattagggaaaataaagctaaattaccaccaaacacaaa

SEQ ID NO: 126182 - DNA, 1777 bp, Cannabis sativa
  modified_base (58)..(77): a, c, t, g, unknown or other
ttttctccacacaacattaatttagaagtgatattaaacattgcagagttataatcannnnnnnnnnnnnnnnnnnncaacctcaggtgcaaccaatcattcttagactttgtcaatatgacaattttctgatggttatatctttctttcaaatttttcgaaggcacaatagtatcttttacaattaaatatttagattttaaccgctcatgaaaatgatggcaaaggaaaactataaccttggctttattttgttttttttttagtttttttatctttgatggtgtctcaaagacccatagcatctaaatggattttagcatcaagaatccgtgataaataatttcttccaaaaatatcaagtgtcataaagtcaagttttgcaaggtttgtcatgaagaaaattatatcaatataaagtgtaaattattagatatatacataaattttgaaaaaaatacaacaaaatataacacatagagagtaaaatactaaaatatagaataaaaaaaaataaaattaaacaatataatatgataaacaaatcaacacacatatataatatataggcatctatgtagatatatataaacataaacatatattgtataaatattgaatcataacaaaataaataaaaaaatggctaaatcgaatgtatttcagtcatatgagtatatatatacacgtatatatttagcgtatcatgagtttgaaacaattcgagatcacatataacaaacattattataccttggttagaaactcttactgatagcggtattatgtaatttatataatttagagaaagaaaatagagaagagatgagaattttcttagtgttttatttcaatgggtgatctcctatttatacacatacaagagtcaaatattaagaaactaagaaaaaggaaaactaagaaaaaaataatattgattacaattaatagtaataaaataaagatttggacatccacataattattaatatttattacaggagcatctatttctcactaacttgtaagcttttgatacaaagatcgaagaaaatacatataaggtgtagtgtatgaggagggcatgcctacaaagtgaagagaaacaaggagaaagtgtgcagctaacgtcgcttaggctaatgcccctcttttggaggttgaattccctgggaatgaaattttcaaagctttacactacgacaattataggctttagaggtggttttttaacccctttcagcgttaattttagtaaaatttactaccgatactgattcaggcaacactgtagggttaaactcaacagatgccaaaagggtaattattgaataacagacgccatatgtcatcagaactgacgtcgtagttcataaaaaattaatttatttttccaatttaaaacctattattattattattattattattattattattatttgaatagaaggtgaacttcattaacttataatagccaaatcagccattatagcagaatgtacagtattaggaacattgctgacattaaaagtgcaatcagacctataacaagagccccgagccagacaatgggcggttctgttagcagatcgcgaaataaaagacacagacacatcacacaacaagtttagcaaatctttacacttagaaattaacaaaccaaaatttgaaggcatagaaagcaaactagagatagcttgaactgacacaatagaatcagtttcaataactacattagaccaccctttagccttgatccagctcaaagcttcct

SEQ ID NO: 126183 - DNA, 2602 bp, Cannabis sativa
atctaccacctatgcctcaaatttttgacaaggcatggggtaggatatttgaggggagatcgaaaatctgcctgtcactgttacaacttagccctatacaaagccaagaaagaaaagatgcccatcaagagctctaaagaagagccccgcaaagggcaatgaagttcaacccaaagcagggacacagacaaagatcctcactttggggatcctacaggtaacttcaaacctgtagaagatttcgaagaagtggaggttgatcccacttctccaataagaagactaaagatcgggaaaggtatagtgccagaaataaaatcattactgataaaatttctaagggaaaacctggacctctttgcattatcatagggagacatggttggcatcgacccctctgtgatgatccatgccctcaatattgatcgaaacatctaacttgttcaagataagaggaggttgttggacaaggaatgcgcccaagaactcaaagacaatgttgagaggccatgtgcccatgacttcataatagaggcattctatccactttgggtatgcaacctagtactggagcccaaacccaacaaaaagtgaagagtatgcaccgacttcaccaacctgaacaaagcatgtccaaaggattgcttttttgctttctagaattgaccagcatgtagacgccacagcttgccatgaaatcctgagttttatggatgcgtattcaggttacaaccaaataaagatgcatctgccagatcaggagcacacaagcttcatgatagagttaggcttgctgtgctacaaagtcatgccctttgggttgaaaaatgcaggggccacatatcagaagcttgtgaacaaaatgttcaaagatcttttcagtcgcaacatggaggtgtatgtggacgacatgcttgtcatgtccaaaaaggttgggggaacatggaggacttagacgaatgcttcaaaatcatcagtagctacaacatgaagctcaactccctcaaatgttctttcagagtaggcttaggaaaattccttcacttcatagtcaatgccaggggaatagaagcaaacacaaacaagatctaagccttttcagacatgaagtcgcccacaaccatcaaggaagtacaaagcctaacaggacgctttgttgcactcagtagatttgtgtccatgtctatagacaaatgtgtacctttcttcaacattctttgagggaacaaaaaatttgagtgaacaaaggaatgtgagactgtattctaggagctgaagaaataattggctcaacattcagtgttgtcaaaacccctagaaaatgaagagctaggcgtgtacctaacagtcatagagcatgttgtgccaagtgccagagattctcataaattccaagagctccacccaatgatctcacgatgatgcattttccttagccctttgtagtatcggggatagacctaattggtcaactcccaaatggaaaaagagggatacagttgtagtctcagtagactacttaaccaagtgggaaaaagctgaatctccaacaacaatcacctccacaaaagtccttgactttgtttcaagaacatcatatgtcgatttggacttccccaaaagattgtgtcatactctgagaggtaagcattctggccttaatcttttctataggttcattagtctgttgcactgattttggacccaaatatttcctttctcccatttcgtcccaatgaatgggagacctacacttcctgtcgtacaacaactcatagggagccatccctattgtactctagtaactgttattgtacgagaattctatcactggcagttacttgcttaggaccccttaaaatccattacacaggctcataacatgtctctcagtatctgaattatccttttggactatccattagtctgaggatagaaagttgtactgaattttagtttggtagccatagcccattgaaaactctatcagaatttaaaagtaaacttcggatcgctattcaatataatggactttggtatgccatgtaatctcactatctctttaacgtaaaaatctactctacgtactgatctattgaaaagaaaaggaaaggttggtttttacaggacaggtagaaaatgtgcagacttcgtgaatcgatcaaccacaacccaaatcgaatcatacattcctgtggttctaggtaacccaaccacaaagtccacggtgatatcctcccacttccactcaggaagtgtctgttgttgtaataaatttgctagtctctaatgtttagacttgatctgttgacaagttaggcaccgggatacaaattctaccacattcttcttcatctttaagatcttggtacatgttggtagtgcaaggatgcaatgaatatggagtggtatgggcctcctaaagaatctcatttctaagttccgcactacttggaacacaaaccctggtcttaaacaacaacatcccacaatctaataccgtaaattctttcgcttgaccagatgaaacctcttctcggatcttcactaactctggatcaactaactgatcaactttaatttgttccaacagatcagattg

SEQ ID NO: 126184 - DNA, 784 bp, Cannabis sativa
ttgggttaacgaccaaaccgacgaaatcattggacgagttgaactttttctaatttgttaattgggcgagttacgtttaattatttgcaacccaatacttatattgggtcaataaaaatatactataacctaaccaaatcgaccaatgtacatccctattttggagtactcagagttgaccaaataccctaaaattaaatattttttagtagttaagaaacgataaattaattattattattaatgcaattttattattattaataaacattatcagttaatatatatattaatttttgttttaaaaaatataatagtaaaaaacaaacgaacgaaacctttcctcagtgcgataaaacactactacaatttagtcatttagtgacattagtttgtggtgtgggtcactaaagagttaggaatgacttttagtgacacacacaattactctaaatttttagtattagtctcctgtaatgtgggtcactaataatatgaagggtactaaaaattaatacattattttttaaaaaaaaaaatgctgacctatatagtcacaccaggagggacagggaaaatatatcccgaccatgatgggttactatatcataattatatatttaattattttaaataaatttagagttttgatatggtgaagtgtgaggaaggtggcaaaaggtttacttagtcacagtgtcaccgtatatcaatttttaacttatttttttaaaattttatttattaaaaattctgacttataaaataagaaataataataaat

SEQ ID NO: 126185 - DNA, 966 bp, Cannabis sativa
gatgctctattttgaaaatattttgggattacaaagcttatgttgtaaaagcactattaaaccagtttatgagaatattttaaaaacagggggacggcgtagttaatatcacttatcttttattaaaaagttttatacatcgaatttagttatcaaaatttaattaacccacatttttgtataattatataatatataaaatagcaattttattaaattgcacacacacacgtggcgtccctgttggacaaggcgttacacttcaccattgatcgttcttaggtaaccttatcaatcatgataggcttacctatagtactgaccaaggcactaagattcttcttcccccaatattggagccccaaaccatttaatcgtatccaaataggaactgaattgatcaacttagtagcatccatctctgttgtccaaggcctcaaattaaccggtttcttgtcaaagtggatgactccagttgccaacaccaagtctcgtgtaacctcatccctgaatttagccagagtaaatcctgattggtacctgattggtcttgaatttactccacagctcactcgcattggtctgataatcggctttctcaacctcctctacccagcttacagatttgggggatcgaactgaaatcttcgtaccaccctcctgccctaactcgttctccacgttttccactgagtcgtggaactcttcacccgccgtcggttcagcaatttcttccaggattgaaggaggctcctcatcagcttcgacgaccaccatgctcgaggatgttggctttcggacaacccgtttcttcttcgccatgggagaagcagggtcacacgcacgcttaagtttgtgattcatatggaatattttaccaggatcctggaatatggaaaataattcattttattttttttataaccatctaagtataattttataaattttaaattaaaatttata

SEQ ID NO: 126186 - DNA, 1430 bp, Cannabis sativa
taaaattatttttctcttttttccttaattatctcgtttttttaattattaattctaattataaaataattaaacatatcttctcttttctctttaatttttttattttttaaaattatatatataaaattgttgacctcgcttttagccaacgacagtaactcaaactaaagcgaatgaagaataattgaaataacaagtataaataatataaaataaaaaaaatatcagaattatagaggtccgaccccttgatgatggtaaaagcctactctcatatagttgtattaacttgtgagtagatgaacaagaaagtcttgatctctctcgaaagctcttacagtgatctttgaatattatactcttaaatctagattactctcgtatgttttctctgaataaaattcatgtccctaaatagtgagatgatttcactacttatagggattaactacatcaaattagtttctcaaaaccagtaaggaataaaataggaaatctgtttactttctataattataataagcagaataggaaactaggtaggttttctttcttcttcaatactacgaatctatctcatgaatttaaggatagcattgtgacttgtaaacttgaggttatattggatatatctctaaaattatctaatttacatctcctagttggtgtatgcaagccacatgtttgataagctggttggatgtttctacatgctctgctcaaatgtcccaacttctatttatgacttcaagtatcaaatctccctacacgacccattataagtaggattgcgggtccaggttatggaatctattccacgtgtcacccagatggatgccacatcaccctgtgtagaaatttagataacatttgccccccatgtttgcgtgggatcttcttggtcgcacttggacttactcaaccacgaaactgatcggatgggtaatgcgtgtctagttttttcctttgatccgatgtgactaattgaacatctcatcgatgtttggggcatttaatactgtcttgagagtgatacctcgagtcacacaatgacaattgtgtgacaccgcatgcatgacgtttgtactattttaatgaatactaacgttactttttgggggataaccaaaattttgaattttaaattccttaactatccctccaaacgcttataaaaaggaatttaagctttcttgacattcttttagccattttatttcttagaaaacaaggactttctcagaaaacaaggacaaaaatattttcctcctttttcctcaaatcttcaaagaaattttcttaggatttccattactgaaaccatctgagcacattcacgagtctacaaacagtgagtaagttatttttttcttctcttttatacaatttcctttaaaatacatgttggaattattttaccaggacct

SEQ ID NO: 126187 - DNA, 1949 bp, Cannabis sativa
gcaggctagggttatttggccacccatgtgcctgccagggttagccatccatgcttctgccagggtttagccggccatatgttttcgccaaggtctggtaggtcatattactgccagggtctggtcagcaatgttcctgccagggtctggcaggtcaagtgactaacaactttggcaagtgttggccagccttagtaggtgttggccacccttagcatgtgtttgccagcctttgtacaactttccctacgaaggacaggcttccctggtcaaacaggcctcttctaggtctgacagtcacctttggctggccaacttgtgctcaaactgtgtccggcaatacaaactcctcctggccagcctatgtacgccccttggtcagccagacatggttgtccaacttcttgatggctcgcttaacccctctcgcttgttgcttgacgggtttgccataacttgttaggagactttgtcaagctattgataaggttgcattcaatgtgtcctcagtcttggcttacatggacatgccatgtcatgtggacaaaatttgagataacatttgccccccaagtccctgttccaacatctggtcagataggtactttccagctctcgtcttgcttgtagtagcctctatcaagcatccttgtttagccaagtatcggcttttcgcatggcatgcttttagtttttttatcttctctctgcatgtatgcgtcatcttctttgaatcttccattggtaagtttgaacatttttaggcttttagaaatttttttattctcacgttagattataatatttttggtattttgatatgattgttttagaatgcataatgtgtaactttctgatgaaaaatattcaattttagccttcgttgtgattctttactctttgagtcatgaagagcacgaagaacacgttcaagttttcaaaattaactttgggcacgcggccatagggatcttgctggagatctggccggccgtagggtttttccatggaagttggctgattctaaggtttcaccctataagctggtcgatttattcttgggtttcgtgaccctacccagttcttggttaggtcatgggaccctaccgacccttttgaagcttgggaatcctatccaacctaggccttggttccaagcgtgtgacaagttttctatcctcttttgacctcgacaagaatctggtcatggccttgtaggcatatacactttatgaaacttaatggtgagtctattatagtcgaaactcaacttaagactcaagattggtcaaagttgttacacattagactttacttcgttgatatccagtcttgtacaatgacattatctgacaagtaccctttggtacgattgcctgaaattttgtctatggcttagaacctacaaggtattttgcctcgccttagagatttagcccagtatgtggttcctataggaactctgtctggttcttctctggttgtacggttcttgcaaggcctttgatttatacatttgaactgattttttattcatattcagccttgaggctttcatgttcctacttttgccctataggcactctatttttgaaaactactattgtttagccttaaatccttttattatggacatgtgtctgtcctgactctcttcttattgcattgacatgtaagtatccaaattcacttttctttatgccaagctgaagtatgcatgcacttaacttagagggaggtttagtcgcttatactaagcattaaaatttctctacataagttctccgtgctagtttgatgcattgtacagtgttggtgcccccaagtgagctagcaaacttacggtctcttgttcacttgcaatacaccaagtcttatagaccttgcctgggaattttcatggggctgccaccgggtgtacgcatgtggaactgaacaagaataacttt

SEQ ID NO: 126188 - DNA, 1431 bp, Cannabis sativa
ctctctctctctctctttatctatctatctatctatctatctatctatctatctatctcagatctttctctccttctctgccagccatcgacgaaccccccatacctagaaaaccccaagacccgaaaatcccacctcaattctctgtctctctctctctcttcctcactattctcaatacggttttgatgagccatcattgtcaaccaaccaagggttcaagccctatctttctctctctcatctcttctctctcttcgtcggcgaagggtttgaaccctttcttctctctttgtcgacgtccaccatcatcgaccaagggaccctctcttctctctatttgtcgacccaaaagctcaactcctttcaggtgggtttcaaatcgataacccctcttatgttttgtctttttcgattactttttggttagggattccgatagttgttttggcttgggttattcagattcgacttacaaatttgagcattgtgatacgattttgtagaggttcaaatttatcatgtgggttgacaattattgtgtttgggtatttggatttgaaatctgtacctattgattcgaactccatgacttgtgtgttgggtagtgatggtagtggtggtaatgtggtcgtagtgatagtggtcgttgtgttgtggttgtgtgtgggtagtgatggtggtggtggtgttgtggtcgtagtgatggtagtggtggtggtggtggtggtggtgtggtggtgtggtggtgtggtggtcgtatgtggtattgtgggggttatggttgtggtgataataatggtgggtgatttgatggtaaagtggttggctagagaagaacgaaaaagaaagaagaagatgaagcacaaaaaaaaaaaaaattatttattatttgtttttaaatgatttcgtaatttttaattttttttataatacttaaatcattaatgtgggccactacaaacgtgccatgtgtatacttgtgttcacatgggcagtaaaccgtagaaattaactgagacttttggataaaagagtaatgaccaaaacagaactacgaattaggtagttttatcatcaaaaaattaatttttgtgattaagtattaaaaaatataaacttcaagtggtttttctgccaatatccataggtatatagatatagattactagaattagcaccatttgatattgataataatttttttttattagttacatgttttgtagttttttagttctatattatatgttaagttttaacataaaaatttaattaaatgataaaaattgagaaaaataattatgacaaaagtgtctatataaattgtatttttcttaataaatatatagatatttataaattattgtgcatatttatatgttaattattttaaacattgttaagaattttagatacttattaaataaa

SEQ ID NO: 126189 - DNA, 628 bp, Cannabis sativa
aaatattttcacttttccacttttaaaaacagaaaactgattaaaaaaatgttaccaaacggtaccttaataattaaatattttattaagaacaatctcaaaaaatacaacctattttgttaaatatctatttcataagattcaaattttgatatattgaacattcataaaacaaattggattgatgatcgatgaatcaaaaaataaaatcaattttatttttcataatttacaactaggaaacaaaccgcgcttcgtgtgtggttattttttatttagtgataattaagttatataacgatcttagaataattttagattgttacatcactgtctcactttttcattttaaaaattaaaattgataaataaaattatttaaatattatattttgatcaatatatgtctaaaaaaatattttcaagattgtatttgatcaaaatattaaaattatttataagtaaaatttatatttattgaaaaaattgtgttttaaataaaaaatttaactattttgaatcctaatttttagcccttattcttttagagtctttattttatacatatatatatatactagcaaaaaactacgtgcgaggcacatatactaaattaattatgctagtt

SEQ ID NO: 126190 - DNA, 902 bp, Cannabis sativa
cgttttcattagtgccttattggtgacttgaataatattacttctaatgaggataaaaagggcggtaattcttaccctagttggttgattgatggatttaattaaactttactggattgtcatcttcatgacttacctctgtcgggttacctttacactagggaaagggggaaagggggtgcgaattggatagagattaggttggatcatgctctggtgagtgatagatggcatgctttattaaacttagtataattgtttaatttggaagtttttatctctgaccattgtcccattttaataaacccgactgtaatcagttttgtttcaaaaattcaacacttttgttttgaaaatgcttggcttcagtagcctcttttcttacaagttgttcaagacactagggagatgtgtgctaaccatgatgttatgggaaaagttaaggcctgtggggataagttgaaagttaggggtcgtgattacatcaagaattttaagtctaaaatggaaaatgtaagaaagaaatcaaaaggctcaagtctctttgtgaccatgtatctatcgctaagtatgctgaagcaaagaagaaattggctaaaatttacgttcaaaaagaggttttctgacgacaatgttcaaagcaactatggcttcgagaaatcaaaatagtaagttttttcacgctcaagctacttcccataaaaaatagtaaaattcaaaaagcttcataactctattggtgtttgggtcgattagaacttagaatttgacgctgtgactgattactttatgaatcttttttcatcgtgtagttctcaatggcagcctgttattgattgtatcagccccaccatttctttacaacaaaatgatgagttacttcttgggttttatgccctaaa

SEQ ID NO: 126191 - DNA, 820 bp, Cannabis sativa
aaaaaaaaatattgaattattataaaaaaataatttttattgtaaaaaaaaagttgtcacattccattgcaatgtcaaccaaacacgttactgttgctttcctaagtttatcattcccttcatcactctccaactccaagcaatattaaatctattcccatgaaatgaaacctgcataccaaacgatccctaaaggtttgatatctaaggctaatcttaaccattcttctcctccattcccatcaattgagtgagaacccatagaaagaagactagtctgtggaagaccatatacctatcatctcatctcatatccagtatcatgtacatcttccatcttattgattcatagagtaatcttaatgatttgacataggttaaaatccgtatgtattttagatctaatttctaacaagatatatgtgaagtttggattgaaagaaagtgagaagagttgctgggattatgcacctaattccaccctattgatgctcaacactgtaaattgccggtttggaggagataacggctccggtggtggtggctaacaacatcaactttgaggtgagacgaatcactttgccaaatgtgcgagtccccggtcgccggtcgccgatcgctggagcaagtgaatgaagttaggaagatggaggcgtgaagctattgaagtgtggagcagtagggtttgaatgatttatcttattaaatatgggctttgaaattaaatttacataaggggtaagttgaaaaataccacttttatatatcaattgatcaaatttacctctaattttatatttaattgaaacatacctctttt

SEQ ID NO: 126192 - DNA, 1407 bp, Cannabis sativa
aatcaatcttcagagcctcaagttttggaggttagatcaaagggagacacatgtgtctcttccacatctgtcattcctaccgagacttttgataggatacttgctagtggactagtgaggggtgtccagagtgagatacccatgagggatcagagagcacattggcttgctgtcagttggatgacatggttaaagcgccatattgagcagggagcggtcttgccgttaaacccatacttcagagatattgctacttactttggggtgtgtccaacaaaaagcacctcgaaaagtataaaatacctctcatcaatgatttttttttatacccagagctaggctggcctcagcctactccgtatgagattggatactactttgattcaaagtctgctccgaagctgaaccagattgggtacttctaatttagtcaggttggccaccagtggttggatgaaaccaacaacacagctatgtcaaaagttggtgggtatgcccagaactactttatcgcttgagatgttcatgggattcgacatagtcgctttcaatgagtgtcgtcatacaagcgctccatccctactttacagatgagggataggttgaatcacatcctatccttccctgtggagacgaggaacattatcaagttagccagtgtagctagctttcagaagtacggcgtgtaccctcctgcttttggagttgtggaggccaaggacccatcagttggtatggataaagccccagctactgaggacgtctatcccggtgatggacaagatcccatcatggatgttgatatgccgctgtttcgaatagctcgagatctggagaggagagagagggccctccgccaatgcttggctcatgggggcacagtcgaggatactactcttcatattaggcctggaggacagaggtctccaagacctactcgccccttgccttcatctagaggtaagggcaaggcagttgttgaggattcaaatgattcctctttcgaggatgatggtatttgatagtttattacaccatcctttatattcttgtcttgcattgaatatttgtaacgtgtattctgattttgctactttctttttacggatatgtcttcacaggttgagaggtctagctagtggaccttctgaagaaccttcgggtcatccaagggccaaggtggctcagaccactcattctagagatgttgctggatcatctcttcatcctcctcatctagggcctgcgcctgtcgggtagcccatggatgaccctccagcgaggaaggaactgttggaataccaagacctaaatttactaatatgtttttaacattctaaatatgaatttttaaaacaatgaaacttaagcgcatataaagtatgtgaaaccttacattggttgcag

SEQ ID NO: 126193 - DNA, 632 bp, Cannabis sativa
agttcctggtaaaataacttccaacaaatatatccgttgaatctgatcggatcggatgactcaattcaattggattggatcgaatgacaaaattcaacatctaataaataattagattggatcagttggatctacactcctattaaaaggtgtcatatttagtaagaaactattagaaaacaatattcatcgtaaattctcttaagatcaactttgatgtggtttgtctattagagattttgatacatatgtaatatggtttaatttttaaacttaattttatgtgaagtattgcttaatatagacaatgagtatgatatatatatatatgtttttaatttttttatttaaaaaagttatttttttacctaaaatattattaatttaatattatgtgaaattataatggacaatttttaaagttatcaactataagagtattttcttaagataagatgacaaacttatataaacgagagagagaatttgaaaaaaaataatattttaaaataatatgtatattttaacaactataaatattactagatagatgttacgtgtcaagtcacgtatgttaattttattttactttttaattttttttaatatcataattttaaaattaataatat

SEQ ID NO: 126194 - DNA, 1613 bp, Cannabis sativa
ttcaggaggcatttttaacgaccttaaaagttaaaagggcatgatttggtacatgtcaaagtttaaggggcaaaaatcctaattagccaattatatatggttataaatttatacatactaatttaatttagtaggcttgttattaattagttaatcatgttataattatatcatgattttattatattattaatgtattaatcttagtcattgttaataataattttttactaaatttattttattaaattttatgatattattgtgataacaaatattaatagtttattttttatttctttaatttaaataaaattacatataaactttttttaataaatcataataaaatgaataataaatatttaatgtttaagaaaacatttattagatttagttttgtaaaaaattattctgaccatttaattaattttatgaatttattttattttatttttaaatagacatgtgatattaaaaataataaagatatatgttggcaaaagaaaagtattgttagcgcagattttcgttaacaaaaaataattaacctttacgtaataaatatattacagaaataatgagaaataataaatgtataagtgacaccagacatttttacgtagtttttatagttaaatctgcatactccacgagtctatattatttaagatattttttgaatacgagatacaatatacaattgattgtatatctttttctctctaaaattctccgtccctttttctgtataatatgcccctatttataggaatataggttggcagttattgacatgaatctatttgaaatataaccattcatgaaacgtggacactttccacgtttcatttaaatacatgtgggataatattagataactgcttaactgcttgtaattcttatcctttttcgatggtcaatgctgatttggacaatggtatctcgctaaacctgagttaattccttctctattacaatgtggaaaaaagtactaagtgttagcaaatgattcgcctcgttaagttttcttagaatagcgaggtgtgtgtcttgctattcgtaagccgaggtcgctttgcataactgtattcactcctttgaataaatgaattatcttcctgggcttgtgtactctgaggcaggtatgtatctcctcaatataggtttcaacagtcttctattgttgtcttgcttacgactatatagtcagcgtttaatgaatattttctatttatcttttatttaacgagttactcttttttcgtcgtattaaatgatataattccattatatcaagtggttcatattccactgcaagacacatgtcactttctaaaatgtagccaaattttgggtataataattgccccttaaaaagttctcttttttaataaaaaagagatttttagatgattacaagggtatttttgtcttaatctaattttgaaaaattgcatgctttgagtttgagttttggcgatttatgatcctgaggcacatcattagcattaaatgtccatcttttccaattctctcttgctcccttctcttagatctttattctttcaatctaacttggcttgttgtttttataaacttcttgtttcata

SEQ ID NO: 126195 - DNA, 1354 bp, Cannabis sativa
ataagtaaatctgattatgttgaaatgagttttatttagggcataaatcccaacagaagtgtaatattttttaagaaagtttgctttcacatttttaaaatttttttctatttaatttcacatgtatcttgcatgagatattaatatcgtaatttttttttaatttgtttatatattttggtatagtgaaaaaaaagcattattatatttttaatttatacatcaagtattggtataatcatattcttcttttactttttttagaaaagagataatagttgttatttattttttaactatgaacaactatttagcaccgacataaaaatataaaaaaaaaaattgtatacataatttaagaaatctacaaattttaaccactaaaattaaatgtacaaacaacgtgaaagcaacatatttaaaaaataataaaactaaacaaggtgtttacaactttaaaataattctaaaacaacaaacattgtcattactaaatataagtaatttttcttcatatttacaattctttcaatcaatgtccccacttgattcaaaatcaatataatgtgtgttctcttattaatttctttgtatgaatgtaagataaaagataagtttttgttttatcatgtaaaaatcttactttcttttgactctcttcttttgatcttcctttggagaacaacccttgaccatttgattcaatttttcctttgataccttgatcttcatttacttctgacatggttaaagaatctttcccgtacaatatagtgtcaacaaaatattcaaaagatttaggtagagagcttaagaagatgataccttgatcttcttcatcgattttgacacctatgttgttgagctcgagtatgattttgttaaattcatccaaatattttctgagttcttttgattcatccatctttattgtgtatagtttcttttttaggtacagtttgttggccagagatttcttcagatagatcttttccaacttgtctcaaaggccaataactatttcttcatcaaacacttctcaaagaacttcatctcccaaggataacataattgcactatgagccttaatctgtatctcattcaccttcttcttgtcttcaatttctgtaagtgcagtagtgtcaatggcctctaagatgccttgatgtatcattagggcttttatcttgatccaccaaagcccgaagtcattttctccattgaccttgtcaacctcgaatttaaccattgccattcttgaaccttgagcctttgattaaacagttcttgatcttcttgagctacataatagtttatttttagtattaattttagattaagtttagtatatttt

SEQ ID NO: 126196 - DNA, 2501 bp, Cannabis sativa
agggcataaaacccaacatctttcgtcttggaaactggtcacttcctgagataaggaagcaatgtcagcttcgagctgctcggtggatggcatgtcctacagatctttggttagttcggccactttggtctcagtagcaaggagcttcttattgacctctcgcaactctatccgcacagccccaagttgaacctgggcttcctcggtgtccttcttggccaagtccacttccgttcgtattgtgttggaaatggcaaggttcttagcagcagctgacttagctcaggaataggcataagccatcttcaaactagtttgtgtagacagaagatattaaataccgaacgagttaaagcagaacaaagggaaaatgtcagaaaaggcttaccctcgaaagctctttcaggactcctcccataaccagctccagagacaggtcgttgtccgccccagtcagctgttcgttcacctcagggaccgaccaactcacacagtgggtgagcatatctctgcctcttttagtctcctggtacagtactagaggtggggcaggggccttaacctgttcagacccgcttctaatcagctcggatgcacccatcgcctgttcaggcctatctgaactacctcctcgggaatcttttgacttggtcacttttgaggcaggaaggtccacaataggttgttcttcagaaaggtcaatgaccacttcagctggtgccttctctttggacagggtctcactgcctttggacttcttggctggaggggacaagcttgagcttccccccactctcttcttcaaagcctcaatcattttctgagacatttctgcatggaataaaaataattcagttagaagaaagtatacaataaatgaaggcatgaaaatcaagaaaaataaatgcaagatgaagtactctgcacgctggcaggagcattagcccaaacaagcacggatgggacatcgtcatccgacgaatcttcctgttcctccaagacggctttcccctttccttccacaggggtggatggccgagcaggtagatcaggctctttaatctcgatagtatgttcgatgggtctttacccagtcgggagggttttcttctttttgagaggcctctcctactctaaatattcctgagcctccttctcctagtaagaatattcttgagcatattgtttggctctagctccacccttcaacttagcctcacgcttaagttgaataagctccttttcctgctcagaatattcctgagcatactgcttggctcctgcatcattcttcaacttagcctcacacttgtggtgaatgagctcctcctcttgttcaactccctcagcccgaccagtactggactttttctttctccccttcataggctgaggtataaagtttggtggataaagctcgtactccacaatgttggcctccaaggtcaacaaagtcatattttgagcaacatccggcagttggagaatcctttgagctctctccctagtagccagtgtaaggggtggatggtaatatattaggatctgctgaaattgagtataggtggtgtccatgccttccacgaagtaatactcgtcaacaaaacccccgagcttgctaatgaccttgtccacagcgcctctcaaccacttgaaatctggctgagagaagtagaagtaccccaacctgctttgcttggggttagacttcaggtcaaagaaccaattgacctcgtgcagagacggcacaccccatccttgaatggcgtagaggacgaacacggcagataagtacttaatgcccttgggagtgaactaggtcagacaaaggcaaaaataatctgccaccttcttaaagtaccagtgcaaaggcaacattgcccttgcttagtatgagcgcccgaccaagcacacatccctttctgtgggttcgtggctcggtgatttgaagaagggatgtaacactctagtccactcaggtctccagccttgtccaaggccctcatgtgtgcctcgctgatcttggacggagggctcacccatctggcacctaaggcaccttacctattgtaaggaactgcttcagtgagctcctcagtgacatagtctcccctttgaccaagacttcaccctccgcagacaccgaccccgagctcattataccctccaaagtttggaggttcaaccactccttcctccttggcctcgaaatggctgccaagacggacgtcgtcctgctcctcaatctcctggacctcaatgtccccctcatgatcttcctcctccatggcgggcagatcttgttcggcgcttggcaatgtggcaagcagggccacatgaggatcagatgcgttgaccttgaacattgtctactttgtgtgtgccatcatcctcctcctagatggatattgatgtgaatgtcgtgcaaccgtaacagcaggaacaacaattgggatgccaaagttacccgaacttggacatgttggaaatattttacaagg

SEQ ID NO: 126197 - DNA, 1623 bp, Cannabis sativa
  modified_base (179)..(189): a, c, t, g, unknown or other
atcatactccctaaatttttaaggctgttgaaaatctctcacgaactattaagattgttggatttaaggatttttatctaatttgagtaaggaaagtctaacatggataaaagttcagagggcatgatttggtagatgttaaagtttgaggggctgtgatttggtagatatcaaagtcnnnnnnnnnnnatttagtacatggacaatcactaatttagtaaaattaaataaaattagataaaagtccttaaatctaatataattaaagaagaatttttagcatagagaaaagtttaggagacatgatttagtacattttaaagtccagggagtaaaaatcatagttagcctttaaactagcaatattaattattacaacaaatttttttaatacaatttaagttgtattatttaaaaataacaaatagtctgtattaacttgtattataatatttacaaaaaatccggggttaaccccaatctctggcttggcgtcggtgttgggtcaagtttattgaaaatatattataactttacacaacttattaatacaaagtcagtaccaaatatattattatattgaataatacaatacaatacaatacaatataatataccaaacgagcctttaattaatcatgctatagtggagccttaataaattgtccctagttgagagtgatataaagtaaaataacttattaattattacatacggagcaaaaatgccaacataagtgtttaaacgtaatccgaattagtggtaacaaatccactacgtctctcacaacttggaactcatgggcaaaattttgtcccaaagagtcgataatatcatcaagaaaaatatttttaatccaagtgaagcaattccctaataccacgacatttttcaatgtgcccccctcttggttttctttcactacattcacatacatagttgctggacaatgaggcatgtagaacactgttggcttcttcacctttcttttacctttctcatcattctccaacacttgaaaacccatatccctcaaagcttgattctctacataagtgagatttggatcaaatatttttatgttatcactaatccaatccactttttccttcaacaaaagtgccaagcttagttgcaaccttgatttttctctatgtttgatgctcccaatacaatatatcaccatatctatcttactatcattggtagagctcacaagattttcaagacgaagtgaaatattttcattattttgaatttgatcccaaaaattgttgaaaaatggcatggtctccagttcattcttactaagttgcacaagctcctgtattgttggttcctgttccttatttacacaaatatataagtgatatatgagagataaaaaaaaattaattaaaatatatagacaatacaagaagtatagaattactagactatacttatgaccacataataatacaaaaaattttatttttagtcataaaaaacttgtgattaaagtaaaaaagttgtgactcttatgttgtgattaaaggtcagtggctaaaagtattagtcacaaaaattacaattaattgttgttactaattaaatgtatttttagtcacaatacttgttgt

SEQ ID NO: 126198 - DNA, 1246 bp, Cannabis sativa
ccccaaccacgtaaaaaatcttcatctcactttcttacaactccttattataattatattttaatagttgccgaaaacctcggtcaacatgccctatatatatataacttactatgttaatattaagtaaaatgcacgtataattaaatttaattaagtaatattaagtacaatacatgtatgttcaatttttttttaattaagtaatgcatttttattttttaatttttaaaatagggtttgagattttgatctttcagaatttttttaattattgcgactacattagtgtgctctttaaatgcgattatatatacatatttttatatgtacaataaaaaaataaagtatatccaaagagtacgaagatggatagatttataatcacaataaacatgtggcaaatcatataaatcaataatcaatgactattagaaatcttcccataaaattatatgaaaagaaaaaacagtccatcttcccataaaaattaggtattaccaacccattatttaacctaaaatgaaaagaattaccgaaaccaatagccatcacatttatacatttgttgatgaaatatatatatatatatttaaattttttgttgatgatattcgagtaaaacaaatgattcaaatctaattattaatgtgatgttacacttaataatcaattaatttcatacaacaaaaatttcattgttactttaatgtatgtgttatatattattttaatatttttaaattatattaggcaatttacttgttagctttaactatttacataattaaaatttaaatttaattatgaaatataaaatatttatataatttttattttaaatatataataaaattatcttttttttttatgtataaaatatgtacttaatttttttttaaatatatataataatagtataaaattaataaagaatatgtattaaaattaatgtaaaaaactaaaaatattgttaaattaaaattttattacatagttacattttatataaaataaatatatagatagttaatttgcaaaaggtgaggagactaggtgagggtattttataaaatattgataatataattggtgaaattaatattaatgatcttttcaaaaatataagtgacatggcacgcatgtgtatgcagtgacgaagctagaaatttagttgagtgagggcttgaataaatattaagtcaaaactaataaaaataatgataaatgtatctttcaaattttc

SEQ ID NO: 126199 - DNA, 1698 bp, Cannabis sativa
cccccccccccacaacagagaacctactgcaagtttggactatagggccacgagtttcatgtcgtcggtcactttggtcttggttttcgcttccatcatccgttgaatgaaaattttcaagctttccaaatccttccaagagtagattgatctgggagctaaccttttccaccaatccttaacagactaagtgagagtcaaggaaaagcataaacacttagcgtcattgcttaccctgggcacttgcattatctttttatattcggcctagtgagtctttggatctgtgtgcccatcatacaactctattgaaggcattttaaagttctccaggagtgaagcttctgtgaatttccaaacacaaggctctaggtcttcatcttcttaatcagtaagggtcccactttactttcagaccaacttagtcaatgcagctatctattcttccaacctctttggatcactttccaggagatctcttccacgaaccttgtcattcaagtggatcctaaggtcgttaccacatggcctcgccttctcaattttagctttttcatattttgcgtctaaacgccttctgaggtccacggtggactaactatcatcaaaatacttgtcgttctaccccaccgtcctggtttaacaaatcactaaggcggtctctctttccttttggttttggtattttagtaccagctcccttaggtgttacagtgcctttcttggtagaaggacgtccaagcctggaggcactggccgtcttctacacttgagaaagcatgttgggttgatttgtatttttccaaggaggtttaggggcacgagagttcttagggtcacccacttttgcctttcccttatcctgtaccggagcaaaggttctagcgttagcggggttttccttggtatttcctccgatgtactctagcgaagggtcatcatcaaaatcttcgtcatctagatctccaaacttatctcgaaggcgatccatcattttttccatcttatgagtaaacttctcttgacgggctaacttttgtttagtttcaagtagctcattgaacacttggaccacctcaagatcgtgatcatagtgataattgtctttgtaatatccatccttgacataattatcttcgttttcttcctcttcatgcttctcagtatccttatcgtcaccaacatggtcatgctagttgtctaggtcctcttcttgatcattcacgttagacgtacctccacatctcgcatcactcggctaggtgtgctccgaaaagagggaaattacttcctccattaccagagggtctttttgagaagcatctttcgtgtgaacaccatggcagtagcagggatctacgtctttcttcagctctcaataaaatcaccaaaatatttaccaaaatttttagaaacaagatatttaggagctaaagaaataataatatgtagaaactaagagaggaagattttttacgtggttcaggtattaataaaccttagtcacgagttagtctatttgtctctaagggcgatattgatatgtttacactatttaacaggaaataactctaactctttacccttaatttctttttcgaagaagaaaaagatcaagggtaatctcaacaaaattttagatatgtgttttgttggcttgacccctttgcatgaaaataaagggatatttataggcta

SEQ ID NO: 126200 - DNA, 2134 bp, Cannabis sativa
tgggtccccctatcctccttcttcattctgcccatcagcaataataccctcttctttaactgtttcattactatgatcaataactattaactcctcctgaactaccccatcattaacttcttcaacagccactgctttaatagcatcacccacgttattctcagttatctttccaaggtccccatcttccatctctccctcgtcactctccatattctccatgtccaatactcaaaagaaagaaaaggaagaaaaaaactactatctactgacaatgtcgtcgaacaccaagttcatgtttgatattattttctgttttttgttttaaaaaattatttttagaaatgagaataaaaaatagtttttgaagtttttaaaacacaagtcacgtttggttaataatttttaaaaacagtattgaccaaaaatgaattcgtttttaaaacaaaaaataacattttgttattttcaaaattcttattttttgtaattttgttttctgaaaactgttttcaaaaaataaggccaaacaatcaaaattgtttttaaaaacaattttttatttttaaaaataaaaaacagttttttagttatgatgccaaacatccactaaagttacaaaaaataaaaattttaaaaacaacaaaatgttgttttttgatttaaaaactaattcatttttggtcaatattgtttttaaaaaatactaaccaaacttgacttgtgttttaaaaactattttttgttatcaattttaaaaataattttttgaaaataaaaaataaaaaataataccaaacatgttccagcactctcaaaagagagaacagttcttctttatattattattttaaagcatcgtccgttgtctgtttcttaaatttagtgatataaatttctattattgaatttttggtaactcaacctcattcccaataaaatatggtggctaatgctaaaatttagaaaaccaaattaatgagaaatcatttgtaattgctattaggcttaagaagttagttttagtttttcaatttgaaaacttaactgttggtttcatcctctatatatgttaattaatccatctaataattatttaaaaatttgtactaagttattttaatttttttttttaaaataaaatataaacctcaaagaaaggaacaagctattatcttgcatgtttttgtttgagcttatgtatataatataactataattaataaagcttaactattaattaaatttgtcttgtgctgtagggctaagattccaagctagtccaaccattattagaaattaaatttaatatagtgagttattgtgtggaaaaaactatcctcactcacttatatacgtaccaaccattttttggttggagttgcaaacatgatcatgatcatatataactattatagttaataatagtaactattatgttgactcactattgcaaacatcatcatctctgtcatataattattattatatattgcaaacatattcatggatcatattcatatgattattaaaatttattgaccacattaaaaattcattaaaatttataattatgcattgcaaacatgatagtaataactttaattaccaataaattttgatgaaattacaaattttatgaaaattttatactatctacgaaaaaatatatatttattttaaaaaattattttatagaaaaaattcaataaaagttgaaaaatatgaaaaaattaaataaagataaagtacccttagagtaattaactagatggtaaccaattaccttatattatttttcccatattttatttttttttttaatttttgaattttctcataaaataattttttttgataataaactatatttttataaacttataccttaaaactcataaaaattaaaattccccacaaaattttaatgaaatttttttaataacattagtaattattattactcactattgcaaacatgataattaattaagtataattttattagcaatggtgaggtttttttatgcttaaacgaaataaacattaaatttttaaggctaattagtaatttttccccttgaactttgacatgtagtaaatcatgctccctgaacttttttagtcattaaaa

SEQ ID NO: 126201 - DNA, 1510 bp, Cannabis sativa
  modified_base (1429)..(1465): a, c, t, g, unknown or other
tgcagcatggggaaaacgtctgggcacacccataagaggacgtgtcaggcgtcataaacctgatttagggcgattacatattaatcaaggaagctagtgacaaatccattataaagaatcacatcaatcaagaagggatgaaggctaatctcacctaacacctacgcagcctactacgtaggttatgcatgccctattttgtactttttgggaacttgtgcatgcccatagttggcacttaaagacaagttactccttttcttcttccgaccaatcgctataaatacccctcataaaaattaggaaagggatatagaaaaaaggacacagaatcattctctgtaagaaatactctctcattaataacagagactcgtgaactacaactcataatgcccgaaccacgtaaaaaccacctgtattaattatctctaagctctcattattacattatttatttggttgccgaaaaccttggtcaacactatctaatgaacgagattcaagctctgaaaattgactattttcattaaaggtcaatttttaccgttagatcaccatcaatggccaagatcagcccaaagtgaattttttatattttgtattattatcttttcccataaaaggagagctcatctagcttatttttatatttttctaagtccccgtaaagttagagtatctctctctagaaattagagctcttgccttaaccaattttcttgtagttctcgtgagtaataaaaactcgaagtagacgtagctccattactgtcgcgatatagggagtgaactactataaattacatgtatctctctattacttacttaaacttatatctcttctcgcgcaatctagcaagcgagtgttggccaaatttttgcgtcaacactgttaaaattttttttaaaagaaaagtattaaaaacaacaattcttattacatagctaccacagttaatatcacacaaatttcaattggacacttatatttaattagataaaaaaattatttaaaatgtaacacaaatactaggaatatctacaaagtatttacatagtagattaaaatttgaaaaaaattacaaaagtacattaaaagggaaaaaatttcatttttaaactttgaaatttttgtttataaaaatacatcttcaataaaaataataaattattttttagttgttttataatttatttatagttgaagttttttttagtattttatattattttataaattatttataattgtcgtgaggttgacttcttactattttttagttattttttttttattttttccaagtaaagtgttattttataattttaaatttttgtgtatatttttaaaaataaaaatattaaactggaaaattgtaaatacagtataaaaattataaattactgttagaatttattttaccannnnnnnnnnnnnnnnnnnnnnnnnnnnnnnnnnnnncctaaatatgaactttctaaaataataataaacacatataaagtt

SEQ ID NO: 126202 - DNA, 1291 bp, Cannabis sativa
accttgagtattttcaccgctaatttttgaggttgaggactaatcggcatcaacctcaagttttttaggacttttaccgcaattatcccattaattattttccctacaattagcttataataccctaattattttccctataatacacttaaattttaaataaatctccgtaattgagaaattattttcctaaggtctatttctggcaataagccttagtttctactaagaagcacataatcataaattaataattaaatccttaattatttgctaattcccatgatttaactacttagtcattacattaatccacaatatgtagttaattatgcatttataattatataatatcttaaatatttgtactaataataaatttatatatacaaattagtacaatttaattatatgaaaataaattaaatgtaaaaattttagaatatatatttaatgacagattatcaattaattcaatcaataaattatttaattggtaaaaaaatataataattgcacacttaattatagaatattcaaatattcatattcttaaaatatcacaattattataattgcatataaaaataaatcatgtaagtaatttactaaattaaattttttccataataatttattactaaataacatataatatatgaaattatatgttaattgaaaatggaaaatttaaattaatgtaatttaatttgactaaattaacaaaaataagtaaggaaataaaatcaaattttaaagtaaattaaaataataaaatttcagaattttcctagattttttcttttttttttccctacaaaatgatgtgtcgtatgaggtcttcatcttcctcagccagctgggtcatatgacccgtttctctgctacatgggctgcgcggatccgaccccaacctagacaaaaaaattcatttatgacgaccaaaatgcatgatttcaattctaaaagaatctaaatgcaaaaattaagagatttatatatatatatatatatttctcatgcatcgaaaatatggacttaaaattcataaaacacattgggtccgaaacttagttttctagaattttttttttcaattaatctccatgatttttcaaatccttttcatatataaaatcgatgtaaaatattatatgaatgtagtaatgcatatgagatttaaattgaacatcgaaaaattaaaactaaaaatttttgtatacaaagaacgaagtgttggaaattattttaccaggatcttagatctactcgcaagtatgttgtttaaaca

SEQ ID NO: 126203 - DNA, 1600 bp, Cannabis sativa
  modified_base (1544)..(1549): a, c, t, g, unknown or other
ggtaaaataaattccaacaccctactacctaatgaaggattagttatctctagaagctggattagatctatgccagttagagtggatggtagagaactgggtgctgacttagttgagttatccacagaagactttgatatcattctaggaatggatatttcctatataagtatgcagaattatctttatggggagagatgtgaaatctacaccgatcacaaaagtctcaagtacttctttactcagaatgatctgatcacgagacaatgatgatggttagaactagtgaaagattatgattgtgagattttgtataatcctgggaaagctaatgtagtagagcagaaaggatcccgagcagatatccagttctaagttgattttttcccttttagcaatagagatgactagggctggtatttagtttgtggttggcaagcttaataatttgactatccagtctaacctattagaaagggttagaaatgcacaaatgtaagaccttgagttatttaaatcccataaagaagtcctacctagtagggctaaggacttttcaatttttgagagtggaatgcttcggtgcaaggataaagtttatgctctagctagtgatggaaccaggaaggatcgagtttatgctctagtagtgcataacttttcagtcccagaattaacacttaaagagaatcaacattcgacccgttaggaaagttagaattccataattgtagattatgtttccagccattcacattattagattccctaaacagaagttgtaagaatcatcttctctgagaaactttaatgagtaaatcaaagaaactaataacatgaatatgagttcatgattactcaaactttatgccaatctactattgatcattgttatgatatgaattaagtctttatggtaaacaacatgttagaaaaagatagctttattcatatcggtccttgcatataatctctattatatacaacaccttcacttagatgtcatactacatttgtaatttgaactgagattacttccactgaagaacgggcattagtgaaccgtactagcaaccattgattaaagattctataattttaatatgttgctgactgttttattcatagctaaatgatcttaattttctgtacaactacaagtcacaacctcatatacaaataaagaatttttcgatatttatatataaattatttaataataaatattaataatttaatatttatacatatattaaaatgttcaaactctttattaataattagaaatatcttataggctttttaagacataaaccgtaacactcacatgcgcaccaaatctagagatcaaaactagagacgataaaattgatctttctttttttaatttggattgttgcgtgagttgcgatgtggattgcaaattgagttgggttgcaatctgggttacaacttgagttacaatctggattgtgatttgagttgagttgcgatttgaattgctatgtgtagggacgaacctcctgttggaatttattttaccnnnnnnttagatctactcacaagtatgctgttgaaacaccctaaatatgaactttct

SEQ ID NO: 126204 - DNA, 669 bp, Cannabis sativa
attaaaatctcaagctccataccaatggctaaaattttcaagctccctacttatcaagatcgaaaattttcaagttatctctataaaaatcctgcattataatttacaacagttagataatcttacagctcaaatcataaaaccctaaagtttaataatttctctaatattcaaactagaagtaagataaacaacaacccaattgttcaataacttcaaatctatgctcaaaacataccaaacctaaaaaaaaccctaataatggcaacgagaggagtaaaaggaaccattaattcaaagattgaagctttaaatctaatcaacatagaaccctaaacagccaaatgtaaaaacaacgaagtagtcgtgaatcaattcaaatcgggcaatcaatgagatctacaaggaaagacaatagagaaaaggttagagaactcaccaatggcggcttgagagaagagaagaagagagcgcaagtggctcttctgtctctgactccgattgaatttgggttcttatggatccaaacgggtcgggtctcccatattttcaagcggatcaaagcccgttgggcccaataattaataggataattacaaattattattattttttaaatttttatatttttataatcaaagatttttttttaatatttttacaaaaaaa

SEQ ID NO: 126205 - DNA, 2278 bp, Cannabis sativa
ggtggaatgggggttcttagctagcatgatgtgatagtttggctttgctgagggttggttagggttagggttatcatggactatgtgacgacctcggagtacactgtttttatcaatgggtgccctaaaggttgagtgatacagacaagagggttacgacagggatgtacttgatctccttatttattcgtcctctatgcaaaatcattgtcttcgttattctctcttgcagaagctagatctgaactgatggggttcaggtgctctagatcgggaccacgtgttcctcacttgttctttgcagatgatagcctcgtgtttggtagggctaatggaggggatactgaaaatataaagcatatccttttaacttatgaggctgccttagggcagaagattaactttgagaagtctgctatcacttttagtccgaatgtgcaacatgtggatcaggatgaggtcctgagtgttagggttgacatcagtggctacgcatgacaagtacctgggattacttacgatgattgataaaaacaaacagcgggcgtttgaggggatttgtgagaatgttaaaaagcgtgtgtagggatagaagcggaatttcttttcagctggtgggaaagaagtacttatcaaatctatttttcaagctattccaacttatatgattactgtctttaagcttccggcaaaaacttgtgagaaattaatatctattgtcaaacaattttggtggggttcatctagagatcaaaggaagattccttgggtgggaaacagtatgtcaacctaaggtgatgggtgggcttggttttcaggattcttaactttttaatcaagctcttttggccaagcaagtatggaggatatttctatatccagattcattgcctactcgagttttgaaacataaatatttcccaaatttctctatccttgaggccatggaaaaagttggttcgtcttatctttggttgagtttgatttggggaatggagttgcttaagagcggtcttcggagatttattggagataaaacacaagttagggcttttaaggatccatggctcccgcgtccgaggtctttttcagccaatcacgaggaggattaaagataatcgtcaggtgagttaatttattcttccatctggtgcttgggatgtggggaagcttgaacatgtttttttgccaatggttgtggacataattctgtctattccattaccgaggcgtgatgtagaagatgactggtgttggcattacgatagagatggggtttataatgtcaagggtggccattcattggcatgttcgctccaggttgaggaatgagttgcagattcatcctgattaactcgttggtggaatgaagtatggaatctcaatatgccaccaaaggtgaaagtatttatttggcctgtgttccatttggctttaccagtagcaacccaacttatctcccagaaagttcgggtaactctttgctgctctcggtgcggagaagaagctaaaatgcctgagcatgctctatttttctattctggtttgattccagtgtggcatcgattaggggtgtggtcggtgctccgttgatgtgcatatggaccaatgtaagaaattctcctattactctttgacgggctatcctgtgaggtttttgaattggtgatgaccaccctttggtggttgtggtatgataggaagtccatatatttggcaatacgcagtcaagattggatagtattctagacttagccaataaccatctgacagagtataaggagtatgatcggcgagaccttcatctgagattgggccttgcaaacccagttgtaacccgagctactcgatggatgccacctcctcctaaatcctttgctctagcgatggatgcttcagtgattccagagaggggctttgttggattggggggagtgatacgggatgcagagggtgtggtttagttggcgtggtcatcagtgtgttaggtgatttttctgctaatgtggcggagctgcttgccattcgtctgggcttgactcttgcacatcaatttggtttcaatatctccattattaatagtgattctactgtggcaattggttgcattaataacattcacattaattttagttttcagtctattttattagatatctattccttataagctaccagtttgagctcaagccagtgatgtttcaaatgctccaaaccgtggggcaattcagcgggatgccaactgaggatcctcacctccatctccgttcatttttgg

SEQ ID NO: 126206 - DNA, 835 bp, Cannabis sativa
aatttaaaaatcatcaaatgtttaaaagtaaaacaaaaaaatacaatatcaaaataaaaaattagaacaaatataatttcagagcttatatttaaaattttaatttattgattttcttctaattttttcatgattttaagatattttttgtttatttttttatttttaatgattttctttgttgatttttaaattatttaacacattaaaatatatgttaataattatttaatcagaattatttgagggaatgtgatgctgctatgtgtctttttatcaaacaataagaggtgaactgtgtcaaatcttcaacagtaaaatattaaacactaaataattttaaataaaaaaattaatgttacaaaataaataatataaaaaatttggttgttattatccttaacattaatatattaataattgaaatttccccatcttatgggccaatgacccagcccagctacagtgtactctgtggactgaggtccttgtcactgggcaagctctaacttcggcccaattctgaagcacgtggcttacaatgaagctgcgaatggttgtttcgcacgtgtcccatttccacgtgatgtgggcccggaattttcttgtctttttagtagtaatccgaacctggctcattgttttgatgacacttttatcaaagtatcattcttcttggagtttggaccacctggctttgctactatggaaatgacacaattatccctaataagaacatatctatcatgagtcatgacatcttgaaagagaaataattatttattaaagagaataaaatatatacatatatactctcttaatattaagtaaaata

SEQ ID NO: 126207 - DNA, 1426 bp, Cannabis sativa
  modified_base (544)..(546): a, c, t, g, unknown or other
atactattagaccaataacaatattaacacattggagggtgcttgacactactggtgcttttagtatttctcttacaataatatgaatggttgtgttcatactttttaatatcatcattaataaatgttaaatactaggggcctttttaaattctaagcaccacaagataatttaccattattgatacaatttaatattaaattttacatattttaatttaataaattatataaaaaattactctccactcataatgtgtcacataatatagtgttaaataccataaatactgaatgggaatgttttaataaattagatcatctcctaatataaaaattatgctatatttagtacaaaaagtagttttgtactaaatttacactaaattttagttttgtggtccaatgcacaatttcaaaattttgatgtaaaatttaagataattaatgttttatttttaaaaaaataaaatctaataactttaaaattaattttattattattttaatttgtaagataataaaataataatataaatatttnnnaatttgatgtgatagttaaatatattaataaaataatagaaatgacataaatgaaaaaaaaatagtgcatctattgttgtgtaaattttacatcatagaaaatgttatgtcaaatttggtacaaaatttgttatataccaaatttacatcactttttgacacattattggagcacactttttattaaataagttatattttaattttttaccacttatttacacttctattggagatgctcttaatagtacaaaatgataaaagtgtaaattaaggctcaaaaaacacaaaattatatacaagctacaaaaaattgggaggagcaaggcacctacgagcactcacattcagctcccttaaaatatttttatatgtaaaaattaagctaaaaatagttaaatggctcatacatcatatgagttactctaaaattattttaaagaattatacagtaacttttttaaatgcgtagctacaattatttattgagatatatttattttattattatattactctctcactcctctttcttaccatttctttatttattttattgatttttctctattatttaaatgtgtattgaaaataataatatttaaatgatatggagataaaataaagaaattaatgtataatgtaatgtaaaagtttgaggtaaaataaaaaaaaaaaataaaattttagtaaaatattataaaagatagaataaagaagctgttaggaatgttcaaagtcactcgcctccgtacaatacaactttgtagcatacaaaatttagggtaaaattgttaattacagtacaacctctatttaagaataatctctaatttgttataagaaaatcaagtcctaatttgggccagttataaataag

SEQ ID NO: 126208 - DNA, 4384 bp, Cannabis sativa
  modified_base (4288)..(4289): a, c, t, g, unknown or other
  modified_base (4322)..(4324): a, c, t, g, unknown or other
cctatgctagctagggtgttacacaagggctgatcggttaacacttttatgggatgtgcctggaagtacggccgtagcttacgagatgcgtgaactaggcagaaagcgagtttttctaaagggggatatcttgcctctacccctagtaaccttttacttacgtagtaaataggttgatggtgcttaccctcttctcgcactattgctgcagtaatcgcatcttctgaggtagccaaataaagaaatagcgtctctctggttattggttttgccaaaactggaggcatcgccagatgcctttttatgttttgaaaggcctctttgcactcttttgtccactcaaactttttattgcctcgtagtacattgaagaacgacacacacttatcagttgacttcgaaatgaatctgttaagtgcatccattcttcctgtcagggctcttacttccttaggctttttcggtgatggcatgtctattaatgccttgattttctcgggatttgcttcgatacccctcgcattaactatgaatcccaaaaattttcctgaggaaactccaaaggaacatttttttgagtttagcttcatgttatacttctttaacatcttgaagcattctgcgaggtcagttgtatgatctgtactctttattggttttaccaacatatcatcgacgtaaacctccatagtcagttcgatctagtttgcaaacatttcgtgcaccaatccctgatatgttgccctagtattctttaacccaaacgacatgactttataacaatagagttccatgttagttatgaagcttgtatgctcttgatcttggacatgcatttttatctggtaatatccagaatatgcatccatgaatgacataagctcgtgcccagtagttgcatccactaactggtcgatcttgggtaatggaaaattatcttttgggcacgccttattcagatcagagaaatcaatacaagttctccaagttccgttaggctttgggacgagaacaggattggctatccacgaggcataaaacaccttgcgtataaagtcattgaccaacacttatccacttcctgttttagtgccccttgtctctcgaaatcacagggtctccttttctgtctcttcgctgggtagtttggctcaatatttaaatgatggcagataatgttagggtcgatccctatcatatcttcatggctccaggcgaattgatcctggttcgcccttaggaaacttattagctgctatttgagctgcttgtctaggttcttcccaatgtatacacactttgtgagatttcttgggtcgagaataacctattccaattattcaattggttttactaggtttctctcatcttgaactcgtgggtcaagatcttcgtatttccttacattttcttttgccaagatcgccattaattggtgactgactttcctatgctataactctatgcgatagcaattgcgggccaacatttgatcaccttgcacaacttcacaccttctggtgtttggaacttcaaggataggtgcttgatcgaacaaactgccccttgtccgattagtgctggacgacccaacaatatgttgtaagccgatggcatatcaacaactaagaagtcttgcataacagtggcagataggggtgcctcgcctaaggttaatgcgagctcgattatgccaagactggcaatgctatctccagtgaagccgcaaagatttaccatataaggcctcaatttggctttttcgagccccatcttcctcagcgtttctttataaaggatatttactgagcttccattgtctattagcaccctcttgatccttttatttgtgagttgaatggtaatcaccaatggatcaacgtgaggatatctcatgtttttctcgtcttcctccgtgaatataattggcggttcctctgttttcaccttcttggaaggttctggggcaaatgccgactgctcgttctttatctctttcacacatcttttctgggcgttattgctttcccctacgatatgtggccctcccgaaataaccaggatgtcctccccttcaaccaaaagaggttgtaacccctggttgtttgggttattaggcagactgtgctggttgtatccgtggccttgtcttttcacatactgtttaaagtgtcctcgagcaatgagactttctatctcatctttcaattggcaacattcgtcggtcgtgtgcccaatatccttatggaatttacaatacctgttaggatctcttttgctcctcgcattcctcatgggctcaggcttgtcgaaggcaaccattttctcatgtgcgaagtaaatattctcccgagtttcattaagctcggtataaatagtatacactggcacatacttatcatgcttcttttgtttattaccatcctttctcttcgagccagaagccctcgagttatcgattctcgtcgaaacagtacttgtcgaaacattgttgggtttacctcccgagcctgtttttaacaaattcatttcctttcggaccttttctttccaaacgaatacctgaatttcgttgaacttagagatgtttcttactggatgaccctgtaagtcttcccacagctcgcccccaacggttgatggatcagtagagatccccgcctgaagggctttaagttgtaaactatcatccaaattcctaaccctagcagcagccgtgctaaaatgacttaagtatgccttaaatttttcgccagcctgttactttatattggttagcgaggccgcttcgggtcgtctatccctagcagcctggaactatttcttgaaatccctggacagctgctcctaggaagttattgaatggtgagtaaatttgttaaaccagctgcttgctgctccaacaagcgaggtggggaacaagatacaacgtaaattcttcgtcacattactaactcgcattattgtattaaagttgttcaaatgcgagaccagatcagtggttccgtcatacgacgagacatgcgggtttttgaatcccaaaggaaaaaaagtattcatgatatctgggtgatatggctcgagctcctcgtctgagtcgtatcgagattatctccctagtttccccacttgatatctcctgaacttgtcctccaactcgtctattcgcaattggatgggatcctcttgctttggactgagttattgatgaaggtcaggtttctttcgatttaagtgctctcgtagattcggttgggagtaattgctgatagagctcatcttactcacagatcgcgtcctactcatagacttcgtcctgctaatggactttgtctttgagtgactcgcggatttactggttcccatgctttctcgatcattagctcgttgagtactttttcctctttgagttgatcaactttgggtccttgaccgccttgaggtcacacttgcttcatcacgttgtgttctttccccatgagtgtggtttgtcctatttctcttattacagtctgtacgagccctcacttcatgggttgggaagagcgttggtgattccttgtaggtgaccttcgttctccaagttgattcccaagatcctcctcattttcatgaggaatttctcattcatcagtttctggttgcctcccattctcattttcgtgagagggttttggttgatcattttgatttttagggggtatctcattttacttgggttgttcttcccgggcattttcctgtctcctagtttgtgagccacgaggcctgcctatggtcttatcactctaggttcaggttgattttgagcatttgtcccctgtgccgccctggccatggctgcatcacgttctaattcagcgttccgctgctgcgcctcttccagatggggtcttaggcgacaatttttcgtttcataagtacattctcccataggctaggtgcctccacaattgggctcttcatccctcgtcccagggttctggccactcccacactgagttctcctcgagcgtgtttttcgcgtactaggaccaacttctggttgggtcctccgagaacgtgtggtcctagtgttggggccaccctcaggttgactcctcctggaatgggtggtgcgtctagactgcgggttggtagaccttttggagcccatgggctctttcccaggatgatgatgagtttcctcatgtggggtattaacattttctcggttttcagccatgaaggaggcaatttttcttcaaaaatgaggagggtttcttctgagctttttcacagaggctcnnaatgaaagcaccaaactgttaacgtagattttnnntaaccaaatttgagcctaacagtgacaatctcacatagaaaaaataaaggttgtaaaata

SEQ ID NO: 126209 - DNA, 2956 bp, Cannabis sativa
attatattgaaattggttttatttagggcacaaaacccaacacaactcacgttccaaacagttaaaaaaaaaaaatgtgcacacaaacggcaatacactaccataggtacgtactagttggaattaaaaacattattttgaaggtaattaaaaattatatgttacggagagtcatgtcctctgacatgtgatttgtctctattctatagagcttttgttcctttgttcattgtttttttctgacaattcaccatggcgtccagtattcgaaccacaataggattagaacagcaatggaaagacatctgcttagaagaagaagaagaaaatgaagtggcatacgaggaggaggaagtcaaagagattgattttgacgattgttggtgcctcattgggcgactattaactgggaaagtgtcttattttcagatatttcaaaacataatcgcggatttatggaaaccctagaaaggcatgtatatcaagattcttgaacaaaaccggtttctatttcagttttaccatgaaatagatatcaaacgtgttctcatgggcagtccgtggacgtatgatcgtaagaaacttattattgagcgcctcaaacaaggagacaattcgagaactattcctctcaacaacattaacatgtgggtgcaagtccacgatctacagactggattcaaaaccgagagggctgtttgtcaagcagggaattatattggaatgtttctcgaatcggatcctaacaactttcaaggtatttggcgtgaatatttacgtgttcgtgtccgactgaatattgaaaaaccattaaagaggcgtatgaagttcaagaagaaaaatggagaggtgttctatgccaatttcaagtacgagagagttcccaccttctgttttatctgcggcatcatgggacattcggagagattttgcagccaactttatgatactcctccggaggcaatcaaaaaaccatacagtaatgacatgcgtgctccttcaaagcggcagagcttcctcacaacttctccctggcttcgtaccagaaagcttgaacctgccactgccggcagtagcaatccaacacaatctgccaccttcaatgcgaagcctcaatcccaggtcgaaaccgtgagtccaaccaggcaacgaaatcaactccctgtctcaaatgttaatttccaaaaatctctccttgattctaggcatacgggtcattcaattttggaaaacccaagtgaggcaactttgaatattcatgagaatgaatcagcatttatgtcagaggatgatatgaatctttatgacttgaagaagaaaagaattgatactctccctaaagggtcggctaagatagtggaagatgatgtgatttgtatttctgagccaaatagttttcatggtaatgatattattgggcttccaaaaaacggggaacaggtgggtcttggtgttcaggcccaccaatcattatgaatgttattagctggaattgtcgcgggcttgggaacccacgggccattcaattccttgttgacatctgtgttcaaaagaagcccaattttatattcctttgtgaaactttatgcaacaatgacattgtggataggctcaaggttcggttgggctttgaaaatagctttactgtgccgacccaaggtagaaaaggtggactagcttttttatggaaaatttctactgatgctcatttgcttaagttttcggcccaccatattgacttggaagttcatgttcctggctttgttcactggcgtcttactgggttctatggagaaccaaaccgctcatgacgccatacaacgtgggagcttttgcgtgagctggccgatgcttcaaccttgccatggtgcattcttggagacttcaacaacatcaccactcatgacgataagaagggtggctggctttatcctgaatcactaatcaatggcttcaatacagctcttcatgactgccaattgtgtgaactacagttgcgtggtcacaaatacacatgggagcgtggaaaagggacccaaaatcacattgaaataaggttagacaaagcttttgctactcagtcttggctaactatttttaatgaggctcgtttgtcaaattttgatttttcgtcctccgatcatactcctattttctttgaacctgctcctgttgttatgaataaaccggttgttgtctttcgctatgaaaatgcttggggccgtgaacctttatgtagtcaaattgtctgaaactgttgggaggttaatgctcatctctctcttgctgataaaactaagctttgtcttgaaactttgctcgattggggctgtgatcttactgggcacttcaagaagtggcaatctaatagcaagaaaaaactatcaagcctcaagtcaagtgacaatccggactcacatgaagattttttgagcgagcaatgtaattattttgagattttagctcagcaagaaatctaatggaagcaacggtcaaaacaattttggttaaatggaggggacaaaaatagcaaatattttcatgccactgcaagctctcgtaaacgaaataatcaaattgtgcagcttcaagatagtgatggtgcttggaaaggctggaattcagggcttgatcaggtaatcattgattatttctcagctctttatactattgatcatgctatttgtggctctgttgtcaatggtatttgccgctcggctacagctgaacaaaatgacaacctgctctgtccaattacaactgatgaagttaagcaagctctcttccaaatgcatcctgacaaagctccaggacctgatggcattagtcccgggttttaccaaaaacattgggacacggttggtactgatcttatcaaacttgttatggacttcttcaacaatgaatgcatgccgattggtcttaatgacactcatctagtgttgattccaaagaa

SEQ ID NO: 126210 - DNA, 1159 bp, Cannabis sativa
  modified_base (126)..(156): a, c, t, g, unknown or other
atactctgttacaaaaaggatacaagggttagagatctgagtagaaggagacattaattccgctgcatcaatgtaaggttttcttaattttatgtgtttatttttcatatttaggatgttaaacannnnnnnnnnnnnnnnnnnnnnnnnnnnnnnaaaataatttccaacaactacatgtctcaaccccccatacacacacggctcgcatgcaagccccctaacggattgaatgttagttccttttatgtgttaattctagtactggaacattacgcacaaattcatatgggatttgaattatacttccactagtgaattaataatacttaaggataaagaagtaattagaaagataaaacagtaatatgaccaaaactaattatgaaccaacacatggagggctaatcactagaattaattatatcaatggacactgcagtaaaactcagtaaatataattttataattactaagagttcaattctatatttttagtggagtaatcatggaattaataaacaaagattatttagttgatgagactcaataaataatctagtttattggagcttagaattataagttcatggtccctgaattgccaccttaaaacactgtcaaggatagggataaagagtagtaatgtcatttggaaaaagctattttgaattggtaaaattgtaattatttatttttgtaataaataaacaatttttcaaattaatttaatagggaagaggcaatatttgttgagataaagattgttaggacaaaagacattaagcttgtctcaaacaagacaagttaggcgcctagcatatagcatgtccctatggagtttgtctttttgggttacttaattatttaattaattcaattaggtaaatatctaatttaaaaagtagttatagatatttcaaagttgttgagatattctctaaagtagttgagagattctctcataaataccagtaaccgaattcgaaaatatatatttatttaaataatcaaatatgatttgattaaatagttttaactgttgggctttgtgccctaaataaaactctattttgatgtaatctttatcatttaattatcaataaagaaacagaagtattttcatcaattattcagtgtgtcatttggttcatgttat

SEQ ID NO: 126211 - DNA, 609 bp, Cannabis sativa
tctggataccagttcatgtcccactcagtcgagtttgtgacaacatttgcctgagttgttgcagcacctgaagcagcattggtgttcccagatggagaaggccctggaaaattcttatcaaatctatagaagcaactttggacagtatgtccaagtttaaggcaaagttggcactgaactttgttgttagttacaggaaatcgactacccctaccaaagttgtaatttcctcgaggattgaacattggatagccaaaattattattgttattaaactgaccaaaatggttacctctaccaatctgctgattgccatagcctgagagtcgattgaatgactgtggtttgtatcctcccctgccaaaatttgctagattagcttctaatccgtgatcaagatccatgactgcaacattggcactgagatcaatttctcgatctgtcttctctattcgagattcagaagctagtaagagggcttctatttcggcaacagtgtactgttcgagacgagtatttgtggatataacaaatgtgtcatattcacttggtaatcctttgaaaatagcacgaacatgatctctaggtgagagaacatctccaactgaa

SEQ ID NO: 126212 - DNA, 1021 bp, Cannabis sativa
ggattagatacctagtagcttttcctctcatcttttttcccttatttttattttcatgagaggatccaggttagaggtaagctgcaataggtgccatctaggttagactatcatccaacatgtcgacttcttcaaggatggtaatgctatgttcttttaagaactgtattagcaccaagtttgccttgtcggtaatggtgctactttccagacgggcaagtgcatctgctatggcactctattctctagggatttaccttattctgtagcctttgagccgacttcgcaagtcttggatcttgctcaaataggctatcattcattcacctcgagtgtgtattcacctatgacttaatttacgactagttgagattcgatgtgtatgtacaggtggtcagcccgtactttgtgcgccagcttgaggccagcgatcagggctttatattcagcctcattgttagaggctttgaagccaaacttgattgccacgtgcagttgtttcccccaagtgtaatgaggtcaatgcctgcaccgaacagttggtcagtgcagcttccgtcaacatgtaatttccattttgattcttcaagttcttgttgttgctcttgctctcgcttctttcgtggctcttgcttttctcctaaatcttgagagatttcaggagatatgcttgtacgtttagccacaaaatctgcaagggcttggccttttatggccactctcggttaaggctgaacatcgagcgagttgaccgagtttaggattcgcgggttttaggttgacaggttttaggtttgcgggttttaggttcaaaaaattgtacccagacccaacccatgaaatggtttgggttcgcaagtttcaggctcacgggtttgcgagttcgggttgaccgggttggtcgggtaaacaagttgacccggtcaactcgttaatttattttttaaaaaaaaaatcaaattttatgtggttttttctatatattaaattaaacatctaagttataaacttataacaccat

SEQ ID NO: 126213 - DNA, 2749 bp, Cannabis sativa
  modified_base (26)..(40): a, c, t, g, unknown or other
ttaatcaacatacttgttagtagatnnnnnnnnnnnnnnnaataatttccaacagttagctacccaggcctggtagaaatcctcaataatgaagttgttattgcggagcttttctacctcctcttttaatgcttgtgccctttctttgtccaacaatcttctttcttactgaacgggatggaagttcggatcgatgtttagggcatgtaaaattataaaaggatcgataccgaccatgtcatcatgtgactaggcaaaaatttataggtttgcacttagaaattttatcaaagctaattttactttaaacaacaaaccgttgcaaatttttagtttcttggttgggatatttgggtcgatttctatctcttccaattcttccactggcccaacatttgtatttggttccccaagtcaatgatccacatcttcgtccctgccttgggtggttccctatttggcaatgctttttcccttgtccaaactctggccaataaggacctgtaaatgcccgtccactggtggaggcattagtaggccttggttgttgtctgcttgggcggcccgttgattttggtcggccttgacgtatttctacacgtgcgggttattcttccttattaggaattcaatgtcatgctacaggttgttacactcattagtgtcatggccatattccccataaaaaggcaaaattttgacatgtcccttttgcttatgtcatttttcatgggagtagcttttttgtacgggactacaaattaggtttccatgtagattgtttctagatcgttggttaggacaaaaaaggtagtaaacttggaaggattttctctaggggttgattcggctttgcctgcgaactttcgcttctttccattgccttgtatgccattattgttggatcttttgtctctcgaagctaagctgctaggatactgtgagttctgattagatgctcctaccaaggggacctgtggtttgcccgacctaggttcgccatctacccgatgaatggcctcctcgagcttggtccaaaaaatcaaccatagatcctacagggccacttttcttgatatccttccacagctctccaagtacttcattgcccccagtattgcggccatcctcccttcttcaattaaccaggctactttcgtagcttctgtcatgaatttgcttatatatgctcaaagaggctctcctggtctttgtttcacttcgaccaggtcttctagatgtaatgggagttggtgagaagaagagaactgtgcatggaactctgaggagaaaactttccatgaattaaaccttcttagtggtaacttaaaatacaactaatgtgcggcttctgaaagtgtagaagggaatactctacaccgcatatcacctcgtaccccttgtaaatctatttgcatttcaaatacttaagatgtgacaagggatcctccttccctatgtacatcttccaggttgacatcttgagcttgaggggtagctccaaaacgttgatctcgggattgaaggttgatctgcgagctctgaccaactcgagatcagtgagtttttggcaagccaggccttggaaaatattttttaaatcatctgaatgtgcttgcacagatgggtgaactagctcagcctcttagccgacttgtgtcacatcaggatctcttagagttcggtattggacacggatactgggttgagcagtcagttgacatattgttcgtccagacccctccttctattcaaatcatccctcagatcgtgggctgtacctgtctcaatgattggttggtttggccggtctgttggacagaattgtcagtttggatggagttattaggtataactccacctaaggaattatcggataaggtctggtcggctaccacttggcccacaggtggaacccttgactagggattggatggctaaccgctatgagtttgggcgatatgcccagcaaaatttttttttttgtgccgcctagcgggatactggacgtagcagctggttgctgattagcaacttgataggctttgtgtatcagtacggtggcatgtcttgttctgtcatcgatggctacctgttgagccttcaatgtttccatctccctatccctccattcgatgaactaacacctctgctcttcgaatgcaaggttcattgcagcacggagctcttcttggtcttaatgagaggtattagtgtgaccttgcatgagtccaagcgcattgcagaggttttgaaactcagtatcatcccctattattgtctgagcattagttatggatgggatttcagtgctgggagtactctaatcggctgctgatctggtgttcccagtctcttacacaccaggtgtgatcctagccagaggggacatcacaccttggctcacagtaggtggctgcatgtttggttgttcaagattggttcctggtgggacccttgtattcctaggagtctacaatgcaggatctgttaacagtgggtcactttgatcaaccacgcctctgcgagtttggaccaccattttgtgtgtctgataaaacttaaggaaaagagcaaacttgaatttttaatgtcattgaaagcaccaaaatgttgacctcacttttaatcaacgatagtgagtcaattaataagcaataagaaacgtaattaatatagagcaaaaatcagtaagcaataaagaacacaagaatttaaagaggtttggcccctttagttcggtaatagc

SEQ ID NO: 126214 - DNA, 559 bp, Cannabis sativa
ccctagggttgttttcttctttccacaaatcaaaagtgttgcccatgtcgtcgggtcaaatttctgggtaaacacacattaacccataaaataagacaattttcttaattatcattaaggagtataccgtctccccaaaacaaatagttattttctaaatttttctaatgtcatttaatttggaaaatacaaatttaacttcaaacctgatataattcaaattaaaatttagaaaactttattaacttttattttaattataaacaagtacttttaaaaataaaaatttcctacaataatatcgatcataccacaaaattatcctaaataattcgcagcaatccataattattgatgcaaaagtttttgaaggcatcaaagtcatcaaactatggcgcataaatcatcccaatacataagacttctcatcatgtatttaatatccattaaaaataaagggaaatttgataatccatgctaaaaaattagacatggtgtttaattatacccaattataacacatagaaaaaatatacctatctttcaattttcttccaaa

SEQ ID NO: 126215 - DNA, 672 bp, Cannabis sativa
ttttagcaaatacactttttttttctgggttttcttcagtcccaaactgccctctttctctccctctttctatgcttttgttcaaatacaattttaagagaaaatgcttgatttggtgtggattttgtgtgaatctttattagaagcatgaggaatttgtagtaaaactttctaatcccttttgcttatgttatttatgattttatttgaagctataaaaccttgttcttgttgttcttagattatagatgcatgttgtggtgattttggtggattatgatgattttggtgtggctagattattgtgttcttatattgagcatctagattgaagtaggaggcttttgattttattttgggtattcaaattttgagaatttactttgaagttctgagatttggctttgaagattttaatgtttgaagtgtcaaaacttttgagattttgtgttgtatatgattgcgtagcatgctttgtgtatgattatgaattatgtgaagttaggtttaagtttgggcatttttagaccttaaaaataggattttctgggttttctggaccaagttgccacgaccaagtttggcagtgagcatgcctgtttttcctgattttattttggccataacttttgactcgggactccattttggacgttctttatatcgttggaa

SEQ ID NO: 126216 - DNA, 751 bp, Cannabis sativa
tttaaataaagtatttttatacgaaagagtaaatgaattttcaaataaaaaattatttaatgaattttaattcgtgttttatttcgtgcttacatgttgtgttttcgtgctaagaaatttgtatttttgtgtcgtgctttcgtgattgttctgtcgtgtcgtgctcaaatctatattttttgtgtcgtgcctaggtccatatttattcatattgtgctgggctcaaatttatattttttttcgtattgtgttgtactcgtgtaatttgtgctcgtgccgatttcatgccgtgttaaaaagctctaaatgtacagttttaaagagaggtaaaagcacattattttgttatatcagtttgttttgcatacattttacaattgggattattttatataaatgtagacaaaattctacacttgtagggtgtactgtttttgttatatttttatagattttatattttttataaaaatagggagtattattttttttattatttttgaaatatttttattttaatttattgttacgagaaagcaatatgatttttcttacaataatatagagtgttgttttcacgttattgttacggaaaaaaaagtatttttctctaaaaagaaaaaagaataaggaaatcttgtaaaaaaaaaaaaaacagaactcgtaaaatgtaaataaaaaaattatgtattgtgtaatttttctttacaaatagtggaagttatataaaaaaaaaaaaaaaagtaggaaa

SEQ ID NO: 126217 - DNA, 578 bp, Cannabis sativa
cttatactctagttctatgagggtgtgaatcaaatcgtaagcgacaaaataagatcagtggttaatattcaaactaatcattacatgcaatatctatcaaggggtgatcttatttgcactaaatctttcaactaacatcactaacatgcttgtgacctcatagagaattgaacctttctgatgtacaaccaaatacgacaaattgcctataaaattttagctagaaaatcaaccaacagaactctatcgtcttatagttttcattattaattcaagtccaaatatattagtattaaaatatgagcatttaaccttcacatctaattatgattttttgtatttttttaagaaataaaagtataattgcatttcacaaaatttgttgtgagtcacaaaaattggtttttaaataatcaatcaagtatgtgaaaagaaaaaatcaatgtgcattcacaggtaattaatgtgcaccatatgttttaagttgtaagtattacattaaggtgacgtttgattggaggtaatgaaatggaatagaatggaaaggaaacaatttttattccattcttttgtttggt

SEQ ID NO: 126218 - DNA, 683 bp, Cannabis sativa
tcaaacatattctatcttttttcatattttctttctttttttaagtcaatgttaattaatatatcataaaaatcctaacgttccaactttcacataatatgatattctatccttttcacattttccaaaatagttaatgttaattaatatgaattaatatagcataaaacccctaacgttccaacttatttctattctttcttttcctcctatatagtccatgaaaagaaggaaaatttttattccttccttatgagacgctcatggtccaatttgattgtcgaagagtacaccaatttctaattgattgtgttcagcttctcacctctcgccctctcatattccctccgtcatggtgtcttattcgcctacctatttcacttttttttttttttttttcaattttcttttacattttcaatgtttgattttaattgggacatatcttattttaatttttatgaattggttggtgttcaggacttcagcgatattttggatgcatagaagaggggccaaaattatatctctatgctaacgattactgtatgtgaatttagaatattttttcattttatgctgatttcattattttttttatcgggacgatgtgttttatgttaattttgaacgttttctattttgttgtttatatcgattattataggtgatgataacctaat

SEQ ID NO: 126219 - DNA, 1572 bp, Cannabis sativa
  modified_base (1463)..(1468): a, c, t, g, unknown or other
  modified_base (1513)..(1531): a, c, t, g, unknown or other
actaattctatgaatttcatttaaagagaatcatattgctttatgagtgcttatttgattaacattgaataaagatatcatgtgagttattctaggttaaatctatcattgcttgagagaggttaataggttacattaggattcttgaaactacaaattataggataaattgaaataatcaataaatggagattcctagtttgaaatggggaaatcaatgctctaggtttttactttctgattaaacatcgttgtttctttatttattttttttatttatcttattatttatttcttaattataatttattttgtgttatctaattaaagtataaaattaaaaagtataatatttagtaaaatttaataatcaatccttgtgggttcgacaacctttttagtattaaaactttactataataacactgtacgcttgtagtaaaaattgtgtatcagggaagacctatacagagcagttacatcatttttagaatcaagaaaaatacttaaggagatgaacactactattttgacaatggtgcctaaggttaaatgtcctaattctatcaaggattttaggccaattgcttgttgcaatgttgtgtataagattacaactaagcttttgtgtttagaatcaagctcatacaacctgacttggtttctcaaaatcaaggaggatttattcaaggcagattcattgagcataacatcatgatttgtcaagatctagggagacactatggaaggaaatcaaacaaggcaaattgtttgataaaattagacttacaaaaagcctatgatactatcgaatgggactttttggaggagatgctacagactttaaagttctctgaatctttcactaatttgattatgaattgtgagaactcctagattttccattatgtttaatggctctgtacatggatttttgaatcgaataggggattgagacagggtgatccaatgtctccccttctctttgtgattgggatggagtatttatcaaggatattgaacgtggtaggcaacaaggaagacttctcttttcatgagagatgctctgagcttaaaataaatcacctgacatttgcaggtgatgtgcttctgttcagtaaaggggagttcaaaagtgtttattatttgatgcaaggattaaagttttttttacaaacttcaaggctgcaaccaaaccctcaaaaatctgcagtgtattgcagcaacatggccagtaatgaagtcaatagaatacttgaagcatcgggattttcgttgaaagaaatgcatttccattacttaagggtgtcaatttgtgctaagaagaatgaatgctttgctcttgctgagaagatgacagcaagaattcgaacctggagttcaaagaatctctcatttgcagcaagaactgtgttgataaactcagtcctattggaaatactgttggaatatttattttaccnnnnnnttagatctactcacaagtaggttgtttaaacaccctaaatatgannnnnnnnnnnnnnnnnnntaaacacatataaagttaagaagaccttacattgatgcagc

SEQ ID NO: 126220 - DNA, 2243 bp, Cannabis sativa
aaccctttttagccactcttcccagtgactcatacaagttgagtccgttcttatctgccacatacatccaaaccacactgcccttgcaaagttgcagtgccaaagcagatggatagaggattcagctccatccgtgcataggaagcacttcgtgtctgctataggaaacagagaatttaatttctcctttgtgagaagacaattggccataactttccaccatatcatttttagtctttcatgaattttggaaccccaaataactctccacttgttgtcacattcaaccatagagtccatgttctttatcactttgtaagctgatttgaccgagaactggccgttactctcaggcagccacaaccaagagtcctctcgaggtgtactaggcagcgagatattcaaaatacgcttggcatctgcctctagaaaccacattcggatgagcgattaattccagccaccttgagaaataaagttacaaaccatactcatgcccgcggaggcatcaaatctgggtttaggttgaagcataccccctggaacccaaggatcaaaccaaatggaagtcgagttcccgtcaccaatcttgcgacataacccctttcccaacttctctcggatctttagaatggctttccaaagaggtgaatctgaatttttaatctcaacatcgaggaagctttgatgctttaagtatttagcctccatgaggtgacgccatagactttctttgtctgttaatattttccatgcccacttcattaagaacgccttgttaatggcctcacttgatttaaagccaagacctccattgactttaggacgacagagagtctcccaggctatcggatgtaattttctctgttgagaagtatcaccccaccagaaatccctgagaagcttgtcgatttggtgtgccgttgaggatggaaccacatcggaggatgcaacatagttagccaaggaggagcccacgtttttgatgaggcatgctttacccgcgtaggatagaagcttagatttccaaccttgcactctagccaacactctgtccacaagatattttgtatcatcggtacgcttaagggacctgaataaaggtatgcccaagtatgatgtctttttggacattttcttcatccccaacagctgagtaattgagtgtgccgttcgcggagggaccgttttggagaagaaaactgatgatttctccacatttacagtttttccggagtgcttgcagtattccttcaagctatccatgaactgactcgcttcgcggagtgtggcctgaccaaataaaatgatatcgtccgcgaagagaaggtggctcacggccaggccttccttccccattttgaaacctttgatcagacccctctccactttgtcaataattattttggaaagtacatccgctccaaggataaacagtgctggggagagcgggtcgccttgtcgtaagccccgttgaggttggaattttcctgtgactgacccattgagaaggagcttaatctcttccaccataatacaagtttttgtccattggatgaaccgactcgggaagcctattctgcgaagaaccgtgtcaatgaaatcccattccattttatcatacgccttttccatatcgagtttgatcatcatgaatcctctcttgcctttctttctattcattacgtggactatctctctagcaatcatagagttctccactatgtgtcttcctttaacaaaggtcgcttggttgggagagattactttatttagaatccatctcatcctagaggcgagaaattttgaaattaccttgtaggagatgttgcagagggctatcggtctgaaatccgtaacaagagccggagattccttcttgggaattagcactattgatgtatcgttgataactcttggtagctcatttgtattaaaaaaatgcagcaccatttcaaacaaatcggcttgaacagcctgccaatgatgagcataaaaactggttgggaggctatccgggcccggggctttatccctgcccatttcgaaaagagccgaagtaatttcctcaactgagggggtaatttgcaaattctccaagtcatcatcatcaaccattggatggagtatatgatcaagtgtgtccgaagcacaagtagaagttttttgaaataactccttgaatttggatagaaagcattcagagatttcttttggatcttctatccagtcggttccattca

SEQ ID NO: 126221 - DNA, 2359 bp, Cannabis sativa
gagtgcttttcaagttaataaaaaaaatttcccctttctctcaaaaaaaaaaaaaatgccacctagatctcgtttagttaaatttctacttttacttatagcgagaattagaagtataaattttaatttatttttactgtttggataattattgtaaaaatattaattttgtaaaaaaatacttttaatcaggaaaatagtcatttttatatttttaaaatgtttagatatcattgaaaaataattttttgtgagtaaattaaaaattatgtaatttattttagttttgaaaattattttattttacaccacaataaatataattttttatttactatattgtcacttattaatacaaataataactttttatatttttatttatatatttaatatattttttatatactttcaaatgtaatatttttgttaagtttttgcaccattttttaatgtttttgatgtcttttacggttaatgtgccttttatagcatttgtgccatttttatgatttgtccttatttgtttaatgtagttttgtgttatgatcaatagacaaaagaagtgatccattttgtgctcatgatttctacttaaacgagttttcacttttaacacataagtatttcaagtctttttaagtccttatatttaagatagattggtttactatcgttctttcactttatatttttttttatattgtgtaataataaagttttactttttgttattttgtaggttattttgtggagagtctacacttacacataatttatcgataagtttaattttaaatatattctgtttgatattaattttatcagttttattagggtgttagtatggtgttactagtcaaagggtaatacctttggctagttttatttagaaattttgttggttttttagttttttagtaatgttgatgatatgggttgtgtgttaattttctaagtttattttgtaatttttattttgaagattgtcattctaatataactgtggcttttggtttggtgttgcgatattttttcagttttgttagctctgctgacaacttttaataattggaaggtgtttgctcaatgtgatggggtgctgttgaagacgttatagctttattgtcaaaattttcgagggtaattttgtctcatgtggctcgcaattagttttatgcagctcatggtttcgcaaaatatgcctttcaattaaacgataagctatcctggttcgaggaggttccaccgccgattgtagtttgctgctttgttaatcatgtgtgactctgttcaccacgtaaaaaaaaagtaatatttttgttgattgtttacacatttatattaaaataaagttaattttactcttagtgtattggagtataattgtaaaattttgaccaaatataatataaacctattttttgagccaaatttaatacaaaatttacatcattcattagagatggtttaacaaatccaataactcacatcaaataaatatattttgcttaaaatatctcacattttatactatcaaaagagtaagcttaagtcttaaatctcaaatcttgaatcttaatttttatctcacatttttatctattgttggtcttcatgttgccttattagcattgttacttgatggctctccaacactggtgtgtattgtgtaattactctcttttttagattttgttaattgttgtgatgattctttttgaattgcttaatgttgatttttctatgtttagaagcgagaaaggaaagaactgttacaatgttctcccttcaagtttttattgggcttttacattcacggaatgatggttcttatacataagtatgtcactctagctgcttcttggaatgacgactgatcctacagaccaaagatgagctgtcagaaaacaagatgcaccttgttgatataaatagtaccaattaatctatttaagtcctatttgattgtgtaatcttatacttacacacttttagaatcattacacagttactcttggtgctatattatttttgcttgcctttctttatgcattatggcatatgggcattcactataacaaaatcaataggaaaatttgatgtttatcttctttcttatcttttcatttcccaataagccttgtaagagaaccagaatattaattgagggaccggaatattaattgagggaccttttgtttcaatgaaaatattatattacttttcatactctaatgaaaaaagtccacaacactgcctataagtatagaatctatttttattcatactcaaataaatactcttattaaaatttactttctacatgccaaaaggccaaaaggattgccaaattaat

SEQ ID NO: 126222 - DNA, 557 bp, Cannabis sativa
ttactttatgatccttgaatttgtgttgtaacatgcctttagtcaaggatatatgatcactcaattcagtattgcgcttaatgaccatttatcatgtctctttatggctaaataattaatgtcgatgtactatcgtcgaccattactcttatagttcttagctataaaaactgtagctgaatttgtcacaaaattttcttaatggcctgaaaatataattttgaactctaggcctggtatgaaactctataatacaccatgcaatatgtatcctcaaaataataaataaatctgaggaaataataattaaggctctccacaatacaacttattgataatcttaaggacgtactcaaatattgatttacgtgattcaacaaccagtgaagtacgttggaattggttatttatttcttaaagatatgtatgaatttaatctttagtatcttaaagatttctcatcactttgtatgaaaaataaagtggtcttaactttagttattctgatactacttaacgatcctgaaacaaatgtaatgcaaagtcttattcagact

SEQ ID NO: 126223 - DNA, 1058 bp, Cannabis sativa
ctctgtataaggctcggtagtgagaccattatagtcaattgtataacttaggacttaatatatgtcttagttagtgtacttaaaatggtacttggttcataattgaccctgtacatagtgattaacctggaaggtacccttgggtactgttgactagaatgcatttgtagctttgtcaggttgctcacctccctttatctcttctatgcaggtggttttgggtgctagataggggaggtgacactcgtctaggtcccttggttattctgttgtcatggccaaaacaaaacagacttgtcgtagagcgccttcatgtaccgccatgtagccagtgtggctacaagaggctgggtcagaattatagaagaggctattcaccctcatgttgatattgatctagaggttaattagggggctaatagtcccgacgttgactctaatcttgaggaggctgcgtcggttaggagaatgagataaaaaaaacctgtattgtcctttccaactctctcttaggtcattacgatgctaatggtaacctgctgaataggcttggtgagccttcagtgcttggcttggatcaatcttttgagcctgagatgttggatgcaaaatcacagggagacagttgggtctctcctgcttctaccctctcttatgatgcttttagcaagatactttctagtggcttagtgagggtgtccattgaaagataccttgtagagattactggggtcaccgacttccccttggttggttggcttggttatagtgtcatattgagcaggggcagtgttgccacttcatccatacttctaagacattgatgcttacttcaggatgtgtccgacacaattcacccagaaaagtatcaagtacctttcgacgatgttctttttatatagggagataggctagactcagcctactcctatgatatcggatattactttgacctgtagtgtgctttgaagtagaatagaactaggtacttccactctagctaagtcaaccactagtggttgggtgacaccaatagcacagccatgtcaaaagttggt

SEQ ID NO: 126224 - DNA, 1097 bp, Cannabis sativa
  modified_base (1038)..(1043): a, c, t, g, unknown or other
tgaggggggcggtcggccgtgggtggtctgcgtgtgtgggtgcggcaccgagcgtgagagaaagagagaaagagaggcgaaagagagagagaggaggcaccaggtttcaaatggggggggtattgtgggaattaagaaaatgttatcccattttaccaatatcccctattttaagtttaggaaaaaaaaattatcccctaatgcaagcatagaaattcaaatttcccattaaattactatgtatgaaaatagtgtagagagattaaagagctttgattatatatagtgagagtggaagagaagttcatgaaaagtggcttttgagagactaagtaaaaatattctcaagacaaatcactaacataattttttttagtatcctaacataaaaatttaaaatcatatattatattaggtaatctataatacaccttatgtggtaaacagtaaaaaaatattttaattttattttagtcactattaattatttaaatgtttttgaaaatttttatacgaaaataaatacaaatatagtatattattatgaaaatcaattagattaaaaaaaattaaattattctaaataacgaaacagataagtgatgcttaaaaaaagtttattcgcatagtttattttagaacttctttgactttttttttcatttataaaaataaaaataacattacgtcaaaatagaaataacataacctcaaaatagaaataacatagcctcaaaatgaaaataacttttataaaatagaaatagcaaaatctcgaaatagaaatagcataacttcaaaatagaaacaacttttataaaaataataaaaaaaaaatgaaaaaaaaaatgcagtatacatggcaattcccgactattagaactttttcattaccgttgttttttctaattattttatttaaatattttatcaatttttaaattaatgtagaattaggttcttggaagcggcgcctgagtcaaaaacattagacagcctatgatagggttgttcatccaatccaatccgcactttttnnnnnnaacaacatccaatccgcactaagtgcggatttcagtttttggatccaatccaat

SEQ ID NO: 126225 - DNA, 758 bp, Cannabis sativa
  modified_base (88)..(89): a, c, t, g, unknown or other
agcatactttaccaatatcctggaaaggacataccaattatccatggtgtaagtaaactttatcattgattatcacgtcagtgtaaanncagtgcactgatgaatcatgagacttacattttgaggcatataatcaaaattactttccactatgatgacatcactataattgtaaattactatttgtgtagaatttatgaaaaattgtatattatgctatattcatggatataacatgttaacttaaatgaatttaaatcttctattaataacaaataagcatatattaaaatgagttttatttagggcataaaattttaataatctccaatccaatgttcacctgtgaaaagaataatgattttgaccgttcctaatggataaaagctttcttcacatgctttcataacttccaaatgttattatgtttttaattacatatatcaaagtttgattcacatgttataattctatttcataattgtgttcaaccgatccaatccgtactaagtgcagattttgtatcttgaatccaatccaatctgcgcaataactcaaatttactgcaatcccattcgcatacagattggatcgattatattcgattggttacttttcattattatgttatttaatatttattacaacatatattttttcacatatttaataacaaaataaaaaaaattattgttattttatgtctccaataataaattagaataaataacataacaaattcaaaagaagaaaaatat

SEQ ID NO: 126226 - DNA, 1819 bp, Cannabis sativa
tcggaccccatggtccgaccatcggacctggggttgtgggatgccgagatagagagagaaagagagatgatgtgagagtttgaggggtatttttggggttttgaaaaactaatgtattgtttgactttcagcaataaaattagttattttattaaaaaaaatataaatacactcttttcttaataattatgattggatgttttaataatgcacaacattagaaagaagagataattacatgacatactaaattttgtaaagaatttacatttttatatttaaagttttttttatatttttataatattctataaaaatacaaaataaaaattacatgaaagtaacatcaaaacaattacaaagcaacataagaaaataatatacaaataacaaaatatcaacaataatataacaagaacacaacataaaaatacaccaaaaggccaaattttatgtaaataaaatttaaaaactgtaatgttgaaaactccatatagatcgtatttttgtaattttttttgtatgaaattgtccctaaatagaatgtagtgatacaccatattctacctgtctgggcatttggaaaaaaaatttagtcaaattttaattcatattcgtatacgttatacttattcaagacatcatacaaaattttaaaaaattcagaataacttacagtatacaaatcaatgttcaaaccttttattttacacgcgtgcaatagactctttcaaaaccccatttttgacgtgataaattttcttctgaaatttctcaaaaattttgccagatatcttaaataattacaatgtatatgaccataaaaaaattagactaaatatttttttagatactgaaacagataagagtacatcggtacacctatttcaatagagtatattgtagaattttctattattattttacataaaagaatatattttaatttttaaaaaatatagctatcgaacaaaaacaaattatggtgcttatacaatccacacccatattgcgccccttatctgtttcgacattcagaagaattttttagattaatatttttatacgtgtacgttataattatttaagacatcatacaaaattctaagaaatttggaataatttacaatatagaaaatactgtttaaagagtctatttcacacacgtataaaataaaagaatcacacgtgcaacaaattgtttgaaacctaatttcatcgtgttaatgttttccaaaggtctcaaaattttgcaaaacatttgaaataactacaacatacgtgattataaaaaaaaatagactaaaagattcttttggatgctgaaataaataagggagcattggtgcatcccttttaggaggatgcattatagaatttttcaataaattatactttaaatattatgacaaaaaattaaaataaaaaaattatattaatttttattagaaaaaaataaaaaaaaaattacctaattaaaaaaaaatatgaaaataaaattaaataagtattgaaactaatacaaaataatgtgagagaaaaagttttaaaaagtattaagatttaagagtgatttttaaaaattattgtaagtttaattttaaattttgtgggtgtacttattattttgtgagtataaatagaactccattttataaaagcatatattaaatgatttaaaaatataaatgttaaaccctaaaaaatattactaagtcatgactttaattttaaaaatagaattttttaaaattttaaatttaataaaaaaaagtattttaataaggctaattagtatgtactaaatcgtgccccctga

SEQ ID NO: 126227 - DNA, 604 bp, Cannabis sativa
ttgtacaattttggaaaatacaggtcaattttgtcatttaacaaaatagagggtcaaattggtaatttttacaaaacacaagatccaaaatagtatttacccaaaaaaatttgaactacaaaattctcctattcatcaaaacagatgtgcaccatacaattttcttatatatatttttggaaaattcaaaaagcacttcatatctataatctatttaacattcctatctataatctatttaacattcaagacaatgttttaattttttttttttttataatagtatacgttgttattatttaaaatatttctataaaatgttaaaaaaattttaaaaaaataacacactaaaaatatagttcaaataaggacgcataactcttttactttatatacatgtgaaatacattaaatattattttttatattgtaaattattttttaatattttttaaaaatttagagaaaattttaaataaatataatattacatgactaaaaagccattcattattaccaggccaaaatattgtcaaaaatattgccttttaaaaaattaaatgtaaattttttaatttaataattataggccaaaatagtagaa

SEQ ID NO: 126228 - DNA, 1382 bp, Cannabis sativa
  modified_base (1332)..(1336): a, c, t, g, unknown or other
cccccagccacagtagtggctaggtggtcggcccctatattgtataaatatatattcatatatgtgtatatataatatatatggtacatatacaatctatacacactataatctattactaattattttattaaataattagtttattttgtatgatatttattttgtcaattcaatttgaatttaaaataaatatagttatggttttagatttaaaattcaaattcaaaatctataaccactttgacttgttaagacaattattgtcttaatttttttcaattaaatgataaaattattttattatttaataattaaagacaaaataaaattgatatatattgtcttaaataaaaatattttatttaagaataaactcattaaaattgttttaatattatcttagataaaatggtttatttaagaataaattaaataaaaaaatatttaattaattaagtggtttacgatgatcatataaaattacaaaatcgctcttagagtgaatcaagatgatggaaatcagatttataatttattttctaatttttttaagagttataaaattagcaataccccaaattttatctaattcatcatcattgtttatttatttcatataaataaatgttcattaataattaatttataacatgattatgcactagcgaataacatgccatacataaaaattccacacagcttaattatcatgcatctcatagtagaaacataatatataaggattgtcctacgtatttattaccgttttgaaaccgaaaatatgtaaatggactaagattaattttcaaattaacttagtaattttaaattaacttaattaatttaaaatggttttaaataattatttaccgagatttttgaaaaactaattatttaatatcagagctaaagaaaatacaattagcagatcaataaataaaaaggacactcagagttttttacgtggttggggtgttaataagcgttagtctatgagtcagtgtagttattagataggctagaaaagcccaaggaattacaatgagtatgagcaatctattctcttcttgagcaagtaagtcaagaatttctaacccttttcatgaaggattcaatgtgtatttatagaataataaaggtcttacttaattactcttttcctctaatggggagtttacataaaatatataaatttgttttatctagttaagctcagcccatgaggcaatacatgtatgttgatttggaaatctgatcacggtgatagttgttcatattgtgtcctttaattatggatagttaatgtgattgttatagtgagatttctcnnnnntagaaactcgagaccagactcctctttaaaggacacgtgtattcag

SEQ ID NO: 126229 - DNA, 992 bp, Cannabis sativa
tttttttgtatgaatacaaaagaaaactataatacaataataataaaaaaaaaacactaaacattagaaacagtgaatgaacaaggcaaggtcttgaggtgcacaaagtcagattcaacagcagtcacattcaataggagtcacatttaacagcagtcacattcaacagcagtcacattcaacagcagtcagattcaacaggagtcacattcaataggagtcacattcaataggagtcatattgaacagtagagatcagttattgaaaataacagctgcagcaatagcaagctttcctgaaaaaagatgaaagagaatacatacatatatacatacatacatattatcagaattaaacagtcagtcttctataaaacataaaagaaaagaaatactaaaatcacataatcagccataaaaattgttcacaacttctctaagcaggttatgagttgaaagtattgtccattttggttcaaaacttatctgtaaagggtaagtattcaaaaattgtttttaacttttcaagacattgtattagttgagagtatacattgaagagttttctctttacagaaatataatagaagaattgtgtgaaaggagaattacaagcatgagtatatcttatattattacaagttcatccacaaagaagcaacaaaatcttcatccaatttgggacacaaattctaaatcttagaactaaacattttgacaaacctaatcgttcaaatgagtatctatctggattgaagagaaggaaaaatgaaaaaaaaaaagaattggataataggtaaatcatatcattacaaggaatgtacctgtgagtgaagtgattgtgttatctggccacccaatcgttgaaacgagtatgtatctgggtttgaatttcaaatatatgattgaaaattaattggaagattttattcatttttacataaaaatcccaaaaaaggaaactttctaagctatctttgtgtgattgtgta

SEQ ID NO: 126230 - DNA, 1268 bp, Cannabis sativa
tggtaaaataatttccaatagagtctatcttacagttgatgtttagacccgatccaaccctccatctcagaccttgcaagagtaattcctttcccaaacaatgcttctccaagttaatgaaggattagaccctaggccagatttaaggaaattaccactggagaaatatctatgttggagcaggttacttaaaagggagttaggagactcaatgatacgccaagcttgtttagccaagagagcttgattaaagtggatgaagttgcgaaatcccaatcctccttgaactttggccttacaaagaaaattccaattcttccagtgaatggtcttacccgaggtagaggaatcccaccaaaatcttgccatcatactttcaatttggtggcacaaagtaacaggcaatcgaaagcaactcattgcataagtgggaatggcttgtactaccgcttttagtaacacttctttaccaccaacagagaataaatgctctttccaagaactaagaagtttcgaaatcttatctgttattcctccaaaaagcttttttttttatccctaccagcaaaagaaggtaaccccaaatattgttcatggcatggttgaataggcataccaagtagatctttgaaaaaaacatgttcatgttgtcttgtgttttccgagaaggagaggacacacttgtctgggttgattaattgacctgagactttgctgtaagtttgaagacatttgtggatagatcgagctgattgttgattggcatgacagaataagacactatcatcagcaaaaaaacaagtgtgatatagaaggagcagatcttgaaattttcaacccttgtaaagcacttgatgcttcttcatattacaggagacgagagagaccctcagcacagataagaaacaaataaggcgaaagcggtcaccttgcctaatacctcgagatggtgtcacttggccttgaattgaaccattcaacaaaaaagagtaagagaccgatgacagacagcaaagaataagattgacaattgttgttccaaaacccatcttgatcataactcgagcaacaaagcaccactccactcgatcgaatgctttgctcatatcaagcttaatagcagcaaacccttttgaacctctttttctattcttcagtgagtgcaattgtaacgcccgtattttataataattataatactacacgaagtctaaattttcaaatttatatatataatgattataaagatcgggatcccgagtatcaaa

SEQ ID NO: 126231 - DNA, 1539 bp, Cannabis sativa
  modified_base (914)..(922): a, c, t, g, unknown or other
atgttggtgttccctcgatggtgtgtattgattattctccatttcaaagattatattttttatttctcaaaatttttaaaaattctttttatgtatgatagtttatgatttgttgaatgaaaattcttagtgcagtactattagttgagttgaattaattttattgattttgtatgggtatcaaatttgagggggtgagttttttttgtgaatatctcgattatgcaaaactatttttgctatctccatactatcggagaatattatcccacatggattaaatataaaagtattgaatcatatataaagaacatgagctactctatcttcatatgagagcagaagccaaatgagtacttttaatttgagattctaggagaaaaattaaaacagtggttgagaaatcgacaaatgtttggggtatcaaaaaaatggaaaatggcgtgtttcgggaggttttcaatcgttttggaaaaatatatagagaaggggaattatcatcctccaaaatctaatcagatccctttcaatccattgatcattaacaccagaagatcttgcaaaagcgatgcattttttttttttttggggttggaagaagcaagatcaaatctgagtgattttttttttattattattttttatttttttatgaaagaagcaagaccacattaaatcacaccacagttctaaattgtttttgaaacttgtgtttcaaaatattattaaaaagtaaaaattaaaaataatctaatacacctaaatattcatcactgctatacactcattcattaatcacctttaaatttttaatctatggccgtaaaaacatccctacatagaaacttattctatacatatataataacactatattaacactatcatgcatgagtatatatatatatatatannnnnnnnnatatatatatatataatattttgagttttatattgtacaaaccattgaaagaaaataatatacagccaaaaggatatacatattaaaatgaaatgaaataattattatatatcgatcaataaaactcaagttttttttaggaaaaaaaaagaacggattaaaaaaccatgtaatgggaaaagtatatgtaagtgatcaaaggaaacaaaatgaaaaacaacactcaaaaagtttcttaaatataattaaattaaaaatcacaccatcacaattatttcaattactttattattcagataaaagttatattattatatatttggtcgcccttggacggcaaaaagagggatttgatgatcatcctcatcttcctataaacaaaccttattttgttacttatatatggcttcaaagttcaaacacacaacataattaaaaatggccctatctcctctcttcctaattcttattctcacaatattatttcatggtaaaataaaggttctagcttctgatcatggttaggttccttctctatatatagaaacataatgttaaaacataagtatttaggggaatatatatgctatttttttaaactttttttttttaaattt

SEQ ID NO: 126232 - DNA, 1210 bp, Cannabis sativa
aacaaaacagaggatccaattggtaacttttacaaaatacagggtccaaaataaaaatgtaatatgggttgagttttttgacatgacaagaaactggcacgagtccggaaagtatgaacattgagcacaactagacacgaaaaagtatggatttggacacgacacgacacaatactacaaattgacacgacacgaaaaatatgtccttagcatgacacaacacgagaaacacgaaagacacaacacgtaagtacgaacaacctagcccaaaaacacaatacacgataagcccaaaaaatacattacgacatgttaaaaaaccttataatttattattaataataataagatatacatttatcaattataaataagttaaaataataataaaatttaaatataatactaaatattataattttataattaaaactattaaaacatgaaaaattaagattatatattaatttatttataatgtgatataaaaattaaatatttataagtaaatatttaaattctaatgttaatatatttttatatgattacttgtaaaatattaatcaaaagttatataaattatataactaaaattttgaaatatacaaataatttagtaattgtaaaaaaaatatatgaaaaagtaaagcacgaatttaagctcgaatataaaaatggactggcctgtttaagaaatacgggcatacacgagcaaagtacgacacgaaaatactgggcctaccctttaaaaatattgacatgacacgacacaacccatatttttctgtggcacagcacaacatgacggataaatacgggttgagccaacacggcacgcacgagcttataatactacaactgttaatgtgataaattctgtcccgtaagaagaacttaaaaaaaagagactttgtaatatcaagtaaaacccacaatatgaacagaaaaagtacgaccaaacaacaaaaataacgctcaaaacattcaaatgtcgttaaagtgaatgttcttattttataactgatacaatcaatatgattactatgccaattataattataagttgtaatgatcttaataggggtgttcattggatcacgtccaatgaatttagacccaaccgatctaatccaattatttattggatattgaattttgccattcgatccaatacaatcgaattgagtcatccgatccaatagatgtattg

SEQ ID NO: 126233 - DNA, 647 bp, Cannabis sativa
gtgacggaaccaacagtataatttaggggaaccaaatttttttttatatgaatagaatattaataaaaaaaaaaattgttggagaatttcttttaaattttatagggataaaaaaaattatataattttatggaaataaacataaaaatgttaaaaatataaattaaaaaaaatatacattttaaaggataaaattattaaaaattaaattttatgcaggtaaaattaaaattatcttaaaatttctatataaaaatgtaatttttcaaaacttaagtggggtcatgtatcccccacatgactcctcgtcgtggctctgtcgctggtagtggaatttgaactcttaaccaaatttctgggagacctggatagttattcggatcgggcattccaagtcgtgataagtattaccaactatacttaattagtagattcttaaccattctcctaggaccaatacgtgtccttctctaaagtgcggacaacaaataggaagactgattattttgaaacaaatgggttatagttttattagtccgcagaacaaatttttccttaaggttacttttttgtaaatgtaatggtcctaaatttaggtgtcgtttggtaatacttttttaatcagttttctgttttttaaaattaaa

SEQ ID NO: 126234 - DNA, 930 bp, Cannabis sativa
atattcatcaatattatgacttcctaagttcctatcaaatttgaaaatgtctctatctcttctctaagcatatcatttttaacaccaaatgtctttctgtttattttctttttaaaaagaaaaagagactttaattttattttttacggaaaaagggaaaagagggaaaaatactcaaaattggcagattaggattagatataattctatatattaattaatggtggtttttgtggcatgagaatggtggttcgagatatttttggtgctgttattgcctctactatttggcatatagatgatcactttctacttgaagttgttgaagcgcttgctttgagtaatgcgcgagtgtgcagtgttatttactgaatttggggaatattcagtttgagacagactatcataatatgatcagtaaaattaataattaaagtttctttgaactctattttaggcttagttcttcaatggattagttgtaattttgttgttttttttgttaaatttagatagtctttttttattggtttagaattgttaattttattgcttatgttaaatttattttatctgtagctactaaaaatgtttgatggctgaagtttgtattgagaatattattatgactgaggtctttgatcaataaatgatctctccaatttttttttagagtttattgcactaaagggtggttgattgcggttattttttcttctaaagacataattagaggtgttcatccaattcaatctgcattattttgtttatagtgcatccaatccatattaagggtggattttaaattttgaatccaatccaagggcaatagctcaaattcaatccaatccaatctgcaaaagtacacattggattgattattttagattgattactttttaatattaaattatttaatatctatgaatt

SEQ ID NO: 126235 - DNA, 1720 bp, Cannabis sativa
atcttatcttattaattaattattggtttatatagtaaattaaatgagaatcatgttttgtcaaaaaaaaaaatgagaatcatgcatgcatgtacatacacatatatttagtgttacaacttataaagatgagtaatatcatgcaatgagtcacacataagattcatcgaaccatttgccaataatatttatacgtatcaatatttagtttattaattaaagtttatagttaaacaattaatatttattatatataatgtgttaattaagttattcataataagttaattaactcatagctagaagaagctaggccttttatattgtacttttttttgagggggactggggtataatagaataattaattatagctgggggtatagtggaagttacgaaaactaaaaataataaaaataaaaaaaaagttaaagctcttatatgtacgtctaattacaatacatcaccactcgtgcactttcgagctaattataaaatttcgcatttacattgtttaatgtgaagtattatgctttaatcaattacttcccatccatgcaacactcataatttatatatatttatatggcactaccattaaaaatataattttttttttatatgtataaatgttatgtgcttggaataggggcggcaaagcatatgcttttgctgcgtgcgtaactcactatcggttcgtttggtatgtcatattataatgtattgtattatataatattatattaaattgtattttatgtaatatttttatgtaaaattatatgtggtattaatttttatgaatacttaaatatataatattttagtacaaattaaaatttaacatagtattatatataaaaatatgatgtataatacaattcaatgtaatataatacaatacgatctaatacgacgttccaaacgaacgttatatctattatatattagtaataaacaatatataaatatatatagatataaattatacatacatatatacataaatagggtggttagcacacatacagctagtaactcctttgcttaaatttttcgaaagtgctggtaattaataataaaagaatggctcaaattcatctatatataaatttaggtgagaattcagtttagatatttggtgacaaattaacactaaaaatttctaaattaaattaattatcatatatacattttaatttcatctatatttcaatttagtttagatatttggtgacaaattaacaaaaacttacaaattaaattaattatcacatatattttttaattaatttatacttccgcgcaagttctataaaaaaatttgacatgctgatattaactgtgctaataaaaaaaaaatcaacattaaaaaaaaacttttataatcgtagtcaatatttattttttttcttaagatagatactattttggacactatcttttacaaaaaaaattaattagactttctgtttcattaatgacaatttgaactcttttttttttttaaaaaaaaaaaaatagtagtattgttgtcggaggaaaaatgagacaacaccaaaatacgcgagtattcgatataaacaagaacacccgctgacagaactacgagtattcacctagagtgaaaaatactcaactacaaattatgaataaaagaataaaaactgtaataacgtaaataagacaaataattatagtggttcagtcagagtttagt

SEQ ID NO: 126236 - DNA, 769 bp, Cannabis sativa
tgtgcctgatgcagggtcaaaacaaatatactggcatgattgaggactgctgttgtgattatgaagtaatagatagtattaatggggaagttttgcaccctctgctacaagagcttgtgacgacctcctttttccggtattttaaggtctgatatctcatagtataactgttttccaacctttttcccgccttcctttaataattttgctctaatatattatgtgctaatattccttttacaagcttaaactcctttttgttcaaaagccttttctgctacctctttttgtttgagttcactgtccaacataaatttcttgttatggcatttgggatcggatgcgggatcataccatggagagtcatgtgtgtgtgtgtgtcctatttaatagattggttgaggtgtcctggcaggaagaatcaggtataccctgaagtaattacaatgcatatccttttcttttcaagtatttaaagatctacggcaactgtggttagaaggtattgtgggcattgtcccagatagaataaatggtagagaattgagcaacatgggctactccactcaactcattgccaattagttttgagatggaaccccatgattctcaatatggtatcaaagccatatcccttgcgggcaagtgatcatatccgaagggaccatatccactctgatacggttcaagattgatgagcaaaaaaatagtcatcatcttgagggggaatattgtggacattgtgtcacataaaataaatggtagagaa

SEQ ID NO: 126237 - DNA, 1045 bp, Cannabis sativa
tataaataaaataattaaaaaaattcttacttttacctatggtggatgatatataattaattttaggtgtgtacatttagtacttagatactaacctaaactcaaatctatatatataagagatatgagacggtgacataacattttaaaatttctataaataacactattaattaaaaataatttatttatatgtctatatgtatatataaaattaaagtatgagaccgtaacagactctgttattctcggtacaaactcaattattatcttaaataatgcacatatataaagctcaaattctaaatagttgggtcggattaacttgattttacatctaatttttttatattttttaaagaaatttatatgaaaaattaataatattaaaatttaatgtaattttattacttaattatcattaaatgaaatataatttattttatatatataattttaaattttttaaacatctgccggaaacgaaacgcgagttgtttactagttttatagagaatagatatataagctaatatgaatgtatgttgtaaagttaagttatatatatgccgacattccttcattcatttaaataatatctagcttacaaaatataataatatctcatcccactatatactagctagtctttattatatactttaactttaattaattttatgatctcatccatcgatcacttttttgaaaaccttttaaaaaagtgcataatatattttcatgaggatggataattagttgttttcatattatactttgtggtaaagtaagagtcaacaattatagttttttttttttccatggaaattaattatttatatatgtgctcttttctcaaattttatatccattttattaatgatttgtgtggtggtactctttttcatgatcaatattcaattctaccgacttatttgcatgtgatatatacttgatgagtaaatactattttggactctgtgttttgtaaaagttacagattggactctgtgatttgttaaatgacaaaatggactctgtattt

SEQ ID NO: 126238 - DNA, 1573 bp, Cannabis sativa
  modified_base (1493)..(1528): a, c, t, g, unknown or other
tttatatgtgtttaaattccattgttttagaaattcatacttagaatgttaaacaacatacatgatagtaaatctagatcctcgtaaaataatcctcaacaccttggctgcgtgacttcttgagaaccttggccgcatgacttctcgagaaccttggccatgtgagttctcgagaagtttggctaattgacttctcaagaaacttggccaagtgacttatcgagaatgttggttgagtgagttctcaagaacgtttgccacatcacttctcaagaacattggtcgagtgacttctcgagaactttagctgagtgacttctcgagaatgcgggctgagtgacttcttgagaacgttggccgagtgacttctcgagaaccttggccgggtgactcctcaagaacgttggctgtatgacttttttttttcgagaatgttggccgcgtgacttctcgagaaccttaaccgagtgacttctcaagaaccttggtcaagtgacttctcgagaaccttgactgtgtgacttctcgagaacctgggctgagtgacttctcgagaatgttggctgagtgacttcttgagagcattagtgcaacaatggacacatagtaatagtataaaagcacaaaatacatttactgcattggcaccacctaaagaacaaatgctactgaaaagctacacatactcattgaacctcgaggtgagatctaaattttgcagtttaaattgtttaacaaaatcattttggggcttttatggtttttctagaatttttgtagggtggtcccactgttgttatctatgtttaataaatgttggtttcaaattacacaggttaaaccaaccacttattatttgtttgaggtagccagaatgaaagaatcatggatagtagacctcaaaaagagaacatgcatgtacaacaggttccaaatatatgaaatgtcctatggacatgttgtggctatgtagaacgagatgaacataaacccatacaagtactactcaaattactatacagaaaattggctagaaacttatgaaggaacagtgtatctaataggacaccaaagtgagtgggatgtaccacaaaatgtgaaagacataatagtcttgcctttcattaaaagagtgaaatcttgaagaccaaaaaaaaaaggaggatggaagctagatgggaaaataaagaccataactagtgcagcgaatttggggaggtggagcacaacaagagaacatgcaatagaaggcatcacaaataaagagaacaagcacaactaaagatcagcagtagaacaacaacaaaaaattcaacatacatttgagcataggatactgaagaaaagaatttgcatacaaattttattgtttttctattactattaaaaattgatggcaatgatctgtttatattttttataggatttctaaactacttggatactacatgaaattgagatttgaatgatctgttgggaatattttaccaggnnnnnnnnnnnnnnnnnnnnnnnnnnnnnnnnnnnntaaatatgaattctctaaaaaaatgaaataaacacaaaagagttt

SEQ ID NO: 126239 - DNA, 1366 bp, Cannabis sativa
  modified_base (857)..(864): a, c, t, g, unknown or other
taattcacaaaactcctatacgaaaccaattgtttttaaacttaaaacgaaattaaatcataccttaacctttccctctttaaggattttctataccgctactatcaggtttcaggttgaaaattaaagaaaatggatagaaaaaaaaaattgttgaaggagaaggaagagggtttcgttcgtcgttcttctctactgtcatatattaaaacttaatatatatatatatatatataatataagtaaacgaaactatcagtttaatatattaaaataataataatataataattataatatataataatattattaataataaaataatactactaataatataataatattaataaaaactttattattaatagttatcttactatttcttagttattaagaaatttctacttctagggtatttagccaactccgagtatcccaaaatatctcggtatttctaaaatcaacttatcccaataatcccatcaatatttctaactaaaacttttgtgacatttttgacctccaatcgggtctccaggatcagcgaactttaaaatatttttatttcacaaataacttatattatatccacgtattttaaataaatctccgtaattaacaaattacgcctatatatccatatccacttatcgagtcttcagggtcacctaacctgaaaatatttttattccacatatagctcatattacattatataaatctccgtaatttacaaattacgcttatttactcacttatagcaaaatttaaattttatgctaaaataaactaataggatcataatcccacttattatctaattaacccataatataaatataaaccctaannnnnnnncattagacttatcagaatattacaaaagtcttacttttaccagcgcattaacgcgttgacaaaagtctaacttttaccagtgcgtacatatgctgggaaaaatcttacttttgccagcgcattaatgtgttggcaaaagtcacttttgatggatagatatttgacttttgccaacacaataatgcactggtaaaactttgtaatttaatttttttatttaatattattatataatttaaaatttttatcaattatttttaaattaaaataaataaaaaaaataaaacaagaaagcttaattataaataattacacaataaaatataattttaaattgttctaattatacatgcataatattgttataattgtctaaaagttagtaaataaacatatgcttaaaatactgttaagcaaaaatttcacatgtaaaatattaaaataaatgcaaaacacaatttcacctatgttgaatttatagcataagagtttatcaatttaa

SEQ ID NO: 126240 - DNA, 786 bp, Cannabis sativa
ttttttttatgtttaatctattttatatgattcacaaataagatatcaatttccctctctattcagttttggtgactcttgttgcttccttaaaatactataatattagatcatactaatcatctaaacaaagtggaagacttaagtggtagagcattagaaaaaaaattcttctgtgttgcattagatgaaaaaaatagaataattagagtgtatgtaccaatacatgctttttcgaaccagaagaatagaaattagataaaaatgtcagtttcctttgaatggtgttacgtgggtttatttttattctttattattttttatataaaaaaaactgcatatattgaaaaataaattacaaaaaaataaataaatcctatatgagatactctattaataaattactaccacttgattaaaaattaaagactaataaaatgcactcacttgtaagagcaaaagtagtgctctcaactaaagaataccctataaattttatcaactttttatagtaccaatacattttattttttttttaattaaaattttaattgtctacatacaagtatacaataagtcatttgtaattttaaaagtctatgatatctatgtttgacaaaatgtcctcatactataagacaaaataaaagttcctaccttggatgtaccagctggactcgggtgtagcttcttgccctttggaggcagagactcgggctgttctttctgccttggaattagcagttcagaattcctggtctaggattcacatcatttctgattgca

SEQ ID NO: 126241 - DNA, 2517 bp, Cannabis sativa
tctcacgaagtatctcaatctcaacatcttgtgtacacttagaaggactagattgactgtcatattttatcttcatccgtacctattttaagaataagttaggaaccaaacaaacttataattatttgaatatattcaaaagtaattttttttacataatcttacatatttttttggcatactcgttgacaaactcgtctatgcccttctttgtgagacaaactttccaattctcaatgcgacccatgttttgctgataaatataaattgcaagaaaattgtaatgaaattaaacttcataaaataaatagtatatatattaacttatattttcatgaagggtctcagccatagttatggacctttgtgttgaagggaataacatcttttgccgattgagagcattttgctttgaacgagccataaactcaggagatgtgaaaaactgacatattagcctccatggttcttcattgagttcattggggggagggttcttgactgcagtttctacgtcttctggatttttgtaaaattctttgaaatgtacgaatctaattctttctcgtcttatatttttcggccatttcaactaacgaaatagctagcaattttggatgactgccaattttgtaatagtactgtatttgacaaaaaaatattgagataacatactaataatttcatttagatataaatttcaaaaaatttacccaaagtttggttaaaataaggtgttcttactgctctgggacacttgcccaattaggataatgtccaggaacatccaatgtaacctctctccctacaaaacgagggaatgttttactctccaaccctacaattgtgttggatacgttgtcaaattctaatggcaacgacgtcccagatttttttcttctatcttccaagttagccaaaacattcctcccgcaactttttctagattcaccagaggtctcacaagaggcaggaatactattaggatctaacggattatccccatcaccatctccaccatgataactagcaacatctattgacattttatgctaaaagaaataacaaaatcatatgagcccttactttaagataatcaaaacaactaatcaacttagattaaataataatagtacaattagtcatttctcgaaacaaaataatattagaaaaactagtcatcaatacaaaaatatcaaatacattaatcataatcatcatcactaatccaatttgaatttcccggggacacatcttcaatttcatcttcaagacgatcaataagcaagtcatcatccccatcttttacaattttttcatcatcatcatctctaatatcatcaatattcgaaaccatctcgaaactttgggacattgtcaatccttcgcagttgattaggttattgcacagtcaattcccccaaattcgcaaataatgtaaaatttcatgagttatcgtcatgtacaacatcaacatcaccggactcatcagaaccttctgtcaatatattttcccaaatttagcgatgatatacattatgaaaaactctccaatcttgacctctaacaagatcatccacaaagaatacttgcttagcttgattagcaagaatatatgagtcatctttgtaccatacaccactgatatttatgatagtgatgttatttcagtaattatttttctctttctcggatatgtgttgagccatttacaccgaaataatactaccgaatatgcaccactaaaagacaaatataatactcttcaacttccccataatagtcaaaactgtccctgcaatagacaccccactattttgagtattgcgatatttgtctcgattgtgtacaacaaatcaaacaccattaactatacatgtcggatatgaatacacaatgagattagacccagatgccaaagctagcaattcaacactatgttctaatgacccgagcttatacaaatcaaaaatctgaaaaaagaaatttaacaattatgatttgagagatttgatgattttgaataagtagataatagagaaagaaatacttgcacaccttcttataaaaccacgaaggaaattctatttatgtaaaagattatagttagcgttcgggtccctctgtctgattatttcgagtgctctctattaaacaaaaaagttattacaaatttagctaaaaagaataatacaatgttattcattaagcaccatgtaaacattgattaactcacgtcatgtaagagttgatttcgatacaattctctaatatgtaccactgaactcttttgcgagtcttctcgttgagagtttttattgttttctttccgagtggacgacattgagatttgaaaatcattaagtatcgagatagaagaggagcatctttattgcgcttagagtagttgaattttgtatgcacacctttgaagtacatggaacaaaatgtcaatgcctcatctatcacatatccttcagcaatagatccttttgggcgtgctttattcctaacata

SEQ ID NO: 126242 - DNA, 1498 bp, Cannabis sativa
ttggtggaagtctaataactccaagggaattcattggttgagttgggataaacttgctactcataagttcgatggagggatgggattttgagattttcgtgattttaatctatcgttgttagcaaaacaaggaaggaggttactggtgggtggggataatttagcttccaagatcttcaaagctagatattaccccaatggtacttttcttactgctactattggtagcaatccaagttacatttggcgtagtgtactagaatctcaagctttggtgcgagcgggtgcgagaaggctggttgggaatggttctaatatttctattcttcatgaaccttggcttatggatgaatctaatccttttattgaaactactaacccgagtcttgaagggagaatggtcaattcgctgatgcaagttgacaatatagagtgggataatgaggttctttctgatatcttaaatgatagagatcaagcgcttgtatggaagattcctctatctgaggcaagtttaaaagatgattggttctggttgaaagatagtaaaggcatgtttactgtgaagagtgcttatagattgcaacatgggcaaagtgggcagcctatccacaatgtttcttcagatctgtggaaaaagttgtggaagttaaatctgccccctaaagtccttaattttttatggcgtgtgtgtaccaattgtcttccaaccaagtttatgctgtccacaaaacatgtgcaagttgatactagctgccctttgtgctctgctgcaccagagactgccttgcatttgctggtgcgttgtagctttgcaaaaagctgttggcagcagaccagtgttccgattgtggcccctgttgcaatgacattgggttgctggtttgaagaagggttatcaaggtggagtgaggttggttgtgtggaagcagcaatgactctttgggcgttatggaaggttcgaaatgaggtggtgtggaattcagtttctccttcaattgatgaggtaattcacacggctaaagtgaattactcgtactggtgcaatgcacagcagttcgagtcagaacctcattcagagcttcacaatggttggccggagaaatggtgtcccccaagctttcatagcatcaaagttaatgtcgacggagcgctctttgctttggagggtcgttttggggtgggtttggtggctcgaggtgctgcgggtttggtcattcaagctgctactttattgaaaatgggttctcttcagccacatgaagttgaggccatgggaatcaaagaagctttgagttggatcaagaccaatggatggaatggagtcattttggaatcggattgtttaagggttatttctgaaattcaacgtaataaaaatatggtctctccgtatggccatataatttcagagtgtaaggctttatgtgccgagattgataacatctctcttagttttgtgaagcgatctgctaatagggtagcgcattgtttggcg

SEQ ID NO: 126243 - DNA, 1459 bp, Cannabis sativa
aatctcccatgatttttttttttttggaaatggcttaatctcccatgattagaaaaaaaaaacaactttctttctttttttattttttatgcaccttatataatacatcagaaccaataggagaaagacattatttctcacacaaaaaaataaaaaagatatacgattatattataatatgtactctaagtagtcgtatttttttagtgtagtattttcaacggttctctacgatgaaggttcgaaacagttttcgattggcttgttttatcctgaggacggcgaggttgatagattgcttgcacaaggggtacacacttttgtggaagaaagatgagtcacacaaatgctcacttgaacaacacacgtgcgtcgtcgactgagctgagctggttggtgtggtgtgcactttattttcttggaaaaaatttatttattaaattattatcttttatttaattaattttattaacgtatttaattaatgagtaaataattttacgattatattatgatatgtattttgagcagtagtatttttttggtgtggtatttacggttatattatattatgtatttcgagtagtagtattttttggacgtggtatttttgatggttctctatagtgcagtgaaaggtttgatatagtggtttgaataggctattttatcttggggaggacaggctgatagtctgcttgcataagagggtactcgtttttgtggaagagagattagttacttaaagacttacctaaacaacacacgtgcgccgtcgaccgagctgagttgattgctaacacagtttttaaatttaaattcattttacatctcagctcaaaaaaaaattagttaacaatttttgttttatgaagaaagagatatatgttagtaattagtattgtattttctataaataaaacttaataaaaaaattagagaaaaaagaaagaataaatacaagtatgtgggccatagtgataatatagaattaaatatataaatagtattttaattaattaatcaaccaataattacaaatctaataaaaaatcaaaaaaatgatagaattaaaaaaaaagtaaataatatttaaagagaatttagagtatcatgactgtctcatatttttctattacgtaatatagtcgctctttattgttataatattttcttagtataataatgaaaaaaataattatttacgaatataataattaacaaaataaattattattctaatatataataactaagaaatagattacgcgtgattatttatgaaaattttgaattatatatgaaaattttattaacatttatctcatagattgttaatgtttattatttattctataattaattacttaacgttgaccgaggtttttggcaattaataaaatattataagtttatagagcggtgagaaaactagagaatgatttttacgtggttgggg

SEQ ID NO: 126244 - DNA, 1167 bp, Cannabis sativa
taattgtacttgatttctataattctcatgtaaagttatcgttgtttatttgttatgggaattagtgatactatggtttggttcttttttgtggttttacattttttgtttttgtttttgatgattaaggtggtgattgttttgttttccattcaattgtcagcatcaaacttactacaatcaatatttctatgtttggtattttatttacatatcttaggtagctatgccatgattaagctagctctaattataatttaattgaatattggaaccaactaatttgaatcactaattaggctaaacaatagcctagctaatcacgaactgtttagttatgtaatattttagctgaagctcattatttggattacactttgacttcactcagtaaggcacatggcacatggtatctggcgtttcttttgtttgctttttatattatgtcttctttcaatctatttttttttttttggaaaatgcttagattaaagctcaaaatttatgtgaaattgtatttgcatctttaaatatttctgattgttggattactttgctagccatttgttgagagcttgtctaggtgtcaaaaacatgggctacagaatccgttcaaagatttggaaaggtttgtgttttatttcacattctatttttttttttcaaattgcctaaaaataaccttttagttaggaagttgttatttaagctaatataacaacaatattttcaaaggtatcttatgtatagagatatatctgcaaaggcagctcacatgctttccctgtcgaaggtaatatgtctaataacatatggaatttttttttcgtacccctctaaactagcgtagctaattgtaatgcagattaacagttttcaaaatttgcatcaatccctttgtttcttacattcaagtttctggtttcttcacaaggttaataccaacgggtttctccaaagagttatcagcaagcttttggagaagtttatgtgacccaaaattttttagaaaatttctctggtgatcaggtgtagattataaataaattgatcatttacttactatatgttaggagaaataaaaaaaggaaaataatcttgttactttgcatttattgaaattagatgagctgaagttcacaatttttaataggtctttgtctcata

SEQ ID NO: 126245 - DNA, 1384 bp, Cannabis sativa
gaacattccaaactagaaacttatccattaccaagagagggtcctcccccctctcttgtgttttccaattcctcatcatcagcccactgtctatgcagagttccatcatcatcatgtacccctgttaagattgcaaaaccatttgaagtacttgtctcttttgcttcagatttttgttcctgcacttttttccctttcactacagcttgaaaaccttcatcatcaactataggtttctcctttcttttatcctctttaaccacccattcttgcctaactccatttttcttcttacaatctgtagccacatgtcccataccagaacagttagtacagagatctggcttccattcgtatttcacccctactgtcaccatattatcatactcatcctcaaactccagtgtgctaggaaactcttgattcagtgaaacttccaccataattctaggataattcaacctatccctatctcgagtgactgaatccaccatcaccggtttgcctatctgccccacgattttgaatagagacttctgcccccaatacttgagttcaagtccttctaactgtatccagatgggcattatcttcacatcttcctttctgaaattcgtattcgcatcccagggcttcattatcaccggtcgtcgattgaagaaaatataccccccattgagcacttggtccctgtattccatggagttgaaccgaataatgaacactccgtatgagagcattctgaccttgtcgatcttgtctttccagagtctgttagcaaaaccttcaagtatgtgcaaagggggatttgatcccaggacataacaaacaattgaaggttgccagaaattcacctcatcttctatatcatcaattgtgattttaactttgttaacctgttcaggttgtctcatggattgctccaaattcctaattactgaattggatcgtaaaataggaggagtagtgttcttaccttgattcaattcactgttacattgattattcaggtgaataaagtgcagcaagtcatctcgagcttcatcatatcgcttgatttcctgtaatgaggacttaggagacagaggaggtggatatagatcctgttgtggctctcgacttctgctccctgccatacctggtacatcgtctccctcgtcttctgagaactccaatggagtaacaccaatgatttcatctactgactttgtgcgaataacatccgaaaccgagttagggccttttttccttactttcttatcagaattccttgctttcccctgggttttcgacctagtttttgccatggctccagcttcaagctgctagagcaaaaacgaagcaaaatcacactttattatcaccaataaattttaatttattg

SEQ ID NO: 126246 - DNA, 1139 bp, Cannabis sativa
ctactaatttacactacatgttttctatgagagttttgttagggttttatgccctaattaaaacaaatttaatttgtaaatttttattattattaccatcaataaataaaatagaattttttttgacttggtcaaatcgcattgctcacattgctcatattcatgacttattttttttttttttctgaacttctttaaatattttactttagcacttttgtttagttactaactttactacaacttgaacatatttttatagtagttcgatcgagatattatttaattataaatgtgaataccattttttctatttgattatgtttttttcaaatttgatttaatatttaaaagtatttataatactattataaattattaaaatacaataaattatcaatttaaaaaaaaaattaaaaaaggcttttaccagcgcgaaattgcgccgacaaaacgtagccacccattaaaaaatatgtcgggtaagcctttttttggcgcataaatgctccggtataactaattcttgcaattgcactggtaaaacctttacccgctaattgaaaaaaatacgcacaaactttttatttttcccgtcaatgggaggatttaggaacttttctatactagcatttggttttttcctgtcgcataagcttgccggcaaaagcgtgtcaattgcgtcgataaaaactcttttactgacagagaatagcagacactttctactggcacacttatacgccgataaaagtatatcgacacgttgtgactacttttgtcagcacaaatatgcgccgataaaagtagaatttcttgtagtaactaagaacaggttaaacgaagtaatccaccgaggtgaacataaactgctcacctagctacaatttatgacaaagttgtatatggcatgtttaagaaaggggaatgggaatcaattgtatgggattcccattcatttgtttacaaaattttggaatgagagaaactagtggggcccacacaaattaaggagaaaataaagcgaaaaggttttccctcattttcataaggaaaacctttcccttttcttaacttattttatattaattgtatttttataaattaaaataaaaaaaaaagataaatatgcccttcaa

SEQ ID NO: 126247 - DNA, 1726 bp, Cannabis sativa
  modified_base (701)..(711): a, c, t, g, unknown or other
  modified_base (862)..(862): a, c, t, g, unknown or other
  modified_base (1683)..(1684): a, c, t, g, unknown or other
tcaacttactaacaacacaaataaatgagataattatcctcgcacaattaatatccaaacaaaaaaattaaatactattttaaactggatattacaatcattagcatctttaggaacattcgacatctttgagtagtatggtggaatcggcaaactcgtaatcatctgagatgcttgttgtgttgaaacttattttacgaggatctagatttactaacatgtctgttgattataattcaataatctaacatcctaaatatgaatttcttaaaacaatgaaataaacacataagagattaagaaatccttacattgatggcatcagaatataatgactccttctattcagatctctagcccttgattcctatctgtagcagagcattatcaagatctgaacttggatcttctcttcttcaatttggttagacacagtcttcttcactatgctagctattactttgatatgagtgggcatagtcatattatttgtagggtgacttctagggctaggtttagaatttaaatcaaaaaaaaaaaaaaagataaaaacaatggctttattaagtcgatcatggtcgaaccctatatgggctttgtggattttaatttttccattttattcaaactcatttttcttttcacaaatgtcatattttaattataactataaataccaattctatttatttaataattannnnnnnnnnncaaataaaatttctatttaacttagttattaattagaccttacaaagtatcttaattaataaataaatcttaaatccctatttcctttcaaataagcccttgcttagtgaaaaattcacaaaaaagacagtcttatttagaattctaattnattaattaaaaccaattaattgagactacaaaataatattattcgagttagtgtggtgacggaccatgaccctatgtaaccaagctcccaattagtagatctaaaatttacgaagtaaatttcttaacttattaatttctcctgactccactatagattcagaatttcactcctaattacatagaacgttttatatagcaaaaatagatacgctttgaattatctattgtttcattctaaataattaaaatcctctacaaatgatctacatcgagtagggataaattttttattctatcattcaatgtattttatccttaaattacttagctacttgtaaatgatatttcagtaaactaatataattacttaaatgagtgctgatcatttattgcgttaagtaaagctcgaagaaaattattgtttcacttctaatatttatagaagttattgattctatatcaatgattagcgatctcactcaattatactactatattccaaagatataagtattgagaagatccacttggtcaactttaacgaacaaataatacatataagccagaacctgaccatctcaggattaagatctattgacctaaaatcaactaagtgatattgacatagaaagatataacagtaagtttatgatatcttttttattatcaatatcggtccagtccgatataaactccatacatccgattctaacataatatcacgtcagtgtaaatccagtgcattgataaatcatgagactcagaactttgaaacatataattataattattttttactgtgtagacaacactataatnntgaataactatatgttctggatttgatagaatttatacatta

SEQ ID NO: 126248 - DNA, 921 bp, Cannabis sativa
  modified_base (886)..(888): a, c, t, g, unknown or other
tgaagggaaggtagagacatttaaagctaggcttgtggcaaaaggctacacacatcgagaaggtatcgactatgacgacaccttctctcccatggcaatacttaaatctattcgtattcttctttctatagttgtcgcatatgattatgagatatgacaaatggacgtcaagaccacatttttaaatggcgatcttgatgaaaccatatatatggaacaaccagaagggtagggaatgatcgaaaggtgtgcaaattgcttaaatctatttatgaattgaagcaagcctctagatcatggaatatcacctttaatgaaactattaaagagtatggcttcgaacaaaataaagaagaagcatgtatatataaatatattaatggtaatatagtggtattactagttttatgatgatgatattctacttattgagaataatgtagaaaggttatcagatgtaaagaagtggttagttcacaaattctaaatgaaagatttgggagaaataagctatgttctcgggatcaaaatctataaagatagaaagaggagaatattagtattttctcaagcaacttatatcgataaagtgctagaaagattctcaatctagaattccaagaaaggacaactactgtctacacatggaattactctatgcttggatcaatgtccaaaaactcctcaagaggaaaaggacatgaaaaattacccttatgcatcagtagttgggagcttgtatgcaatattgtgtacaaggcgtgacatacgctacgttgtagagattgttagtcgttatcaatcaaattcaagtttagaacactagattgcagtaaagcacattctcaagtatctttagagaatgagagatctcatgcttgtatannntggtggagagttaaatcctactagatatactga

SEQ ID NO: 126249 - DNA, 590 bp, Cannabis sativa
ggaagaaagatccctctgctctccagcttcttaggtcttatgaggagttattcaccaagaaagtgctcactatacacaccgaaacttatcttaaggagttcccccttgatactgacagtaatgaggagtcagatgacaaagttttaggagtcgaacatcttgccgaagctgaagcctaaactggagagaccaggaaggagatcattcaaggtgttggacagccaagtttagaccctatcctagagccaattcaagattagaccaaggagaatgtaattaaccagccatcagataaggtagaggagtaaccttttcttcctttactttttagcttctttttattttaatttagttgcgtgaaaaacttgatgcctgtaccgcaatggtgcttgtaatagtgtagcgtactacttttaatggttccaaggcatgggcctttacttttcacagagatattttaatgtgtctggttcgcggggcactataatagtgatattttaacatttagtctctctggtagacttagagatttcagatagatttttacacttctccaaaatcactagtccaccccagagtaatcaccatct

SEQ ID NO: 126250 - DNA, 2828 bp, Cannabis sativa
  modified_base (823)..(825): a, c, t, g, unknown or other
  modified_base (851)..(852): a, c, t, g, unknown or other
aaaaaaaaaaaatcaacttctaactagaaaaacaatttgtttcaaaaaaaaaactatagaaaagcattctaaaaatatatatatatatatataaaataatggaaattaatcaaaatttaaatcaaaactcagatattttttttcttagagaaatcaaatctcagatttttataagagaagtatatcaaatcaaatcaaatcaagatttttgcccattaacaatatatttgcatatttggcattagtttatgaattttctttaattaaaaatttcctttctcaattaaatagacagctttttgtcataattatcacgaaaagaagaagaaaacaatggtacatatgcatatacaaatatcttcattatcattcatcactatcaaaagctaaacaaatatgcgtcttaaaaccgaccaaatttaaaattaatgaagcatttcgggcttgataggactacatgcgtcatttatgtcgaaaaacccccaaggagatgcttattgcaaggacccaaataaatttgggccaaatctaaaaggtaatagggagacgtgagaagtgagatgaaggtttttggttagcaataataatcaccaagcaagcagcatacaaaatttgaagttatactctcaaaattctatttcaaccacaaaactaaaaattacactaaaaaataatttttattattatatcaataaaataaaaaaaaaataataatatttacatttaaatttacccacattaaattaaaagatatttttccaatgcacccctctaaataaaagacagtttaaactttattttcggcgtgttaaatttttttgannnttttaaaattttacaaaatgtcttanntaactataatgtacacgaccatgaaaaaaaaaataaactaaattctacaatgcattagaggtccaccgatgcacctcttatttatttcagcatataagagaaatttttattccaattttattcatggtcatctacgttgtagttatttaagacatactgtaaaaaaattttaaaaaaaaaaaacacgccaaaaatatgattcaaataatctatttcacacatgtataaaataaaagaatttcgcatgcaatagattgtttgaaccttatttttagcgtgttaaatttttttaaatttctcaaaattttgtaagatgtattaaattgctatagcatagacgatcatacaaaaattaaactaaaaaattttctcatatgcaacaaatagaaaagtatcgatagatccattttaagagaatgcatagtaaaaacaatatttttaatcttataaatataaataataatatcaatatataaaaatataaattaataataattaaaaaaaattatcgtaggtaggcacacaatatatatgctgtaaaatttggtgctacattggatgaattatatacactaaatctaatttttagtgcaacgttggagttgatctaacaacatcactaaatagtgcaccattttactaaagagcattgctatgaggcaccagtctatgaggcaccagtggtgtcaccagtggtgtctagtacagtggtgtctagtaccttgtctagtaccttctcgacatgtcacgttacgattggttagcgatactccctaaaaactattatactaaattatatgggacccaatacttagttggaccaatagcgatattgacatataggagggtgctaggcaccactagtgccctttagcatttctctttactaaattagtgtgaaattttcacacaacattttactttaatagcacacactattggtatccgcccaaatttacaccattaatatggtgagggatttttaattctacaccaatttggtgtaaaaaaaaaaaatcattctaacccttattttatcttattttaaaaaataatcttacattttaatcctcaaaaaataattgatttaaaatactaacatatttgaaaatataaaataacaataacaaaaatactgatattaaataaaataaaaacaacgtaatactaacttataaaattaaaaagaacaatataaaaataaacattaaataaaataataatttaatagtcaaattaattacttgaagattttaactttggagaatatcaaaatattagttatatgcaaaaattttgttttgtaaggccaatatagctaggttttggtttgttttaattttgtaagttcattgtggttttgttttgttttgtatggccaacgtggctagttttattttgtacgggcaatgtggctagttttggtttttgtaaggcaagtatgactagttttatttttgtaaagttagtttggctagtgttagttttgtaaagccagtatatgcctagctttaattttgtaatgtcagtatggtctaatataaacacatcagatgtactgtagctaccttcaataatggagacgagaacagataattactaatattttcctcaaaaaaatatgagttacaatatttatatgaaatttcatattttattaaatatttgatatttattttgtaggtgttctaatgttagattgtaaattacaactctcagtttagaggttttttattctaatattaaggttttattgactagttctcttaggttatctttgcatgccctcaaaatagacaattaacttttataaatagaagaaaatcatctactgcttgtataacgttgttagctttgttattttaacctgtatcgatttctcttaaaacacatatattagttatatagactgaagtattttgagaatattaatatatttgaaatgtttgatattattggtgagggttttttttttt

SEQ ID NO: 126251 - DNA, 1265 bp, Cannabis sativa
aataatattcaatgtagtgataatcattgaaatttgaatgcataatagtaatttaaataaaaacaaaaattactaattaaaattgtaaattttagcttgtatgacgtgcaatcaaaattgtaacatgtagcaatacaggttatcataagattatatctcatcaacacattaagattatacatagaggtattctcttaagggcgagttgtcgtctggtcgataggaagacaacaacttgatagataagcttgttggatgcttatattgaaggatcgatatatgcttaaccagtatatatattttgacaaagtaaattgttctgggacaattgtttctttagttcccacaacctcgataatgacatgctcaatccatatccactattagttcaggatcccacaagattcaatttttataatgttcttttcaattttgagattaattttaattcattagactatttaaaatttttatgatattatatattaattgaacttgttattatgggaaaactcttatacattttttttttttgaaattttgtaatacaaataatcttctcaagatactttattctgaaagcgcctaaatatactttaagtaatacttctcgtgtccttccattagtgttgggtgaagcaaatgcaggataccatcacaatatgccaatttcgagatgaatcatcctgggaatatgacccttagtctcttagcatactcgtgagtatgtgaatcaatgagttgcaagctctgtaaataattaattatctatcctttccaagcattgtcattctatgtattctgtattttttgagatgaaccttctaagttgatcgttcatcttaccaaccttatcaatcggtagttataattcatggttcacccttatccttaaaagggtgtgtttgaatatttctaccacatgtatttttcgagacaagtttattgaatgcattaattgctttataacacgagatggtttttttacacgtgtcaacatcatattgttgctcgaaatatgagtataacatagacataaaacaacaacaatttattttattttgttgttatttatgtaaaaaagaattaaaatttataagtaattaaatattaaaaagtaaccaatccaaaataactaattcaatatgcacttttgcgagttggattggatttgagttattagagagattggattgaatctaaaaaaataaaaaataaaattaattaatataatatgatagaattttaaaattattaaattaatt

SEQ ID NO: 126252 - DNA, 615 bp, Cannabis sativa
atccacataattattaatatttataacaaaaacatcctttttagaagatgtactaaaaatttaacaacacaacaaatacatcaaaattgttgagtgcttttcaaatcctgtttattaataggaaaatatcatatttgcacatgaataatgattggatgctctaaaaacatatacataaaaataaactatttcaaaaaaaaatcttttaaacttataattattacaaaaagtggaagtacttgaaattaataaaaaaaataacctaagaaaaataatatcctaattttcaaaataaactatactaaaatggaagaatttaaatattatacttctaatggattttattaacaacaaaaaaaaatcaatgccacgttagcaaaaataccggaatttaaaataatttctactgaaactaaaaataaaaaaatatccagctcttaattttttttttattttaatggttaataagatactaatgagttacaattttatataaaataaaaaagtatatattttaagatacatattttagttatctatattgattagttaattttaaaggcaagatttcatttttggttttaagttatattatattattttttatttaatttt

SEQ ID NO: 126253 - DNA, 1089 bp, Cannabis sativa
tgaaccatgcaacataaaagcgatctctgatctttattaattagtaaatatgattatattgaaatgggttttatttaaggcacaaaacccaacagaaacaacagtggaacaagccaaaaacaatattaaaaaaattatgatagtctcagttttattatgtttaagaatttaaagtgctcaaacaacatgttaaaaaaatttcaagatctatgtttgagtatcatttttaatttcgtatttaaaagaatttgggtgtatttaagtgtctagcatgtttgattcattgatttctaatcttgatgaagcttatgggtgttcatttgacattgattttaatgttttttcttcatctcacaggaattaatggttattttcttactgttccggtgttgcaatgacgattctgtcagtgagtgtggaagataaaagcctcgtatgtgatggtctgtacaatataaaaggaaaaaataggctaagacagtatttttataaattttaccatgtggcagtaaaaatgtaaactttatcccaaaatccaataattttgtaaaactttctttaatatttaataatatactctattttttcaaactcgccacactttcaaatttataatttataacaaacaattcttttttccacctataattaatacaaactagttttcttcaaagcatagtataccaaagtggccatactattttcttttttaaattatttaatcacactaaagtaaaagtattgtttaattagcccatgctaattttattttaaaaaatgtatgactttcttttttattaggaaacttttacatttcataaaaggataattacataaaacactattttttataaaaaaaataaaattacatttttacgtttaagaatttttaattatattttaatagttttccataaaaacaactcaaaaacaacaaaaaaattatataaaagtaacatgaaaataacatcaaaacaataacaaaaaattacatactatctacaaaaaatcaacaacaaattaacaagagtacaacataaaacgactgtattttctgtaaataaaataaaaaaatcataaaaatattta

SEQ ID NO: 126254 - DNA, 1086 bp, Cannabis sativa
  modified_base (652)..(652): a, c, t, g, unknown or other
gtataagtttcatactgtgtactactgtgttaagtttttattattgttttacagttgttttttagttgttctactgttgtttttaattgttctatattgttctttcacgattgttttaggttattttataaaaagacagtatttgtaaaaaattctgtgtagcagtaaaattgtaaactttgacccaaaatccagtatttttataaaaatttttagcttttagctgtagcttttttataaattcttcaataagttgttatttaactgtttaccaaacacctttttgtcacaacttttttgagaagcagcttttagcttttcaaaaagatgtgccaaactggccctttgtattttattttatttttttcatttttttgtttttttcttctctctcttttttcctttctttttcttatatacgcttgattgatcaatttttttgggtaaatatcattttagactatgtgttatgttaaatgacaaaatggaccatgtattttttaaaatggtaaaaataggaccctgaaatacagaaaatataaacagttttgtcatagcacttttagatcggactataattaaattttattttgacaaaaaattaatttaggatcttatttctaacaatttagaaaatacagggttcattttntcatttaacaaaacaaatgatccaattggtaacttatgtaaaacacaagatccaaaatagtatttacctttcttttctcttccctctattaatcttttttatcttttttctttttcaattctgtctctctccccttttctatcttttttttttcacactattttttctaattgtatactaatttttagggaacctgtgcattgcatgtgcccaaaactagttcctatatataaatatatatatgtttgagttttttaatcaataaatttcttacataataatttatcatataaaaatcaaaatgtattcctaattagttaatttttctctagtactctaaactctaaagcatgtttctgtaaactctcaaattggtttttaaattttgttcagaaaaatttataaatagactaaaaatttgaaaaaaaaaaaaa

SEQ ID NO: 126255 - DNA, 1242 bp, Cannabis sativa
tttcaaataacatagaaaaaatctagcataaaatttagtatacgtccctagctttttgctagtatatatatatatattggatttgctgcacaaatttgctccaacgtagctgtatgttatgttccacactaatttgccgcgattatgccctgcattgttttttctttattactttataaatatatatatttatataaaaattacaatacattattttaaaagggagatatccatacccttgtccgtatttgagggaattttttaatttaatgtttttataatcacttatatgataattatttaaaatattttgtaagatttaataaatttaacacgctgaaaatagagtttaaacaatttattacacaaattaatattctattttattaaaaaataatacaataattaagaatatttttttagtgttatttttaaactgaaaagagcttttgacactaaatttatagtattagtgtgacactaaatttagagtcaaggttgaaaatacattttcaagtttgatctgagtatagtctcacctaatcaatcagttagctaagtgtatatatataaagagtattgtgatgttacatcttataattagttaaaaaaatttatattattgattaaattaaaatgtatgagagtcaatattaaaatacatcaataatgatgtcacctcttatgattcttgacgtcttaaggattaagatgacccttagagcaattgaaaggaggctgcatattcatatatgctatgattcatcctccaacaagattgcatttggtgcaccatatttgaggttttttacagtgcacggtatatatgtcgtgcattgtagtcatgacatatatttttttatctatatattaatttaattgatatttatatatacttatattattgtatttataataattaagaatttatttttgagaaattttacaatacatatttttaaaagtgatgtacgattgtaatcctacttgtttcgacatccgacagacttttttaatcgatgtatttctttatatactcgtgtatattatagttatttaagagatcttacaaaattttgagaaatttagaaaaatttaacatgccaaaaataatgcacatatatactcttgtttcggtattcgagagacttgtttagtctttttttcatggtcgtgtacattatagctatttaagatgtgacagggaaaacaccgagtaagctgtgcaatcccacaccgcct

SEQ ID NO: 126256 - DNA, 1118 bp, Cannabis sativa
gataaaagaccttttcttgtagtaaaagaaatggaataaaaaaaaattctattctattccattccatttcattacctccaaccaaacgctacctaatatcttgtataatacaattagttaaagttggcaaacatatgactttttgtttaaatttcttttgaacataatgaagaagatgaaagaaaagaacagagagaatgaagaaagaatgaaaaaatttgaaagaattgattcattactacacttagctcaaaaagttcgattatatacattgcaatgaaaagacagagcgagagttagttagttagttagttacagtaacaaactaacagctcgctctcaattgaatctaactaacttgaacaacaaatactaaagacaactaatgctaagtaacttaatgctaactaactttaactgtcttaacttccttcctcaatctcataattaaacatttctattatgagattggttctgaaaatagaaaatcgactacttgaaatagccttagtaagctcatctgctagctaatcaaagaaaggaacatgcttcactttaatgaggccatgttgaaccttttctctaacaaagtagagacactactacaaaaggcgaaatttacaacggtcccaaaattagaccaacataaattagaataattttttttcaggatttattttattttatattatattaaattcaaaaatttatttattttaaatacattggatttcaaattttgctatatatatttatcgaaaattaaatttgagctaaaaattaattttaattaattttagaccaatttgaattgagtaatttttgaaatatttattgagaattattactaaaatggaaaataattttatttatttttagatctaataaatattaaattaaaatttatatttagagtaatctaaattgataattttaattaaataaatgtatatataaaataaatagattaaaataaatattagatgaaaatacactgtaaataatgagattaattataaggatattctatctccattattggttctacatagttcttgttttagtgagtaatcatccctaatggatgaacgttcattagcaatttaacgtcgtaaaat

SEQ ID NO: 126257 - DNA, 597 bp, Cannabis sativa
tagaaaataatattcaaacagtctattttacacgcgtaaaaaataaaatattcacgcatgcaacacactatttgaacgcagtttttcgcgtattaaacttttttcgaatttcttaatactttgcataatattttaaataactataatttatatgaccatgaaaaaaaatttgactaaaaaattatttcgaatactaatacaaataaagatatatcagtatcccttttaaaggtgtgtgttatagaattttccaatattattgtagaataatataatacttaaaacatgtataagtaaaagattaaactatttcccactatctctatctcacatgaagaaagactctaattaagtataagataaatatttgttttatttttttattttccacaaagaaaaataaaataattcatattaaaaaaaaagttaaaataaaattcaagtccataaaagaaataacctacccaaaaaatcgcatgcaacgtgtattatggccagccagaagtttcacactatggcattggcaacaattaatgggtatagttgtattgccacggatcatgctgagctgtgtgttgctgcgacagctgtcaaaca

SEQ ID NO: 126258 - DNA, 879 bp, Cannabis sativa
  modified_base (45)..(48): a, c, t, g, unknown or other
  modified_base (848)..(854): a, c, t, g, unknown or other
acggaccttttagtcataacataagaatcatgatttataattagnnnnaatttttttacttttaatcacaagttttgttgtgactaaaaataagatgttttgtagtggttggtggtggtgttagtttttgttgtattgccttattatattagtttttaaattctcttactaaactttattattaatcaaggtaaatttttttatgacggcattagttattagagaattttagtttttggttattaatagaattgtaaagttattgagttatttaagttattaaattatttgaagtagtctgtgtccaggaattaataccgtcatcaattgcatttgacaagataaattttttcttttgtgtagaataaatattaatttctgagttaaggattttgttgacaagattattaattttattaatttgtgatttatttttaattaaattaatttttttaataattaattatgtgggccaattaaattgtgccatgtgttaactgtgtccacgtgaataaattttatgtacgcgcgggcagtccaacatggcagttaactgcataaaatggatgaaaatgactaattgctaacagaatgcgggttttggggggttttagcacccaaatttagtttttgggggttatatgcaagcaaaatgaaagttttgggggttttgccgcaattaacccatttaaaatttacagttataattttgtttttttttaaattattttggtgtatttttgaaaataattcaaaatctttatttatttatttatttttgtcatttttaagtatttacgagaatactttttagggaaattactacatatactattttttaacttttnnnnnnnttttttaaaaaaaaatttacagttt

SEQ ID NO: 126259 - DNA, 2480 bp, Cannabis sativa
  modified_base (471)..(482): a, c, t, g, unknown or other
taatcatggaattaataaataagggattatttggttgatgagacttaataaataatctagtttattggagcttagaattataggtccgtggtccctgaattaccaccttaaaatattatcaagggtagggataaagagttgtacaaagatgttcgaagaaaatcgattttgaattggtaaaatagtaattatttatttttgtaataaataaatattttttttcaaattaattaaataagggaaaagacaaattacaaagacaaaatttgtcgagacaagatttgtcaggacaaaagttattaggataaaagacaccaaccttgtcctaaagtcaatagtaggtgcctagcttgttcctatccatatgggatttttctttttagattaactaattcaattaggtaaatatctaatttagaaagtagttaaaaatatttcaagattgttaagatattctctcaagtagttgannnnnnnnnnnntaaatatcagtaaccgaattcgattatagatatttatttatttaaacaattaaataatggtttaattaaagagatttaactactataagtggaagtatgatttgagaaagattcattcttttacactgctaatttcgaaatatatagagcaaaaagaaactaattttactctctattgttcttgctcatgtgttgagaactcaacaagagtaagattaaacactttatcctaataacccacactattccgtgtgtgtggtggattgatttggaagacaatagtgtgagtctaaattgtatattcttcatcaactggattaagggatacaacataagagaagtttcgaggatacccttataggcttcaagaggtatacattatactctaaacttattatttttattattttattttaatgtacacacatatagagatgctagggtttatggtacgatgataatcagataataagaaactctttcgttgtgtaactaatttagtaccataaaatcagcaattgatatcaagagcagtttcatgaatgtgtatacattaaatgatatatgtatgtgaatggatgatattttattgtaaatgtatgagaggtgatgaatcattaattatataatataatagggtgtagtttttgtggttatttttttttagaaaataatgtaagccaatatagagaataaaatttttatataatttatttattttttgaaatttaattttacgtaaaaattattcgttgtaatgttcatagcatgtgagctcggtttctaatcttgaaacttggccatgcacatcaaaaatatcacatgctcacgtgagctcgggctcatggaggaacctcagccatgctccacatcgggtaccatgctcacgtgagaaattcccatgcatgggatgcatgaacaaggaacatgagtccctagaggaacaagtaagcacagtcgggtccaattggacccatgctactgtgcatgtgcgacgtatggggcacgagcccgtgagggttcaagggaggtcgaaccaccattgagcacaatagggacccaatcccttcctcccgtgcttggcctcctactcatgtgactagacccgtccgagtcccatactggttcaacccatttgggtcgtacgatctccccatgctcctcatcctcgtggccaccggcaaccgccgaccaggtggctatcaagccatagaccacaatggttgatggtggtggtcggccctatattttttataccccacccgactatatatatatatttttgtatatatatataatgtatatatatcatgtatataatgtatatatagagtgtatatatagtgtatacactataaattatctattaattatttaatgtaaataattgagattattttgggatatttatttgaatttgaatttcaaataaatatattggttattatttgaatttcaaattcaaataataactatcctagttattaattaataaaaaataaaacagttttcttatttttaataattaaaccaaaataagagagttttgtgggatatttattttttaaaattcatatttaaattaaatgaatataattaattttatatttaaaattcaaacataaacttaaaacaaaattaagacgaaagttgtcttaacctttaaataaataataagttttattattttaaagcaagactaatagataattaatttgtcttaaatagagtatttatttaagaattaattaattaaaattattttagttaattaaaaaggatttaaaaatgtgtattaaattaaaagttaatttaataataattaattaaaattatttaataattaattaaaattattttaattaattttgaggcttacaacgatcctacatgttatcttgatttttgtccacctgacgtggcatgtttacgtagccaatattattgccacatggcagtacaactgttgggttttgtgccctaaataaaacccattac

SEQ ID NO: 126260 - DNA, 625 bp, Cannabis sativa
tttaaaaattattaaaataatattatatttttttttatataaaattatactaaacacaatatttatccaattaatattatatatttttttttggtgagttaaagtaagtatatatattccactagcaacaaattacaattcgcaatacctaagattaggcctgtatatttacaaattctcaaaccaatccatgtctatctttaaaacttttttaagcaatattcctttaatcctatattttatatcctttttaatctttttgatcattgcttctattgtgtacaatttttggttccaaagagcctcatttctacatagccaaatttggtatactattacagcaagtgcatccgcatatacttgtcgttggaattttctttcttcgttggccagcaatttcattagcccatctaccgttgtatttttcactccccattccagccactgcttgatttcttttaaacatccatcactcacatggcaaacaaaaaacacatgatctttactttctctgtgagagccacacatgacacaattttcatcctggaccattggcttagagttatcaacaccccaaacttagaatcttgctcgtcctcgagcaatgacaacacaaaataaacaa

SEQ ID NO: 126261 - DNA, 924 bp, Cannabis sativa
  modified_base (677)..(687): a, c, t, g, unknown or other
tgataatttctaaattgtgtatgaatttatattgaaccatgttgtttttgttattaatattggttttataaatttcgaatcttcattgttggtctagcttaccttgttattttaataagacaaattccaaaggattgtcatatgttagacaaattaaatagagttagatcttgacaaataagtatttgtggatgcaacatctagttgtacatccaaagatgacaacatagactggtatttataatatgaaacaataaagaatttataaaataagaataactttgtctcttgcctaccgggacatcgttggattcttattttaattgaaattatccttaagtttttcctcttagctttttcatttagaatttgcttagagagtatatcattggatgaatggtttataaatcatctgttgggattttatgccctaaataaaactcatttcaatttgttatcaatagaagattataaatcatttatgtttacatgtagtttttatgtttatggtttagtgtgtacgatttctgttaagtcaagaacatatagttattcacaattacagtgatgtcaacacagtggaaggtgttgactgaggttttcgacaaccaattaaatagtagaatgagtagaggtgtagaaagtttaatgcaggtgatttttacgtggttggggcnnnnnnnnnnnttagtccacgagtctttgttatattgtgagagcgtttttacagagaatgttcttggtgaatctctctcttctttactctcttcgcttcattaattaatcgatcgacgccttttccattctgtctgtgagggtatttatagtgtttttcgaggagatcctagaaagggatcacttgtctttttgtgttagcctcttaggggcacaaattcctagcagatacaaaataggaaatacatg

SEQ ID NO: 126262 - DNA, 1119 bp, Cannabis sativa
atgtttcccccaattgtaagttataaaagtgtttattaatgggtggtttgtgttcatcacaataaagtgaaatataataatatatagtggttgttgaatgaaaataataaaggacaaaaggtttggttagaaatggggtctaagatgagccctatcagataacatgccaaaacttctttaatcgggctggtcatcactaatattaatttatttcttgtttaaaatcttctaaatgagttgccttcattctaactctctccctctcacctaatatattaacaataagcctaaatatagcaaatagaacttgacatatattcaaaagtgaccattactaccacttctactacctaacataagttaaatatattaaatgaaaccaaaccaaacaaaactcacatctctatttcgtttatgttgccttcactttatgaatctgaatttaatattatatctactctactaaagaccaattaatttagagaaattgttctgtgtaggcttatttaaatttgtggttttaaaaatgttagtatgaaatattagatatttaaggaattaagagaaaaaagttggctttcttcctcatgaatttcatatttatggtctatggtgtgaagagccaccttttggaaaagtgcgtttggatgatcttttttagcggacatggaacctgctgattatgaagaatgggaagtcgatgaagggttgtcggtggatttgaggagagtctgcttaattatgtggtcgcctatgttcgaatcgagatttcactcgaggttttctaaaaacggtgttaggtcaagtttggagattgagagtggttgaatgagaagctaagattacaaaaaagactctgatgaccctactcttgatttcactttcaagaatgaaattcaaatctctcatgttttggctaaaattccatgacatttgactaatgagttgctcatttttagcaaattgaagggtatcatgttagaaaaattaaatgacccaagatactaatttgtatataatttataacataataataataaataataattaagtatacataattgatcactgtatagcaattagcgcaatttgatagtgcaatactatcaattaagtctt

SEQ ID NO: 126263 - DNA, 1317 bp, Cannabis sativa
  modified_base (35)..(36): a, c, t, g, unknown or other
  modified_base (785)..(790): a, c, t, g, unknown or other
  modified_base (1036)..(1040): a, c, t, g, unknown or other
aaaatagaattttattgtaaatattatagttaaanngtttaaatgttaaaaatattataatagggacttaaataaaaaaataaaattatttataagtattaattgctaaaaagggtcttattaaatatttaaattaaaattaattgttttaagaaaattgttaattatgattaatttattctaaaaaagaatttttacttattagaaacctgctattataggtagaaaaaaaatgtaatcatcatgggtacaataaaaatattaccagtaatcacccaaatgtaatatgtgttgtatttaattatctttctattcgtacaaattgttttgaatgacctttggtttgataatacttattaatattaattgacatttatagacacataatttctcactcttaaaaacctgactaagttattattactaatttttttttctggaaaaagtgagtttaataataaaactgaagttagacttcatggtcattacaaaatatattatcaggtatagtagatatctctaccatactcataacattgttggcaaacacccatttggcaattatatgggccgcgtagttacaatttatagtaatacaagaaaaattacaattaggcataaaagtagagaggagcttgcaatgtcgcacatagttctcaatcccccaaacagagtcatccccctttaggttcgtgataataatctctgaatcactctccatcaaaaccaaaggatgatgcaatgagacagtcgtctccatggctaaaagacaggccgcagcttcnnnnnngagtgggtcagagaagtgtagcctttttgccgccacccacaaaactgattccttatggtccctcgcaatcgccacagcacacatagtgtcacctctgactttgacatcgcaattaattttaacccaatcttccggcggcagacaccaagcatgagtcccaacagactgtggaggggaaagaaggcaggagccataatttgcgtaacaagaagagatagagtcaatatagtgtttaatgttacccannnnnttattatgtaccttgtcgttgcgagtcctccaaattgtatctaccacaatcgaggcatagaggaacaactcatcaatgtcaacttctctagatttaagatcccatagaaaagtaacctagtcccacattcgggctccttaatccagaacaagcataaccccccaaggagaagaccaccaaaggtggaagccaaagttgaagtacaggaacaagtgctctgtggcctcctcagcctccccacaaatagggcaggaaacctcctcaaaacccattctct

SEQ ID NO: 126264 - DNA, 916 bp, Cannabis sativa
  modified_base (858)..(880): a, c, t, g, unknown or other
ccagccactcagcccggggcccggattcaagaaccagctgaaagagatcttgacatggcactaactggcccagaggctgaacaagttcatccagccgtgcaagcacagttggatgaactaaaaaatatgttccaaggcctgggggacaaaagctcaatgatatcgagttagaccaagcacgtcgatccgtatttactccagagattaatgttctagagctatcccacaagtttaaaatgctgacttggaagatgtatacaggaaaagaagatcccttatcacatcttaagtattttgaaatgcaaatggatttgcaaggggtatgaggagatgtgcgttgcagaattttccatgttacactctcagaagccgctcaacaatggtacttcaagttggcaccaggaaggtttaactcttagaaggctttctcctcggaatttcatgcacaattctcttctacacgccaactcccgttacatttaaaagacttggtctaagtgaagcaaagaccaagagagcctctccgagactacataagcacattcatgacaaaggcgacaaaagtggcgcagttaactaaagaatggaaattagctgccatactggggacatcgagattctcagagaaatgtggaaggacatcaagaaaagtggtctagtagattctatgagggattttctcgaccacacagatggtttcatcaagctcgaagaagccattcaacgagcagatgtcgagcctaaactaagccaatcacaagctccttcaactggaacgtccgttcaaggcacccagtaccctattaattaaagctcgggcggtaaaagatctaacaactgttggatatattttaccannnnnnnnnnnnnnnnnnnnnnntatgtttattaacaccctaaataagaactttctaaa

SEQ ID NO: 126265 - DNA, 751 bp, Cannabis sativa
gaaatactaacttacccactttaattaatacatcttctattattctccttacataagtgaatgatcgatctgccaattgtaacaaaaattttgtgggctttacttcaccattatccaactttttgaatatagaaagttgcatcattaataccagtcccaacatcgcataaaaatttctcaaattttaaaccaccaatctcataaggaaaagcgacctggatctttaaacttttgaggtaacttttttgaattatggcattacatttctcagttaagcccacaattttatattccccaaatttcttttttctttgtcaatgcctccttcacaaacttaacataattggacatatattctaatgcatcaataaaagggatgttgatgttgatttttctaaaaatctctaagaacttagcaaagtcctcatcaaattacttctgcactaatctttgaggataaggaattggtgatttatacactagaagatcttctttcttcatagacttcttagcaggcttcttttcaggaatatcttctttggcttctactgggccttcaacctcaagaccggttgacttatgttctacatccccatcaagtactttaccactcctcggtgaaatggaattacattattcttttggattgacaactatatcattaaagaaattactatttttctgcatcactcacaatattggccaattgtcccacttgtacctctatgttcttcatggaagtagtaatatt

SEQ ID NO: 126266 - DNA, 565 bp, Cannabis sativa
agattttttttttaaaaaattgggcaggttgcatgcagaattttacaacccaatctttacgttgggttagaaaatatgtagtataagccgaatgaactgactgatgtacaaccctagtgttgggttagtcaagtctgaaattacagaaacaattgggatcaaggaagccttgagctggataaaggagaaacattaggccaatgttataattgaagctgatgcattggtggtggttcaagctatcaatagcactattcttatgccatcttagtttggattattagttcgagattgtcgtgtgttgatcttttctcttattaacgtttctttaaattttgtcaaactatttgctaataagaccgctcattgtgttgctagagagtcttgttatttgtcagattgtgagtttagtgagcatgatacgcctctctcttaagaattttgtatcttctgagtgtttttaaatgaaatacatctttgattcaaaaagaaaaatatatacaccatatattattagggcttatttgtgtggcaggtcctcaaactatgtaagttttggcaaatt

SEQ ID NO: 126267 - DNA, 569 bp, Cannabis sativa
gtcttaatacatgagttacatcatttttttaaagaaattaaatgagttacattacatcatttgcaaaatgcaaaacagggtaacaaaagtatcataaccaacaatctctataataaataaataatatcagaataatacaactaaacacaaattagattattactatttgaataattagaaatcaagattacttatgatatcattaacaaattaacacaaaggggattaagtattataaagttgcatgacttgaatttttctgctttaggaatttgtaagggcatcccgatcagctaaactacctaaataacttttaaaaaaatagctaaaagatgttaaactaaaaaggcattaacttgttaaaaaaaaaatacactaatttggtaaaataaaaggtaagagcactccaaacatttttttaattttattttttaaaatatcaaatacaataatttttttattagggtatgtttggaagaaactgtgtaattactaggtagtaattactagggtggtaattacacagtctaataattacactatattttaaaatgcaaggtgtgtttgga

SEQ ID NO: 126268 - DNA, 862 bp, Cannabis sativa
taagggtgccttccctaataatttttaatcaattttttattttttttaattaaaaaagtaagatattttcagaacatattcggtaaagttgtttttacattataattttaaaataagaatcaaaatttctatttttttttttttaaaaaaaaaaatcactttcaaacaaattttacatatatttttttaattatagtttatttatatttaatattttagactcgaactctgacaaaaacctaaattcaggcttgaacacaagaccccaaacccaaactcagacctgaacctcaacttagactcggacctcaaaccctagccctatatctggactgggacttgaacttagacccagaccctaaccaaaactaggatccggacccgaaccgtacttttacttaaataaaaacacaaatagaaaataaaatttacaggacatgcttttattttttgttttgaaaattaaaaagcaaaagtaattacaaaatacatttttgtttttctaatacgaaaaatgaaaaacaaaagttgtactttcacttttgtgatttaaaacttttaaaaataaaaatattaccaaataccaccaaaataaactaagtctttgttttctcactttgatttgtcctttgtctaaccatcactttcccatgcatgccattcttgttgctacatattatcatcaacgcgtgaagcgctaactattgaggtgtcgaaggtagtcaataagagagatgctaaggtgaaggtagccagaaaaggagaagaggactaaccaaagaagttaagagagtataagaagattgttgatcaaaattatggactaaatctctttttagggttgttatgtgaatctcttgaa

SEQ ID NO: 126269 - DNA, 1374 bp, Cannabis sativa
aactaaaggatccaacaacaagaaaaagaaagatgtttgcagcaagaaagatagagagaatagcgaaaacaaaccaaaaagctcgcaagcttgacgaacacggtgaggcggccattggagatttagagggagttcgagcaatttctgccagaaatcggaggatacggggaaggacttttctccaacgaaagtagcgatcaggtactccgccgtgtcctgtggccgtgcgctgctccagcgcggggttgaaggcacggcccccattggttgagatcgttcagccgaataaactcgactaggtcaatgtggtgagtgtactctaatcaaagtggcccgagtccgagggatctaaggaagagtcgcgcttgattcacgtaaacggcattacatatcaaaagctagaaagcgatagagatcataaggtcagatcggctgggttcaatggagatggataccgaagacagctccgcgaaacacaacaatggtgatagagagagaaatagaaatggagtgagaaggacagagcttcgtagagaagttttttagagcaatgtttagagagagaaaaatgtaaacagattaggctttgggtttttagaacgaatatacgtcattacgaagttccattgaccattttgtccttttccttctcctcaaagcaaagctttgttaaacctttattttcataattaaactcgtcatttaatatttgcactattatatttttcagtcaaagtcatctcgaaactccttgtgtaatgaatgcagcaaaataaaataaaatactctaaataatttcagggttttcagatacttttaaaattatacatatttattaaattgaactaaataaagattgataactatgacaaggaagtgcttctttttgttaaaatgaaaaactcgacaatggttatagttactgttggcaaaacggtatgatatgattatcacacgactaaaaattcattcgaaaaattagttggtttggatttaccttaaatgagttcgagttgtgttcggattgactcgtttaatacgaaactaacatattaatgacttatttaaaattattttagtattttaatatatcataaataggttacaaacgtgtaatactttataaaatgtattattaattgataaacaaaatatgcttataaattgattatataggttgtatcgtgtcaacccgtttataaacgggtcgtgttcgggtcgagcatatatctattatacacgagtctcgacatgatataaatacaacatgcgaacacgaattgtcaccccaagtaattgttgggattttatgccctaaataaaactcattacaatctaatctgatttgtaatcaataaaagattagaagtcatt

SEQ ID NO: 126270 - DNA, 1087 bp, Cannabis sativa
  modified_base (1032)..(1038): a, c, t, g, unknown or other
caaatatatacatatttatatatgctctggacttaataaaatttatacattaaacataattatgaaataaatcatgtgaaccatgcaacataggatgatttctgatctttattaaaaagtaaatctaattatattgaaatgggtttatttaaggcacaaagcccaacaatgggaatactttttgcaagtgcatggagaagagttgaacttgagtaatagttcaactccctccgcacttgcgaccctgtaaaagactattttgaatgaaatagtagctacaacgccaggagtgagcacgctggaagtggttactcaagagaagactctatcatcattcaggagaaatctccgggctaccacccaggtcgcctagttaagagatggccaacagggctaatgtcttcgatcgccttgggaaacaaaaagatgtgaggaaaaatgtcaactaaaagttgttggtggaagcgggatcttctagctgtgtctctttcatacatgcagctaatactctgactggtacgcataccaccacccacggagtaggtagggttgaatttgaaactccgggccttagtcaaggatatggctaagctaaagccaacagagtatgagttggaaagagagcggtgatcaccactctctacatgattgagaacctttgaaattccctccatgtaaaaaaaaatctagtgtggcacctgtacactggtaaagaagacccactgtctcatatacataactttgtgaacttgtaaaagctgtctacaattagtttgcctcgtcccatcaacaataaatcgagcctaatgatttttttgacatcaaacaatagaacggagaatcccccaaggattacatccagagatttttggatgtcgctaccaagacaaaaagtcttaatgaagatggaaaagtcatggccttagcaactgaactcaaggagatgagtcctctgtgatcagaccttaaactaaattagtgtacactttgcatgagtttcttgatatagcagactgttggaaattattttannnnnnncttagatctactcacaagtatgtttattaacaccctaaataagaacttt

SEQ ID NO: 126271 - DNA, 2045 bp, Cannabis sativa
tataaaataattgctcttatactcactttagatatattatcataatgttgaattgatcctattattgacatattaattttagatatataatgagaaattacatttatttctactaattaatactagtgttgatatggccatgaaaccaaatcaaaaccaagccgttaaaaaattaaccactcagaagattttttgaatgtaagtactttctgtttcttaacgtataaattatatttctactgtcaattatttctttttatttaccgtcttattctacttttcataaattacacttagaaagcacgtaaattgtactagtatatatattatatataatgtaatcaagatatcatgttatcttgctaaataaaatattttttttcttgtttgtttttttgttagaacacatcttcctcgtcaacattgtgaatattaattaattaaaaatataaaaaaatttattagtaattacgaaaaggacttagtattttttattattattattttttgtaagtcaaaaagacttggtattcaaattttattctaagtatgcatatactttttttaaatgtttttctaatctatttatctatatatagtgcttctacaatatatttcactactaaaatagatgtattaatacaatctttaactatttcggcatttataagaattttttagtctacatttttttaaaatcgtatatgttacatcttgtaaaattttaaaaaattcagaataatttattacaatatagaaattaatgttcaaacaatgtatttcatacacgtataaaataaaaaagtcacgcatgtaatagactcgttgaatattatttttggtgtgttaaattttttcaaattttttaaaatttcgttagatgtcttaaacaactacaatgtttacaaccataacaaaatttagaataattttttttaaataccgaaacagataagagtgcatcagtggacccatttcaagaggtttattgtaaaattttccatataatgcatcacctaaaagtggtccactgatgcactcatatatgtttcagtatttgagagacttttttagtcccattttttgtatagttgtgtacattataattatttaagatattttctaaaattttaagaaattctaaaaaaaattaacatgccaaaaacaaggttcagtctgtcagtacatatgactattttattttagtggcattaccctatatactattttatatttttttttctaaatttacggtttgggttgctctagtagtttctgtgtaagttgttacatatattttggttgcaatttaaattgctccgttagttgctataaaaatttttatgtagatttttataaaaagtacaaaaaaaaagaaaaaattattttgaaatgtaaaaataaaaaaaaattaaaaataattattttatatacatgtaaaatacattgtttgaatattactttttatattataacttattttgaatattttaaaatttcaaaaattctcttaaacaactataatctacgactaaaaaaaaaaaatattggagtaatttttttttttttttggaaaaattggagtaatttttttttggaatgtcaaaaatatataaacgactcataattgtcagtttcgaagttccaagtcataaattgatctatgatgacgaccacaaattaatacagctttataatttatatatattatatgtaaccggaagcaaccgaccatttatctcaccgcccgccactgatcttttatttgtattttaaataatatatttgttttctcgttttgtaatttcttgaacaaaaaacacctatcactattcactgatagtgattacataacatatataagccttctaaattttattactagctcctcttatattaaaatattatcttgcttcaattttttcaattaaaaaaagaaaaaaatagccaactctatatgtgtctattctatataaagtgtgcttatataactgaattcttggtttatgaaaaatttatgggtgtgactttttatttatatttaa

SEQ ID NO: 126272 - DNA, 1031 bp, Cannabis sativa
  modified_base (657)..(657): a, c, t, g, unknown or other
  modified_base (809)..(828): a, c, t, g, unknown or other
  modified_base (876)..(876): a, c, t, g, unknown or other
  modified_base (999)..(1006): a, c, t, g, unknown or other
taaataagtgatgaaaatacttctctctctttattgataattgaataataaagattacattgaaatggagttttatttagggcacaaagcccaacacctcaatcgacgagccacgaaccccgaagggttgtggcttcaagccgtgaggctcaataggctgagccatgtgatttttcacgtgtgcatgtaatgcatgcatctccatgtacacatgaaaacgatgtgagagagaggaggagaacccaaatggacatttttaaggcattaaaattaaattctgagcaagttgatttttgacaccctgaggcgcgaggggcccgagcacccagcacccgggttgacaatctgtcagtctgggcacctttcaagtgtccgatcaaagatccgactcttgaattgaatctgtattcatcaaaaattgggaaacaagtcctttcgaaggaaaacaacaattcttgggcataaataacaaggccaaggacttcagggtattattggtgtaaaatataagtcaactatgtaattaactgccctcctatgtaattataaatacgagaaggttacattaaaaaagggacaaaaaaattcatcaggaaaaaggcctaagagctatatcagaaatctaataagactgactcgtggactatgcagaatttnaactgcaaaaccacataaaaacctttgagctcttatcttttctttactgcttttaatttctttgcaagtctatcacaatttaggcacaaatatagttaaccaaaaatctgcattaacaccatcctcattattaattttccaataaatattannnnnnnnnnnnnnnnnnnnttggtccaaaattaattaaataacattaattttcaactcaaatttaantttctataaatatatatatatatgattgaatttgaaatccaatgtatttgaaaataatacgtgtttcgaaattgtttaaaataaaataaaataaaactagaaaaaatattctaatttatgttnnnnnnnnattaaataaattaattttcaacata

SEQ ID NO: 126273 - DNA, 1480 bp, Cannabis sativa
  modified_base (1432)..(1444): a, c, t, g, unknown or other
gaaaatagagaattgaaaagaaagcccatatatcatgccacatcactaaccttaacaatagaattatataaatatatagataggggtaccatttttttttaagaaatgttatgtccaccatagttggactagaaaattttctaaattatttttctagtccagtagaaatagactagaaaactttctaaaacatttttctagtccatcataattggacttgaaaatagaccaattttttgaaaaacaaaaaatatatatcatgtccactacttgtttgctagtccaacattgttggacatgatgaaatttttttcatgtccaacaatgttagactagaaaaatccctaaaatatttttaatgtccaacattgtttttgttggacatgaaaaagagacataaaaagggttttttgtagtagtgactacatagcctcccctcaaacgatcttccatcttgcaccgccgctaccaccaaaaggaacacgtcgtttgaccttctttatcaggtaagactttcgacacaaggcaccaaacaagatctctaaccatcaactctctattaactagtgtactttcctccaatgcgttggaacacataccttacatggagccccaccgctacctcgagagtttcttgctcattattaggtcaattctagatagaacagagaacatcgcctaattgagcacatctacagacattataagagtacactgaggcacatcaccttaataggattcattcacatggctaatgttgggatctggctctgataccaatttattaaggattatcgaacaccaaccatcaggtatgatattgtctgttttaggcctaagccctcacgattttattcttgggcatctttccaaaaagtctcacaccaattgagatatgtctatccttatatacccataatccttttcatttctaatcaatatatttgtttgcattcccaacatgtacatatattaaaattataatcataataatataatgaaaaaatcatgtaccaaagaaaattttggaggattatgaagccattgatgctattaggaagcacaaccattaatgtaattaggaaacttttatttcatgcacagttatatagttttaagtggtattaataatcacattttagaattgagagttatgaccaaacatatattaatatccttgccaaaaccataataatagggaaaagaaattattcaccatatacatataacaataaaacaaaatttgtacataatttatatataaatctacacatatttatacaataaaattctcataaattaatttacagttatacatgttacacaaagcaaatttgtacataaaataagaaggcttgcataatttattaatggtaatttgtgataaaaagtgttatacatttctacacttttcttatctagaaaattatannnnnnnnnnnnnaaaactaagaaaattagagaaaactagaattaccta

SEQ ID NO: 126274 - DNA, 910 bp, Cannabis sativa
aatttatataatataattttttatataaatttatgattataaataattagattataacattctcattattatattagaattttaaaaactgatcacagcactttaatatttttatttactaaatactgaactcagcttaaactacagttctgctacaactgatttttctcacagcacagctacagttgctttttcccatagcacaactatatcaaactggcccttagtcatataatgagtttttaatcataataaataggtgtatataattatatgcaaacctaaaataatattagtgataatgttgcttatgtataacaaccacaatccaattctacaccaatgtcgattctaaatttgaaagaaaacaataataacaatatttaaatactacatggtgatggagttcaccaaggtcattctccatagaaaagaagaacaaaaaagaaatatgtaaaacaagtgtttggaaagtaaagtctttcctcttccttgtaacctgtgcaatttagattctttgtttatggatggatattggatcaatgacttcttctaccgatgcagcaagttaggactaaaaagtcaaattatggggacccttttgttgtttaatcaatgccttttgttttggtctctccttccaaaatggaaaggaaaaaaaagaagcatttaaataaaagagaaagaaagttgcatgactaatttactcaactacattacatatttcacaaaacttggaggaaaagggatatgtgaacaaaccaataactaattaagaataatgcctaaaattctaatttagtaaaaaacagcaaaatggcaaaaacaaaataagaataatgtagatatatcatatacattctaacaccgtctatcttttgagcattattattagacactagtggtgtct

SEQ ID NO: 126275 - DNA, 902 bp, Cannabis sativa
tgctagttagggtgttacaatgttgctagtagaactagagcctccatcccacagattattatactaagatcacgagaacaaccacaatctctgatagaatcactagacgaacttaaagaacaaagagatctagcaaacttaaagctataagctcaccaacaaaaagtagttagatacttcaatgtttaaaattgaagatttaagcctcatggcattttttttttgtgaggcgaggcataagcctcaaggcgcattgaggcgtaagcctcaattatttaatcaaaataatattttagagtaactaaaaataccaaagataagtaatgtcttataaaataccaaacatatcataaaatgtctcataaaacaataacatagcatcaaatatctaataaaactcaaatgtaaataaatatatttttatttctagaactagaatcatattctattatcctagaacaaattcagcaataatgacttgatgatttagaaatcaccaaactcatcattgcttgagaaattgttgccctcatcatcatcaccatcatcatcgtcactactaccacccccattgtgatcatgaatatcctcccattcatctcatcaacctctaccaagcgctttcgttttcctaagaaaaaataattacaaactaataatcaataattgattaacataatgcaatgtgtaaattcaaacaagaattagagtttacgaacccccttttgaactactttctagctagtttgaattgttagtggaatgagtcaattccagttctccaagttgagtatccttataccttgaccttgtcccattttcatcttcactttcactaacaagccattcatcatcagatggcaactcatcgatcaacaaaggatcatcttcatttgattgag

SEQ ID NO: 126276 - DNA, 517 bp, Cannabis sativa
ttctaattatatatatgtatatattatagacatttacaggtgattaattataacttataatataaattatataaaataaaaatagataaaagagcaccaagcaacagtagcagcaacttatgaggagcagaatcaagtatatgtgacaaagatagaagatgtagagagaatgggaatgaataatattggacacaaattacacaagtctatatgctgatgaaaatactggctcaataagcaattagaaatctacaatatcttttaaagccagacatacattcttacaattaaatgcctaacttctcaaactttagttctattgttctacaactcatgctgatcccaaaccaaaaccaacatttataaatcataaggatatgatttcttactaatttaagtttgtcttctaaaaattttctatctttgtttcacctgtctttaaattttatgataaatgttaagatttataaaacactcaaagaaatatataaatcacagatctaaacatattcctaaa

SEQ ID NO: 126277 - DNA, 1286 bp, Cannabis sativa
  modified_base (1220)..(1225): a, c, t, g, unknown or other
acatctaggggcaagggcaaagctgtagttgtgagctctgatagctcttcttctattgatgatggtattcgatagtttataacaccatgcttttattcttatgttgaatatttttgaatgcattttgactttactactttctttttgcaagcttgtcttctaggctgagaggtctcgcaggtggacctttaggtgagcctagcggtcaagtgagggccaaggtggccaggacctctcgcggtgcagatgctagtggaccaccactacctctccctccactagggcatgcacctgccgggcaacctatagttaagccttccggccaagatactaggaggctcggtagagcagcagggtcagctgatggtaagaagactgctgagtcagccactcagtagatagagagggctatcactttcttggaggaggctttgcaagagttgggtgatggcgtgcttgacaggttgtactctgccagacttcaagacctttctctagttagttatacttccagctttgttcatctctttggcactgtataagctggccagccatagtgttattttcatgtagatgcccggccttgggcatccatacagggttctgcctgaccatggtagtccaaagaagggactgagaggccagaattgtatatggtactgacatttttttgctttgtttttaggccttgatgaagttgagttctgctcgcggtggctcaagagggtcttcaaacgctttctaggagtgtgtgaaggtcttggaggcatctattactgcaaaggacaaagccaatactgagctggaggtccttctaatagagaagcagagaatggtctttggattagagattatgctaggtgccaggaccatcgagatcaccaacatagctgctctcatctccgggttgtagactgatcttgaggaacacaagaagaaattataggaggctcttgatttccagtaggccattaaggaatattaccttgatttttcctttgaacttacttacgagtgctgcctgcacaatccaaaagctaagttgtcatacttgggcactccaacctttgtgcagagaacactggcccgtaggagggcattgttcgagagtcacatggatattgactagactactgccaatcgagaggggtcatcatcaggtacccgtgatgaggcgttgaccgacccactagtggaggaggtgttgggttttatgcccnnnnnnaaactcatttcaatatagtcagatttacttattaatatagatcataaataacatttaatgt

SEQ ID NO: 126278 - DNA, 1413 bp, Cannabis sativa
tatattaaacactataaaataaagaaataatttaaaacaaaaccctaaaattattctgcctcaccctttctatatccttcaatttcttcttccggtctctcttcaatcacaacaaaaacttccagatctgatcgggccatctccaactatcatcgaagaaaatggaggccagcacaagcctaagagatcctgagaactcttgaccctctttccttctcttgcgcatccgttcctctaccaatctcccttcttttcgtcttcgtcatatggcggacggaaaccaacaccaggcagacccctccgccgccgtaagcacaactggacgtctctcttcatctacatctcaccttcattgtcttttagtattcatcttctcctattcttaggtacagacctatacatgatgggggttatgaaaccttgatgggatggtaacactactacaaatatcagaattcgcgacggtcttaaaaacgatttttttcgaggatcgtcgctaaaaaaattaagtaactatttaaaaccgtcggaaaaaattctttctctcactactgatcactgatggtttgtaccaaagaaactatattttggctatatgaacttgccttaaactatttatacccaataataattaaaactcaaatcactaatgaatattccaagtataatctacgccaccatcatacaagccaatcagagtgtttgttcttgggtttttgggttggagtctggtaagggaaggaagagatgggtttgtattcttcagttttgaatttatttttcttacttttatgttggaagggattatggaagaggactgaagatggatttaacaagttttgcttaaaaattttatgggttcaaaatagcattcaaattgctaatgatattttttttgagataatggatgaagttaaatgaatatatgtttaataaatcatgtttaattttattttaattatgattttatattttaaataaactatgtttaatatcttatatatttaaataatttattaaataactttttttaatattaaaataatttttaaatgtttaaattaatttctaaatacaaaatataaattaaatgatgtagatcaatgtgacagacctgatacttaacgaccaggtatttacggatgcaataaaaataggctaatcaggatttttaccccctaaattttaacatataccaaatcatgcctcctaaacttttctggccgttaaaaattcccccgaactattgagattgttagattaaggacttttgtttaatttcattcaattttactatttcagtgattgttaatatactaaactatacgctccccaaactttgatatctaccaaatcatgctcctcaaactttgacatatactaaatcatgcccctgaactttcatccatgtta

SEQ ID NO: 126279 - DNA, 599 bp, Cannabis sativa
tgtaatatatagagaattacatctacagataataaaactagtaactgatttttggaagagcaaaaatcataacttttttgtaactcttcatcacaattatttcaaagtttgcaattaagaaaaatattacacaaattaatgtaggatcaaagctattaacatatagcttttagaggaggttattattatactcatttaaatgattaaattgtggtagaaaaaattagaaattaagagaggtcaaaaaagagttacaaaaaattccataatttgttgtgttgaaaacatgtcatctcgcgtaggtggaaaactctcttttcgacatgaaaatagtatgttgcttattgttttgagttgtaatattctcttcattttctttttctctatttatgtgtaacttttatttagtatcgtaacattatttattctcttttattattcttgtattattttgcatagaatatatttgttggttttattatttctattgaacaactttttccaacaattaccgaataatataaaataatataaagtagaagagaagaaagaagaagaagatgaagagagaaagagaaagtgaatgagaatttctgagt

SEQ ID NO: 126280 - DNA, 1452 bp, Cannabis sativa
  modified_base (1414)..(1426): a, c, t, g, unknown or other
gttttggagagttaagatttttgttttagggtgtgaaaaatggagaaaaattaagtgagaagaaataggtgggcatgtgggaaatagaaaaaaaataattgggcatgtttaaaaccatcgcatataggtggcccaataaaatttcgtcacgtgtatacttgtgtacacagtagcaggtctatttggcacgtaataacagcaaaaaattaataggagtgctgaccaaaacgatcgtggagtataggaaattatagggagtttgactgcaaattaccctaaataattcatacataattcggatatggaaaaaagtaattatttgttttggttaattaatatttcttattatttaagtgaagtagggccacttcttctctttcacaaaacagttgaattcctctttccaaaccctagctgatcacgcctccaacgaagaggtatacatctatctatgtatgatctcaatttcatttgttttgttttctatttagtactgtttattttttaggcgaatcaatctctctaatttattctctctttagcttcacatgatcattagtatagcttagcaatattgattcgatttagggctgacattctctatctcacatttacatttcacacgtgttatcaattgtttgataatattgtcagaacatatcatccaatggacgatcaaaagaatactttcaaaagtatattcatatttaaaattgtttcaattttatattataggttaatatatataggaatgatttgttactatttggcttgggtttggttgattattccatctatatttagattaattagtactaattataatataaaagcaaatgtcatcgatcacatctcatctctgcagtataacaatagaattattattacataatcaaatggacaatcaagacagtactgctgcgtctgctggtacgtatatatatatgtatacacatacattatgtttatcgagtaattataaaatgtataaacaaatttatttgtatgtaatatgtacaatgttaattgtttaatttgcagaaccggtcaaagccaaagcccttagaaaatacccatatggtgctgctgcagaattgggggtaataaagaaacccctccccatcaatggagtcccatatcgtaaattcagccgcctccatcctgttaatggtaaatgtattaattactaaatgttttgactttttggttttactcggattatatattaagtttgtttaatttgcagaaccggccaaggcccctgggaattacccatatgataatcccttcaagggagtgccatatcgtttcagccgccttcctcctattattggtaaatatattatactggcgtttggttggagataatgaaatggaatggaatggaaaggaaataattttcattccattcttnnnnnnnnnnnnnttttaaagtattggaatggcattcca

SEQ ID NO: 126281 - DNA, 741 bp, Cannabis sativa
tttttttttttttttgaaaggcaaggcatgaattaaaaaaaataaataaaatagtacaacacttattatttatttaaagccgagggtaaaattggaatttttcgttatgagaaccccaccttttataagaagaaagaaccttcggagagaagattttataatctagagcaaaatattgttgtacaattactataaataaatgttaattataatatttattaattacaccactaaaacaatagtttagttgagtagattaggataagataatgttgctgtattgtcatatcgataattagttttgattggccactgttcatttatttattatataataaataataatttattttctttaattttcttattttttaattatttattttatttttaaattcttttttttttatttaatcattaaataattttttattctactttttttaattaaattttttaattttgtcaaaaaaaatagatattattaattaattaaaaaataaaaaataaataaattatataacctgagggtggatgagacaagggtggcagtcaccctgaataaaaaaaatagaaaaaaatattcatatattttagttactataattaaaagtaatattattacataatataagttttgatgtaatagttaaattatcttattctttcaaaagaaaatagttaaattatcttattctttcatccaggaaccaccaaaatgtatcaagatttaaagcccta

SEQ ID NO: 126282 - DNA, 3389 bp, Cannabis sativa
agacacaacaaatttatagtagtttactccctgtatcgtgacagtaatggagctacgtctactttgagttcttatttctcacgagatggtatcatagaaaaatgttaagtgtcagaagctcaaatttcttgagaaagaaattagagagaaaagctctagtcttgtggatagttttttgaatatgaaaaatgagctaagggagctctccttttataggtgaataagcccacacaaatagggggaaaatacaagttagatatttttgaccatagatgatgatagtcatttttcagagcccagcgagacctattgcgggaaactcacaacttattttcataactcacttgggggtaaaattttgtgctgatagctttagaattgtgattaaagtgtgagacataagttaatagagaattgaattatcttcaaaatgcaagttaaatcgcattaatttgatcaatattgagtaagttatagccgttttacttaaggcaattcatgacccagggcccaagttaacatctagcgctcaagttgacatcccagcccccaagttgacatatgacgtcaacctggacgctgggtaaatgtaaaaacatccaagggatgtactttaagatgcctaagtgatattttgacaccacttagtatgtttatgtattttggcgaagttggttaccagttctcaaagatgttgctattctacgaaaatgagagactcaaaactcttcatttccgagtgagtttcccatgttagaaatgaaaaatgcaaatttgtgattttgactgacttcatggatcttagtgattgtgaaaaactagatagacggtcgaaataaaattagaatcggataagcagagcccagcacaccaggccatttgtcaacctgggccccgggtactcattcctgagcttttaggatcttattttgatactttcaaggttcttaaacttgacgacaatgtcttttaccctgttttgaccattctagattcgttagtcgaatcaaatttggcatttgggaaattgaaaggagtgcaccaagttgattattaacctgcgtgttgggcccaacaccaggtcaacctgagcgttgggccctccttccaggggctcaagtttatggttttctccccaagtttacttgaatcttcattattttttatgataaaaaaaaaattcacagaatacttttttgagaacttgattggaaacagcccaggttgacaatatgtcaacctgggcactaggccaagtgccaggtgtcaacttgggtgttgggtcccagttatggccattctgaagttctgtttggtcctcagatttagttgaatcttaatatcttctaaaatagagaagatgctcgagagttctcgaaaaacatcatcggaatcgacctaagttgacaaaatgtcaacctggtcgttgagccttgcctttggcaaccaagatgtgttgtttcttctaaaaaatacttattttcccatatttgatgaagatgaagaaggtataaaatttagatcgccaatctgatacttggaaggtgtctagattgataaattatcaacttgggcactaggtgcctggacactgggtgctccgagtgctcaaaaatgaacttgctctgaatctgattctgatgccttaaatatgtccttgttatgtctagttgatgtcccaatgcaaagtttgacacattttcaccaagacagtctcaaaaactgaaaccctagttaggaatatcaacttgggcgctgagtgaaacccttggtgctcaggatggcttccaggttgtaggttcgtgtaatttcagctctcgcggcttaaatttgattggtccatgtcttcatcgtacaaaatattgaaagattgtgagttgggctcaagttattcaagttcgaacttccatcctagaactcccaaagtcaacttaggcgaagggctagggtcccctcctaggtcaactagctataacttgggtctactcaactccgtgacaacatcattctttccacgtgtcaaatattgatatccatgtcaccaaggaaaatttctaagttaatagtaacaccctactagattaggtgtgttattgtaatttcttaataccgtgcactcctttactaatcaaagggtttatggaaaacatgattaatttaaacttcataattaaagcttgaatatataaatactttacataatttgggatgacgttttaatccgagatcctatttttaaaagttacaactgctttacaaaatatttagttacaaaagatgtcgcctagcaactatcaaaataaagcctgttgtcccgaagatcgaatactccaggtctaactacccaatatgtacaatcttcatccgctcatgctcactgttgtttagctttaactttgcccttacctatacatataaacaatatatgtgagtcgacaaaatttgtaagaaaaacataattatgacataaatataaatcgaagtataactaggtgcccatacacccaataacaatcctatctcgcatcccacacatactgagtctagaatgttcataaaataatactattgatcataatatcaacttatcctcgatactctagtcatatcgatgtgatagcatcaatttgtactatgccaaacatatatatgtcggtattcagtgcaactctatgtacactaataccactattactgatatgttatctaataggcattcataaacatgcatgctaaacatgtcatcacatatgatattattaatcttaccttaattttgaattcaggcgtgctggtcaacctgagtgaaaaatgttgctcgacgatttacaagctcgtatgtcacaacatacataaaattgataagtgatacagtaaatcactttgcgtggtaatactctaaatatcgataaaacataaaaactagggtcctaaaactgctaaaattggtaagctagattcccaaacggtaaaccattttttggggcctgcctgggaaatcggtgtactgtttcttcagaaacggttaaccgtttcaaccgtttctctgtagaaaacccaaaaaactcaaaaattagctttaaacttccacaaattgtaccaaacactccagaatacctaattcatctaaagttggagaccataaatttgtcttttttgttccttcattgttgtagtttgctgacttttttactaagtcgcatacgatttcttatttttattttcttttaggcaaactctcaatgcttcttccagtagcattgtgagtttgaggaaaggtgtcaaataattatttagggttattttaatcttttcttttattttagtctatgttaattgcttatataaaacttttttattagttatattcttttacttttgattttata

SEQ ID NO: 126283 - DNA, 979 bp, Cannabis sativa
ttgtctatagtcttttgggtaaatctttttataacatggatccccaaaatacctttttaatgttgttatagtgtctgctttcagtcttttattttattcaagtttttaatattctcataatttttaataattaattaatatattagtattaatctaatttataaaattacacacgtggtgtccctatgaaatagagcgttacaactctattaccatattatttaatgaaagaaaatagttatgtgaataaatatgataaaagaattcatattacgacatcaaaacttgaaacacttatctgtcagatctaaaatatcgtttgtagaaggtatgagtacaaaatgaaacatttctcttattcattgaccatatcacaaatctaccttaaacaattagaggcaagccatagaaatggcacaaaagtcacaaaaggcatgaaaaccataaacaaatagtgcaaaaaccagcatagtcatcaaaccaaaattttattttaaaaggtcattttctacctacaaatttttaattgagctttaaattataaaacaaaacaaaaaaaaaacatccaccatataaagcacaatgagccaccaaaaatagcacaatcaacccccaattaagatacaaattagccactatatatggctaaacaagtgttaaacaaaataattcactctacaaatcttactcacaaatagtaaattattaaagagaaaaaataaccaatatatcaaaatataaattaattggtttgactaaattcaaaaatagaatctaattaatatatattattataaaagttgtctattaaaagtaaattataaaaaaaaaatattacattattcgtataataaatatattactattaagtagttttaactaaaaactattaaacaaaagagatactaatagggaaatttgaaaaactatactttaaaaatcttaatattttattcttaaactaatacatttcaaaata

SEQ ID NO: 126284 - DNA, 2215 bp, Cannabis sativa
ttattttactaattttacctctattacttcacgataatctccattcttttctaattaaaattttgtcccaacttttttttataaatttacacatccacacatccatatccaaagaatacaatttaatatgtttgaaattgtgtcttggttatgtaagagtgtaagaataatttaagtacaatactcataaaaagatgtatatttgaattaaattttatttaaagataaattgattaatgtataaataaaagatatttttcaacttctcacaattccatacttgtaccagacccaaactcgaaaatccgaacactaaatataatacgcacttttcgaaatttgacacaaaagaactccaatacaaaaaaccgataaggatagggaaatttcataatccataatttaaaaaacaccaaattattaaaacaacaccccttaattatactataccattttatcttaataatttttactatgactcaaactaccactcctagttaattttttcaaaaatctcaaaaagactttctctctctaattctctcattctctctcatgcctaacggacccgaccgaccctccgctctctctctctctctctatctctgacgaccctttcacccactctcgacccaccgacaacacacttcaccattcgaccatttgacgatccagagcccccgaccaccgccattcctccactgttgacccacccctcactggaagattagatttaaaaaaaattatgagttaagaatttgtttggtagatttaatttaatttgagcattgtatgtattaaaataatgtgtttcttagattcctgtgagattttttgaatttgtatttgtttaaaacattagatggtggtggtgagtttggtttttctgccgaaatttgattatcaaggggttattgatactttatcaatggtttttatttgtgcaccactgtacaaacataaatcatcgataacataacaataaatgtcaaattgactaaacacaaacaaaaatcatcgataaactatcgataacttgcattgataaactatcgataaattccatcaataatctattgataatctatcgataaatgtcaaattgacaaaactgtattacataaatataaatcatcgataacttatcgataaatacatttttcgccagaaaataccataaccaccatcatctaaggtctcatacaaacataaatccaataataataattaaaaaataaataaatacaaagatgaacgcaaaatctggtgggcatctagtcgggctcagagacgagattgccttctcagtctggagaacactcgcagataaagacggagatggatggaggtttggggcctctaggttttttcgacgcttgagtgctatggaagtttgggtcccgggcccaattaagttcaaaattcggtatccaaataagagtaacgatcaaatttcacaaagaaaattatactacatacctcttttaaattgataccgttgatatttatcatctttttcaaaacctattatgtttacctatttttcaattattttatcaattttacccatatcacttcacgatagtctccattcttatttaatcaaaatttgctctaactttttcacaaatctacacatccatctcaaaaaaacacaatctattatatttgaaagtgtgtcttgattatgtaagagtgtaagaataatttaggtaatgggtacaatacttataaaaaagagtatatttgaattaaattttatttgaaggtaaatttagttaatgtaaaaaaaaaaatattcttcaaccttttccaatttcacacctgtacctgacccaaaatcaaaaattcgaacaccaaatacaatacacacattttgtgaaattcgacacaaaagaaatccaataccaaaattcgataaggatagggaaatttcataatccttagtttaaaaaatacccaattactaaaacaaaaccccttaattatactataccattttatcttaataatttctactattacccaaactatccttcccatttaatatttttaaaaatcttaaccagtcccttgattttcaaaagtggttgaggtccaatttttgcgatatcctactattttcgtgggtatatagccacctttgggcttcatgcgaggttggatgatgctgggagagtgttggatgtgtaagactgtgggagtacctcctagg

SEQ ID NO: 126285 - DNA, 1178 bp, Cannabis sativa
  modified_base (92)..(125): a, c, t, g, unknown or other
  modified_base (1072)..(1072): a, c, t, g, unknown or other
ttttcaaagagtttttaaaaagaggatcaccagtttaacagttaatttggaaaaaccaacccaacaaaaataacaacaacaacaataataannnnnnnnnnnnnnnnnnnnnnnnnnnnnnnnnnaataataataataataataataagagtttgagtttttatttttatatttatatcacaatcacatactgaaatttttaattttttttttactacgggacaaaattgttttaaaaaataatgtgtattctttatattgtgtattatgttaagttttcattgttaaactacaattgtttcttattttattattttacaattattttataaaaagataatatttatataaaattataaatttttacctaaaatctaatatttttataaaaacccctaataataatcataaaacaaaatcattatctccatgtaatcaaaataattgcatctcctctatacaagttggtccatcccattattcccattagtctcataagagccccttcaagtgatataaagttagtactttttacttataaaataagattaaattgtaatagttgtgtataatgtgagttaaatggacacattttaaaaataaaatttgacacaatataatatatgagctaagtttacctaataataaatataactttcttttatttactcttgtgaattagtaactgatattttttttcacatcttatttaaggtaaatactattttaaattttgttttttgtaaaaattattaattaaactatctttaaatgacaaattagatactgtattttttaaaaaatataaaaaaaaaactctaatttttttttttttttttttaaaaaaagggtcataataatatttaacctttttatttatatatttaattaaattttcttattctttccatcaaaatttatttatttactttttctttttatttttgcccaatataatgcaacaactataaaatttggctcacatgtgattctacaatgtaccatttaaaagagatgtactgatgtactctctacttatttcggcatctaaaagaattttttagtctaattnttttcatattcatgtacgttataaatatttaagatattttacaaaattttgagaaattcaaaatattcaaccagtctattttatacgcgtataaaataaaataatc

SEQ ID NO: 126286 - DNA, 800 bp, Cannabis sativa
  modified_base (758)..(762): a, c, t, g, unknown or other
cggtctcggcattcctgctgaaccgctcttccgatctatattttaatagttgccgaaaacctcggtcaacagtaacttttacaaaacacagaatctaaaattgtatttaccctatatgctttagttttttatttaagttatatttgtcatatataatttaattaaatgaataatattattttaataaaaagatgtttaatataaattaagttgtaagaaaaaaaaataaacataaaactgatatgaaaagaaatttaaaaacaaaatattagtaaaatgtattaataacaataatagtaaatgtttatatttaaaagaaaattgaaaattaaggaaaagaaaaacaataatatactctcaacattacatcatgttacaagagggtctagagtttctctttaggggttgagagcctttcgccacttgagattcttttttccctctccagtcatagcttgccgatttgtgggccaacttgtgggttttgtagtggccatggttgggggggagtatttgattgtgcatttgaaaaagttctctgatggaggatcaacaccttttggtattggattttagggttttcacttggtcgtcataaagtttggctctggttgcttctggtgtggggtgggttccgcggtgaggtttctgatttgggtcaaggatgtttgctgatgggggcctacttcttgtctaaccatcgtggtgttgggttttatgccctaaataaaagtcatttcatataatcagatttactnnnnnataaagatcagaaataacaatttatgttgcatggttca

SEQ ID NO: 126287 - DNA, 965 bp, Cannabis sativa
accttaggtattttcaccgccaatttttgaggttgaggactaattggcatcaacctcaagtttttggggacttttgccgcaattatccaaattattttattgttaattgaaaataagattagttaagtaatgaatcttatttatttttttttgattgtcagaactaattctctttcttaattaattttaattctctcataattaatgttaattctctctctaaaaccaaaggttataataattttttatagtttatgtaattttttttggaaggaatatttatttgattagagacatatagttttttaagaaaaaaaaataaaaataaaacacatacaattttttaaaaaatttatacatacatgcagtaagatttttatatatttattagtttattgtgtattaattttttttttttttaaaaaaaattactaattcaaaagattcaaatagctagtatttttggtatacatacgtacatttttttttttccctattcaatctattttttttttttttttttttaacaaagttgtttgtttctattgatattttgaataacaaaaagttgctaatttttttttacaaaatttgttttgttttattattattttattcattttctaaaatatttattaattctctacatatattatgttaaattggtcagaatgttaaatttaaatatacaaatttatttaacatagtatttgataatttctaattagaaattttgattaaatgctattttttttttgttagcatcatcaatttcgccactgtaaggtgtgtggtattttaaaaataaatttatttaattgacaaaaaaacaaattaaaacatataatatatcttttaatttattatattatttattgtttatcaattttttaatcatttttaagcaaatttttatatttataatgtataaataacttcaatagctaattagctatattttgtaa

SEQ ID NO: 126288 - DNA, 718 bp, Cannabis sativa
tatattaagggttaaattttttatagatatggctcctcttgatggttggctgagtttttgatgtagcttttgggaatgaagtaatggtacccaaaagtcatggctagaatttttgtgaacaggttcaatgtgttgtgatgccaaggagcgtagctgttttcacaatgttaatctggctttggtgtttccacaatgctaatttagctttggtgttttcacaatgctaatttggctttggctattattgctgccttggttcagcttatattttgacacaggtttggttttattataaatatctagatttcattagtgagttgaagactaggagctttgcaaggaaataaagtttttgtttgagaagatttcatgtggctggtataatggagcttcatcctaattagtactatggatgtaattctgattgtagatctcctaaaaaaaattcatatcacacagattttgtagatttttagaccgttttggctcattttatgaaaccaaaattatcaaataataataaataaataaataaaattataacgtattgaaactattcacctctacaaaaaattacctgtgactttcattactcagaaagaatgaaccataagtatatcttaaattaacactcattgcgtagaattttatattcttgtctagagatttaatgtttttttttttatgaataatgtgtaaagcacgtgcgtatatggtg

SEQ ID NO: 126289 - DNA, 1177 bp, Cannabis sativa
atcaaaaagactcattgtcgttggctaaaagcgaagtcaacaatcatcatccaccataccaccaccaacccactaccattactaccaccaccaataattttctaaaattaaaaaaaataataaaataaaataaaagaattgacccccatattcttaattgtaacaacttcactgtaagagattcaaacccataagaaatgaggcctacaaaaataggaaaaaaaatacaaataagatatttttgactgttgttaataatctaatggtgaaaactagctcttggtcgtgatggtcattttttggagcccagcgggttccattgtgagttacgcgaagcttatttttgtaactctcttggggtgaattttgacgatgacatcttcaaaattacaatttaagtgtgagacatgacttgatatagcattgaattagcttccaaatgcaaattgaatcgcatttattagatcaaaattgagtgagttatggttattttactgaaggaagttcatgacccagggcccaagttgacatccagcgcccaggttgacatcccagcagccaggttgacatctgacgtgaacctgtacgttgggttagtgcataaacatctaagagatgtactttaaggtgcctaagtgatattttgacgtcacttagtcagtttttgtgttctcgtaaggctggtcactaattctcggagataaaactgttttgtaaaaatgaaagactcaaaactcttcattttcgagtgatccagaaatgagaaatgcaaagttgtgaatttaacttctctgacttcatagatctttgctattgtaaaaaactagatgggcggtcgaagcggtatcaaaatcaaataaacagaacccaacgcaaaaggccattggtaaacctgggcactgagtacttactctcgagctcttgggatctcattttttatacttgcaaggcttctgaacttgaggacaaggtctttcaccctatatttgaccattatggattcaatagtcgcatcagatttggcatttgagcaattgaaggcaacttcctaagctgattgtcaatctaggcactgggtcccgtttctagggacttgagtttgtggttttctccctgagtttacttgaatcttcattaatttttggggtttttttccctaaaaatccaattttttcat

SEQ ID NO: 126290 - DNA, 2073 bp, Cannabis sativa
gcacaacaagtgggcagacgctctttctagtttctcttaatcggattaatttttttatacttaatgaattcatattaatgtataaaatatttttaaattaaaatgaaaaaatgaaaacataaatttaaaatttaaaatagaaaaattattaaaaatatttaaaactagtaaagagtcccgctttcgcgtgcgacagttaaattattatataagaattaacattgctataaaataattttaaatttatttttatgcatattttttaaaatatatgtatttattgaaaaaaataattaatctatataaaaaaaaaaaactctaaataattaaaaaaaattatcatacaatttcttatataaataaaaaatcgcgcaatttttttttttaaatgtacaatattatagtgaaaaaaattaaaaactcaacaattcttacacaaaatagagatctaaaatggaaataatacaatacatttatagaaaacttatcatataatttcaaaagaactatcatcatcgtatttcatttatagtcaccactgtatttaaagttgatgtcattacttgtaatcattattaatactatttctaatatagatttgttttgtacatatgtaaaataaattaaacaatgatctagtagtacttacttttattatgtgagaggagagggggtgataaacataatcaagtttagaattttaatttttttggtatattagttaataatttttttttgataaattatattagttaatattaactatatctctttgtaaaaaaaattgtatgcacattaatttttttaatacatatatatttatttattagttattatatagaaatgtatagttgttttttttttaatttttaactaattagtgatctctaatcaaatagatcgatcataataaaaaattagaaaaatgagagaattaagtagaagatttaaagtagaactgaaaaattagaaaatgagaaaattaaagagaaaatagattagattttttctttaaaatttttaattaattatcataaatttaaaaaattaaacatagatttgactttcttttgttttgttagttattatgtacgattagatattttcttaattattaattatgaatagaaagtttttttttcttaaatatacctgtatagatttgaaagagaaaaaatattgtgtcctatgttgatatagtttcttttagttagatattcttcttcttcttcttcttattaacttaattggaggttttttcttttaaaagtaataaaaaagctaaaaaaatgagagaaataagaagataatagatgaaggtattaaagctatacttagtttaatttttctaaatttaaaagtttaagaaattatgtaaatgaaatacaaaaatttctattgtcatcatgttgcaacaatatgtattaagagatattagataagaatgttaaaaactttacaaaaaaattagaataaataataatctatatttatatatagagagagatttatgaaattgatattctgtttatgatttttgacaaaaaataaataaaagtcagacgatgaactaaaaaagaaagtaaatattgtaaaataaaataatattttaaaaaaaatatttcaaaatagtaaattaaaatagcgttaaactcgtatagtttttaaaataatacatttaaattacacttaacgtatatatattgttcaagaaaaaaaatatacttatatattctctcgtcttaatcacatcatcttgtctattttaatactttgactggattagatatattttacatgtaggaaccatttatgttttaaaataaggtgtatacaatatgatatcaaaagaagaatatcttttattttgccaaaaaagataaaacaacaaaatttagcatggataggcaaattgtagaagatatatgtcatgtacattaccacaatagttaaacagcttaagccatctttctttgttagtgctgtctagttcatcaataaaatttgtaataatacaatttctcatttttcaaaaaaaaaaaaaaaaaatagagaagaaatagtaaataatta

SEQ ID NO: 126291 - DNA, 574 bp, Cannabis sativa
atttttttggttctatcatggaatgtttggtttgttaggaataatactaaataaggagttacccaccacaggcagaggagatgattgactggtgtgcaaagtatattaatgagtacaaggaccgattgggcttaaagaaagggagcatcaaagggttgttgcggtttggactccactagcttttgagacattgaaaagatgttagtgtgaggtaaggtactagctgatctggtgtgacttctgttattcgaaattgagagaggcaggtagtgtttgcttcatctactgtcatgcagcatgaatatcaaccattgtaaatggagctgttggtgattcatgatagtttacaagcaagaattcaacgagcattaccaaggtttaacattgaatttgattgcctaaaagttgtccaattaatctaaaataaggaagacggttgtagggacgttgatgatgtgctacgccatattagcggttttacgccataaataaaatttaattttaatataatcttatttattatgggaaatttacattatgtactaacttttccccatttattacaaaaatactg

SEQ ID NO: 126292 - DNA, 795 bp, Cannabis sativa
tacaactcttgcaaaaacacggtttttcaactgtaatcatttcaagcttaagaatagaaaaaaagatgtaatctgaatgattaagaattagtaagttgttttgtttgggagtccccttgctttgtattagtttggtggttgtttgaattaaattttattttttttgttaaaaaaaagataataacattacaacagcgattttttaagaaacatatatatttcttattttattatttaaaaaaacaataatagaaatatatttttttagatatgtggtttgagtaaaaaaggataataatagaaaaatatattttagatatgtataatgaatttaaattttaaatgtaatgttaaaaaaaatactttatattatatagcaacatttaatataagataaataaaaataagaatatatgtaattaatttaaatttaaattgtaatattttaaaaataaataatactttttgttataaaattatatttaatataacataaataattttaatctataatagcattgttcatattattaaggtattaataataacaaaagcaaagtaacaaactaaacaaaatgaaagatttaagtagtacaaataataatcaattaggttctcacatacatgtaaattaaagttgactcgacaattgtgatatattgtgacttattttcaagattcaatcttcgaacttatagataatattaggaaaatttgattttctatacttagaaaatcttaaaattttttccctaaaccaaaaatttaaatcctaaaaaaactataccttttttt

SEQ ID NO: 126293 - DNA, 1853 bp, Cannabis sativa
cctgtgtctctcactcctcttgcttcagcttccccttctccattttcttttccttcctcgtcctctgctacccccttctcttagtatccctactcctcctgcttctaattttcctgaggttccattagtggctgatttaaatgataattttgagtctattgctccattaactactaatgatcaccccatggttacgcgatccaaagctgggattcgcaaaccacgtttgttgttgagtatttatgcaggaacccctatcgagccctcctccttcaaggaggcagccaagagttctcattggttgcaagctatgcaaactaagatggttgctttacgtcgtaataaaacctggcacctagttccccgctcttgtgcttctcgtgttattggttgcaagtgggtgtacaagttaaaattactacctaatggtgatattgatcgttacaaggctcgtttggtggctaaaggctatagccaaactgagggtcttgattattttgagacttttagtcccgttgtgaagcctactacaatttgtgtagtactttccttggctgtccaatatgattggtgtcttcgacgattggatgtgcaaaatgcctttttacatggtgatttgtccgaagatgtgtacatgtctcaaccacagggtttcattgattcttcgcaacctgattttgtgtgtaaactagacaaatcgttgtatgggctgaaacagtctccccgtgcctggttcactaagttgagtgcatctctgctgcacaaaggttttcttgcctccaaatctgattccagcatgtttgtcttgtccatccctggttgttttattgtggttcttgtctacgtcgatgatattattgtcgctggtcctaatgatgctcacatcaatcggtttatcgctggtttggcagctgagtttgccatcaaagaccttggtccgctgcattattttcttggtattgaggttcatcgcaactctacaggtttgcatcttagtcagtccaagtatatcttggacttgctatctcgtgcttcaatgtctgattcttccccaatgcctactcccatgtcttctactagtgttctttcgatgcattctggtgttcctttggctgatggcactcaataccgttctatagtgggtgctttgcagtattgtacgttgacacgtcctgacattgcctttagtgtgaacaaagcttgtcaatttatgcattctcccacagactctcattggcaagccgttaaacgcattcttcgctacttggctggttcgattgattacggtttgttctaccaaccctctcctgatcctactttgttatgctacaccgacgcagattgggcttcatgccccgatgatcgccgcagtaccagtgccttttgtatcgttcatggtgttaatcttatttcctggtcttcgagtaaacaacgagtagtttctcgctctagcactgaatccgaatatcgtagtctcgccaatggcactgctgaactgttatggcttcgctctctatttcaggacctgcactttcctttaccttctgctccagttctgctatgtgataaccttggggctacttatctcggctccaaccctgtacttcactctcggatcaaacatgttgagttagattttcactttgtgcgtgagaaagttgctgatcagtctctgcttattcgtcacactccttcagctgagcaacttgcagattctctcactaaacctcttgctgcccaacgttttctttctctaaggtccaagctcaccgttcttccaagaccgatgaacttgcggggggatgttaagacaaataattaactagtgttcttttgtatataattagtttatt

SEQ ID NO: 126294 - DNA, 533 bp, Cannabis sativa
cattccataaacaaacgtgacatagaacccagctctattatcaaatggtttaacaattagatgcattaattggctagtatagacaattgagattgtaaacataaaaggattccagccaataatcactactataaaaagaaatttttgcgtcaatcaacacatctggtcaaacttgttgatcgaccccaaagtcaacctatacttttttgcttcagttatctaccgacgcaaataattattacttagtgtcggttatctatcaaacactaaaaaaaaccaaagcaaaagatgaaatatatataaaaaaaaaaatatgtatacactattggcgtcagtctacaaccgatgcaaaaagtcattatatgtactattagcgtcggtgcgcatccgatacaaaaatgcattaaaaaaaaattatgggctttggcccgtctttaaaaaaccctacttatatatcccaactaaacctaattccctctcagtcgcctcattttgtttcacacacacacacacactctttctctctctctctc

SEQ ID NO: 126295 - DNA, 708 bp, Cannabis sativa
caataaatttatagtagttcactcatcatatcatgatagtaatagagttacgcctactttaaattttatttatcatgagaattataagaaaatgggctaagtctaaaagctctaatttctagagagaaaaactagagagatatgatctaatatgggtactttttttaaggtgaaaaatgacctagaggagctctccttttatagggaataaggtcctattaaaataatgataaaataattcaaaaaatatggaaacaaatatatttaggctatttttggctgtagatgataatctaacagtgaactgattccaaaggtctatcatcaatttttggagcttatgtcacgcctgcgggacccaccccatgtactaagctgtatcttaaattcgtaactcttttgagggtgaaatttaaagtcgataacttcagaataaacattatagtgtgacacatgacttgatagaacttgaaatagcttcaaaatgcaagttaaatcgcatcaatcagatcaatattgagggagttatgactattttactgaaggttgttctgatccccaatgcccaagttgacctgtgatgttaagaggcttggtgagtgggaaaatgtgtcgaggatgtaatttttgatgcctaagtgatattttgacatcacttagcatgtttctgtgttttggtgaagctggttaccagttctcgaagatgtt

SEQ ID NO: 126296 - DNA, 1432 bp, Cannabis sativa
tttaaaatttttgaataatttacagtgccaaaaatatgtttaaaattttttaaacgcgtgtggtaaattgaaatatcaggaactctattttcggcattgtagaatattggaaatttttcaaaaatttataggcatgatagtactataacgataccgctattaaaaaaatttgaaaaaatattctagtatgtgatttcggacgtgaagattgactcagaaattataataaaaagttgtaattagcactactcaataaacatttaacattactcagattcacagttagtccaaaaagaaaaaaaaaaattatattatagagtcccacattaataatggccctgtttggcttaacttgtataaggtttttagaattaaaaaaaaatctggtgtttagataaaaaaaaaaaaaaaatttaaaaatctttttagaaaatgttaggatttgtagcttctctacaaaagacttttagaagctattttaacaattcaaataatttacataatttttaaatattttttttaataatatccaaacattttgaaaagtatttttcattaagaaaaatctttatataatagtaaaaataaaataaaataaaacttatatttattttatacttttagctataacctaaaataaaaacttaaataaacaggtcattatgaaaattaaatactataagttactcttcttataattaattggttttgagatataaaataatacaatcttacaatatcattctaaattctagcataacataactaagggctcgattgttctgagttcatctgtatggataatcacagattaatttagaacattttgttatattgtgcttttttttttcgtgatggtactgtgtcaaaaagcttgatactgttataaaataatatagaataatataaaatagataagaataaaacaagaagaagatgaagagaaaagagaaactgaatgagaattttttagttctttattctaaaagggtgaacctctaattatacaaaaatatgactaaaagaataggaaactaaattaatataataaaagaaaaatacaatcaagcattaatggtgataattaatttggtgatttggacatccataaataatatttcataacactcccccttggatgtctataaaaaactgtctcattaaaaaccttgctataaaacttggtcaaaagaaaaatagtgcagtatgaattaactctcccttatttatgcatttgtggagatcttctaatcgataaattccaatcttgtatgtcgtcttctcaaatattgatgttggtaataacttgtgaatgagtcagcaagattgacacttgattgaatttgtggaacaccaatatgcattctcttgaaatgtataaagaagaatttggtgaaatatattttaattctatctccttcaatataccctc

SEQ ID NO: 126297 - DNA, 931 bp, Cannabis sativa
tctctctctctctctctccccttcgagcctagcaagatcaaccattacttggattaatttgagtgaatttggggaggtgtttgctgaatccaagtggtattaatcaaagggcatccatccaggactaagtttttcgttcaagttggccaactcacttaaattacgaaatgaggtaagaatagcatagaacatattgtatatgtgaatgtatgtatgtgtgatatatatgcatgcttgttgtgattcagtcgctcgtaaattgtaagaaagaccaagaagaatcttgtgtcttttctcgatctatggggtagggatgggtcttttagtgatcactggaaacacaataaagatagaattagtaaagtaacaaaaagctcataaaaaactcaaaaccaagaatttgaggggagttgttacttacgtataatttgaaatttagctgtgttgatgggataaagaccagtggtctaaaagaagtcatccttgaactcacttttattgggtagcctcgtgatgatcttacgatcatttatgtgaaacccaagataataaaagcctcatgctctgtgtttcctcgcaggacaagccttgacagaataaaaatataaaatctctaatggcgctggacattctcacttcacgatgtggtaaagagactttaaacaagtgaggatcctataagaatttggtgtcaattaaaatggtgcaatgttgggatagttgcagaaatcctaaagtactccctgagaggaaggattgctccagccttgatatgctcgaggctccaagcaccaattttcgaaggttcactggtgttacaaccatcatctcgggccaaatgttcagggggataacaactgaattcccactgggaaacagacctaatacgacatcctttctcgttgctgatggcgcatgaccttagaacatc

SEQ ID NO: 126298 - DNA, 1114 bp, Cannabis sativa
taattgtgtttagtttgttgtgtcattgtaataaatggaagtgtgtgtgtgttagtaagtgttaaatagacttatgttgttatttttatgtgtattaagcagaaaaaatgtgaaaattggtatttggcaatgtttgggacaagaaggaaaaggagcagaaaaagtggcattgctatagcaatcatcacgtagcaattgccagcccagtaggtgtaatttggcagaaattccagctagcgttaatgaaggaaaaaaggtgctgaagtggcaaaaatgtggacaatgactcaactaatatgtggaaaatgaagggcaagtggaccatgagttggatttccaattagggtaaactttagtaccttaattggggagcaaaagagaggaaggacattagaaaatgatggcttcattttagagaggagggagtacgaaatttcagatctaagtatagaaaaaaaaaagaaaggaatggaagagagtacaaagaatagaagaagaaggagaagaaggcaacctctaaagaaaagatttgagctcacaaactcatttctcttgctctcctctaccattttgtatcattttttactctttagtattctcttaaacaccaggaacatgtcattttgtatcatttgcgtttagggtttaggattttcagttaagggttaaggatttagtttgtatggtttagggtttagagtttacggtttagggtttaagatttagtctttagtgtttaggtttttggttaagggcttagggtgtacagtttagggtttaaagtttaggatttaggctttagggtttagggaataaggcctagggtttagggtttcgagtttaggatttaggggttagggtttcagttttagggggtttagggtttagggttttacggattaagggtttactgtttagggtataaggtttaagggtttagtgtttaggatttaggggtttagggtttaggattaagcatttagggtttgggatttagcatttggggtttagagtttcgggttatgggtttagagtttaggattaacggttttgggtttacggtttatggtttaggatttttttatggttaagggtttagtggtttaggatttat

SEQ ID NO: 126299 - DNA, 852 bp, Cannabis sativa
tctctctctctctctctcgatgacgaaaaagaagagactcgtctcgaagcctgctactccgaccaagattgtagatcttgctgagcaagagccaccttcgatccaagatggaaatccaaaacaaatttcggtggagatttttcatgatccgtgtgaagaacaagagccagaacagattgcgtgcgataaactagagtcaaaatcgactccaaaattgcagaactaggcagaggagatggagcagatggatttccaatccagtgcgaaggaaacatggagcaaattcaatgccagtcaagttagaactccttctactagactggaatatactgaaccaatttgtgttggggatcagaaagttgctaaattagatctagatgaaattgaaattgagacagcgtactggaaaaatgctatattctgtatagttcatggtgctaatcgaccttttaaagtgtttgaaggatttgtgaagagagtgtggggaaatttgggcattgaaaagatagtgagaatgcattctggctttaccctagttagtttcagggatgaggcaactcgtgatcttgtgcttgaaacaggggtgatacactttgacaaaaaaccggtagtgcttaggccttggtccactgacatggattcaacacagatgatcaaatcggttccagtttggattaggcttaatggcctaggattacagtattgggggaggaatagcctaagtgctcttgtgagtactataggtaaacccataatgatggataaggttacataggagagatcaatgataaagtttgctagagttttggctgacattaaaattttggataatcctcataaaacaatctcttt

SEQ ID NO: 126300 - DNA, 1205 bp, Cannabis sativa
  modified_base (686)..(689): a, c, t, g, unknown or other
  modified_base (1134)..(1148): a, c, t, g, unknown or other
agaaagtactaagcaccactaatacctaataacaatgctcatatctttattatcaatatttaataaattaatacaatactcctacttatgtttttaaataaataaatcataccacatgtatttttaatttagttatatgatttcatcaaatattattgttcaactcgaacaatatataagactggttgtgagttataaattaattgtatctgcacctaaggtaaataataaactggttttggattaatgtttttctataatttcttattgatttatatcaatgaagtatttttttttctcatttgtataatatactacatatttatgaaaggtttataaattagattttagtaaattattttaattttatttaaattaacttttttattatatatgatattaattttttatttcaaattttatataaaaattaaaaaaaaagtatataataataataattcaaagaaaattaattaaataggaagactattgattttatttagtgtatatatagagaaaggttaaggcatttatgatgcctaacatttttatgagtcatcctattgttaataatacctaataacaatagcaatacttatttttatatatatatatatagaacaatttttaatggatattatccattatggaaagtaccaaacaaatttaattataaatattaattnnnnaaatattaaaccattaaattttgatccgatgatgaatagcaaaagagaaatttaaatttatatatttataatttagctacttaattaaagaaaatatcaaaaactatacctctttttaattacactacattaaaatatgtttatatgaaaaatatttaagtcaaacttaactttttttatcatttttttgtcaaaattatttttttattattatttttcagccgatagaacaatctcagtccatataatgtaaaaatgagagatttttctaattaaatagaaaaattaagtataaaaacttaatttttctttttactattacccattcatgacatactcattaagagtgcacccatatctatatatataatggaagaggtttcaatgatgacatttttttaagccatcatggattactattaaatggttgtgattaatttaaaannnnnnnnnnnnnnnataataaataacttgtaacctaaaagcaacctaataatttattttcttataaaactt

SEQ ID NO: 126301 - DNA, 1308 bp, Cannabis sativa
acaatacatataaaaagaggtatggttcaaataaatataaaattaaaggaaaatttgattaattgattaataaaagaggcatttttcaatttaccccattcaaatattcaattgaaggctttttaatctccaattcattatgttgttataatattttctattaattattaataacattttttttttctttgtactgttttcttttttaagaataagaaaaattataataacaacaaaaatgatattttatttgtttgttagaatggaaccaaatttatggaagtctgagatgttagcaacattgttatttgacattatatttgctccactataaaatgtagtcatgtaaataattaataatattttataataattaatattaaattaaaatatataaaatttagggaaattgctttatacgctattttttaatttttttgttattaaatttacagtttgggttgctttggtagtctttttagtggtttctatccgggttgttatatagattttagttgcgattgaagttgctccgttaattgctatagtggtttctgtgtgaaattatgtaaaaatgcaaaaaaaaactattttaaaatataaaaatgaaaaaattcctaaaatttaatatttaatattaattacattaatattaatataatacaactgtgaaaatttacattaatttaaggagaattacctcatatactatttttttaactttttttttctttcaaaattacggtttgggtttttaaagtagttgcagcgctagttgcaatagggatttttgtacgattttctgttgcaatttaggttgcagcgctagttgcaatagaggtttctatttagaattctgtaaaaatgcaaaaaaaactgatttaaagtgtaaaaatgaaaaaacccttaaatttaacctccaaaagcctaatatgtctatggttacaatgaaaatttacattagaaaagtaattaaatttaagtactaaaaataataataataccaattagcaaaagcaaaagtgtaaaaagatcccctatttgtttattgatgttttttttatctgttttaatatttggaaattttttttagtctattttttatgatcgttgtaattatttaagatatcttttaaaattttgagaaattcgaaaaaatttaacacatcgtaaataggatttaaacaatttgttacacgtgttactattttattttagactaattagtaatttttcctcctgaactttaacatgtaccaaattatatccctaaacttttttggtcgttaaaaattctctcgaactatt

SEQ ID NO: 126302 - DNA, 1645 bp, Cannabis sativa
  modified_base (224)..(229): a, c, t, g, unknown or other
ggggcattcaacaagaaagttaaatttcaatctttctcagttggagatctagtgcttactgtaaaaaggccaattgtcataactagaaggaggaaaggcaaatttgaagaaaaataggaaggaccttatgttgttactaaggtcttcctaagaaaagcatatgaactttcaaattcagatggccgacgcatttatccgtgtgttaatgagaagttcatcaaaannnnnnacacttaaacaaaaaggtatttacccatggtgtagacaacgcacttaaaaaggatgagtgtgtaatgaactacgtaacgcttgatcccggcaatctaatttataactaggcccaaccatataaaagaaataaaatgaaaaaaaaatcaatctcctgaaaaaattaaaaatgaaaaaattgcataaaaaaatacaaagaactacaaacgacttgatcccttaaaagggtacgtaggcaatctgaataaaattggatgcagccacaaaataaagaaatatatattatttattcctcctaacaaaggagtcaaaattctaaaaggtctaaatgacaaaatactattagtcttcaaggctaataaacacaaaaaaagctaacaaaaactaaaactaaaactaaaaatttttagaagcaaaattatcagatctttagtccatctggagaaacaaaattaaagcgtcgagtcttctctggatttcttcttcttgaaccttgagtgttactttcgctctctcagcttcatggaatttttctacactagcttggtccttcgatcgacttatctcctcagcaagatgtcgttgctccttcaagaaatcattgagactagaaagatctaccttaaacaatgtttgtttggcttcgaactaagctcgtcgttgttgtatggctagttttgctgcaataatccctgctcagtctaccttaaaatcttcaaaatcctttgtcttgttagtgacagatatggacaaatgatctatagctgccaaattatccttatcacgacaaagaaggtccatgataagagattcatcaagactaagggcattctcaacaacttgagcagaagcgagagaattttcttgacgcctgagaaaatcattgacagagtcagtgaaccatgcaacctttgctaagccacatttataattcccacaaagggtacttaacacgttaagttgcatacccacgtcagcacaatatttttaaatgtctgctgtggtcaaaggataagattacaaatgaagaatgtcttccatgcattcaatcacaaaccttttggtatgctcattcaagtcagagttggtgattgctgaagctgacactgtcaacactgggtctggtcgaggaataagcaaatctgagggaacaactgatgatggaacacctgtctctgctgacacaatcggttttggcagaatggttagctctgcaagcaatacctcactgtcaaatcatttgttaacataatcatcagacccatcaaagtcgataagttcttcatccctatggctagaagctccaaagcaagtatcaaatggtggcacctctgaactttgagtaagtgggaagtagacatcttcaatacgactagactcgtcatgcttttcacgtttcctttgtttgaaatgtggg

SEQ ID NO: 126303 - DNA, 1257 bp, Cannabis sativa
ctgaactcaaaccccgactgcaaatttggaccccgaccacgaactcgaacgtcgaaccctgtccttggccctagtcccatatatggaacccaagactatgacctaaacccaaaccccgtcccagccccagacctaaaccctgtcctccagccccaaacttaaggtaaattaaattaacaaataaaatttaaagaatacattttaattttttattttcaaaatttaaaaacaattacagaacatatttttatttttaaaaataaaatttaaaaacaaaaattttacttctatttttctaaaaaaaatttaaacaaaattattaccaaaaatcacctaaatgtttattgtgttagacttttgatctaaatcctgtaagcctaactaccaaaatgtgacaaagaaatgtaatcacattacaaatatgtgcgttgactaattagtctttactctcactttctgaattctgatctagtcaaggttgttgacttttattagtcctaagaatacaaaatttaagcatttgatatttttcaaaaaaaaaaaaaaattaaataaataaattaaggatgggtagggatagaatttggatccaggatccaattttatgatttcaaaaactacaatatataagtcccacaaagaatgtgattggttatttatttcaaatactcaacatgaatactaattctaacttcacactacaaattaaaaacatcaaaatcatgtttttttcctatccaattctctgatattttttctcttcttatttcttcatttttctttttaccatgcccagtcatacaccatttttttaacaatttatttttattatcatcatttccttcacattttttttttattatttttcagcatttttgacataaatattcagtgcttttaaattaaattaattattctttgaaactcatatataattattaattttttcttaatttaattattgtagacaacttataattttgctttggagattttatgaaaccatgttatggttttgatgtctttaaaagttttggtgtcagtaactatgttttgcccctaataaatttgtttaccataattttatgatatagtttacgggataattccccaaggccatggccaaaagtgtacatttataacttccaccttaataatttatgagtagataagtatttaaaaatttttatgtttcattataatttaattattttactattatttatatattttattttattatttatttaaccatta

SEQ ID NO: 126304 - DNA, 1597 bp, Cannabis sativa
taaattaacagactaacatatttaaataagatctatttattacatgattcgtgtcgtatgaatctgtttataaataggtcgtatttgagttcattattttgacaaaattattaaataggtcgtgttcgagtcaattatatatctgtataataaataagtttctacacatacgaacataacatgtgaaaatgaattaccacccctaagtataatagtataataaaataaaattgagtttaatttatttggttcgtcacattatattagagtgagtataaactacatcaaaattaatctcaaatttgattgataatattgaatgtgcaactaaaatctgactagaaattgagaaaatcataagtatgacattttttgggtggagtctaaaagcaaatctactagggcttagtcccaaatggataatatcaaaccaacttggaaacataacctcttatatctttgtttaagatgtgtttagtaattactaacttagcaaacttgataaaaattattttccatcatcatttcaattattaatttttagctaatttaataatattttttattattggtaaaggaacaaaaaatttgaatgttcatcaatttatttatttataacttaatcaatatcaaaagctacctttgtgtagaaaaccagctaaacaaaatttgttttgggatattcacggaaacctataaacaaaatgttctttagtgactcaccaaaggaggaagtcttgatgagagagtaccacaacatcaaccctcccaatccgaataacgtgtggaactcaaccaacctcaagaacatcttcgagttgaagaaccagttcaacatgaataaaagattatgggatggttgactgctttatatttctaacattattagatttattgatgattaattttttagttcttaacgctaggtataatttgtcttttctctctctttcgatttataaaagatataagactttcttgcttcttcttttcatagttctaatcaaataatacttttacaataaagtccccaagcccaaaggtaggtatgttttactagattatatataagttataatatttgtttgatttataataaggtcgacgttactacattattacttctttatactttattcttattttgctgacaaatttttttccatagagaattattaagttttgaaagctttgagaaaacgaaagccaaacacagcaatttttacatatttggaagtcagtaaaaggtgataagagagtacaacagaacagattcactactacaaggaaaatctattaaagtaaaaaaaaaaaaaaaagattaattacacctttaaattttgagaaatgttataagtagcatccttcttggtgttctatcaatagtgcctaatagcaatgcttttaaattttcatcctaaaaatatagtttggagtattgtttctttttttaattcatttttcatagagatattgttatagttaaaacattatccttgtacattttttttttaaaaaaaaattgagtagtaagtgtcgtaaacaagtttgaaattttttgaatgtgcgtggtaaataaaatatcaaaattttattt

SEQ ID NO: 126305 - DNA, 810 bp, Cannabis sativa
aaaaaaaactttaaagatatgatgtacaactactacacagaggaagaatttgaagcaaaatggttcgatgtcatcgataggattcaactaacagataatgagtagtgccaaacaacatttgacacaaagaaacaatgggcaaaacttatttaaggggctcattcgtcgcaaccataaatatgacagtctaataatgacttcaaaagcaaatgcacgcgacctcacccacttaatcgtaaatgcttgaccacgtactataactaatgtgttgaattctacacaagaagtatgtatcataaggttgctgagcagcttgatctggaaaataattattttgtcataggtcaggtggtcgaaggagagtagcagatattcaatattagaaagtttcaacatcccaaagtaaagtgccaagttcattactctgaaggccaaagagctctacaatgtagttgcatgctatatgaaagttaagagtactcttgtagacatttatgagctacaatgaaaagattaaacattaggagaattccttatactcttctcatgaagcgatagaacaaaaccggaaagacaaatctccacttacactttaaccagccatcgccaccacaacaacacatttatgagatggctaggtttggatctcttacttcactaactcataacatggctttccataaagcaaaattagagactacctacacccatgcaaaggaagaaattaaacgactaacactaatgctcaaggaagaatttgagttgagctccaattcaaaagaagaaatgccacaacttggaagatatcgt

SEQ ID NO: 126306 - DNA, 1052 bp, Cannabis sativa
ggcataaaacccaacacaatcagcattaatattagaaatcatttcaaattccatgcgtgtcactatagtggtaattaattttaaaggcatgagtagtgataatcaatatattagtatatattaataaatttattaattaaaatttaaaaaggcatgggtatatataaaaccaattgattatatttctaaaaagttatcatatagtgacgcgccaggtgagtcgggacacgtgtatgcagtcacgcttggcgtgtcactataagtcaacattttttttataaaaaataataatcgaaattatgggggttattctttagtgatccctcatatttttagtgacgcaaattagaagacactaacaccgaatttttaaagtctttatgtgcatgtcactaaagcttacccctatccatttagtgactcacacttttctgcatgtcactaaaactcagttttgtagtagtggatgcttgtgactagttagattatgtaaatagtaactagttataattagttactaaatatagagattcttttgttgtgatttaaattataaataaatcatcgatgcgtgaggagagagacatactaggatttcaagtaggattcgatgcattaatatagttttccctaaagaattctagaaatcctaaacgtactcattgtctacgtgtagattgttgtaataaatcttaagaaaatattatgatgatgaatgatcatgtgtatttaagatgtattaatagaagttatactacttggtattggcatggcaaatatttagctgatgatccatatccattagggaagtggagggaagatgatattaagggtatgatttcgatgatcattcattggacttgcttgacaaagcacaaaaggaatttcttaatgatcctaaaaattcgataattttttaagtgatgtagataaaaccctgttcgatggttgtgaaaaactaagattacaatggtaaagtttaacaacatcaaagcatataatggattgagcgataaatgttttactcaatttttagctgcttttaaagatat

SEQ ID NO: 126307 - DNA, 2449 bp, Cannabis sativa
cctgaacaaagtagtactcgtccacaaaatgtccatggtgcccgtcagccacttctccttgacttgagaaaaatagaaataccccgacctgctctggttgggagttgactttagatcaaggagccagttggtgtcgtgtggggatggctcaccccatccttgtgaatcataaagaaagaatagggcgaatagatatttgatgccctttggagtgaattgggtcgggcaaagatggtagtaatctgttattctcctaaagtacggaagcaagggtagcattgcaccctgcttagtatgagtgcccgactaggcacaacacccctcgcttgtactagttgcccagtggtttggagagggaaggaagcatttgacatcccctaagtgtagctgtgcttctccaaaatcttcatttttgcctgggttactatagattgaggagaaacccaccgagctcctactacactttgtattctctgagaaacagcctcggtgtattcttcagtaacatagtcctcatcggcctcagacacgggttctccatcttcgttgaacccaccaaagggcagcctccgagctgttccctcctccccggcttcagatggagtatccggatgtacctcaccctaatcctccacctcttagacttcagcgtccccctcgatgtcttcctcctcagcagcaggccgggcctgctccgcacttggcatcattgcaagccaagctacgtgtgggtcaattagagaagagctttcaaatttcttacagtaaaaacctagaaaatcaaatattctagcataaaagaggaaagagatgaagaacttactcacagtttgaagctttagagttgctcgaatgacactgatcgacgcttccttgggattcttcgaaggatttgagaggaaaagattttcttgctctgacttcttcaagaacgaaaaatgctaaaagtggttgattagggatttcttccctatttataagctaattagtgagacaaagtagtcatttcaaaatttgaatacctcggtttttgcccaaaagtgtatgttgagcactcaattacctgaatggtaactttcaaaacgtgctattttttgggcgtggttcaatgtatatgtcaatcagcattaatgagccaaatattgaagagacccttggtcagagtcatgtcgaattgccaacagatgcttcgaacacgtgctacccgtccaaataaggatccagaccgagtgaagtccacgtgcgacctcagaggtcccgggcagacttgggcgcaaaatgttatcctattttttgtactatgatgtggaaacacatacaagtgacacatgtccaacattccttgcacctgggcagagatgaatatcccgaacagacttcaagtagcacatctgcatgcacaacgtctacttacccgagcagggtaaagggcagactacctgagcagaaagcaagtttggttttctgagctatttaccaggacttgactacttcagaattgatatcgtggagtccaagcacgaaggcaattcatgcaatcatgggattgaatcagagggatacgacagactgtctgaatcccctattttgtgtattctatttatgtaatgaatgttccttcctattatagacattgtaagcaaaagggaaaccttccctcatgcattaaggctatataaatagtgatctagcttcactggaaagggattgaaagaatttctttagagagagatctaagaaaattactcagagatttcattgtaagagctttgagagagaaaacactgagttctttgttctcaagtcaatacaatataagaggagtaggctattaccatactaaaggggatgaacctcttcaaaatctggtattctttattgcttattggtttttgctctatttttatttcatttctaatcgcttaataattgactcactgtcgttaactaaaagcgaggtcaataagaatgattgctgataccacatataaaacatcttctgtcattttaatttctacagtattaatttgatctatcaaatttaatttctgataaagtagattttaattttattcaaacaattttacaatagttttacattaatgaaattgtttgttaatttcatttggtaattttaaaaatggagtttcataactcttaataaagaaagaaatattttggggtgaaaatatatatagtgaaattctgtgttttataattaccaatttattaattaatttaattaattacagaataataaaattggtactgaaatagttattctgtagctacagaacacgattttgtaactgcagagtagaatagaagataaacagtgtaaaaaattaattgtagttagttggaaaccaactagctataatgtgaatatcttgaagtgctctagtcaattggttcatttagaagtttcaactatagatatgaaggaatc

SEQ ID NO: 126308 - DNA, 1718 bp, Cannabis sativa
  modified_base (639)..(641): a, c, t, g, unknown or other
  modified_base (1619)..(1639): a, c, t, g, unknown or other
atcatgtattttgtcgtggaatcgataaaagttatactaaatggtattggcatggggaatcgatgatgggtgacccatatccgttaggtaggcgagggttcgatgatcattttgaaaataatgattgtgatgatcatcctacagaattgcttgatgatgctcaagaagagtttattcacaatcctgaaaaatttgatatcattgttagagatgcagataggtcgttatttggtggctgtgaaaaatgccgactatcaaccatggtaaaattttataacataaaggcggagaatggagtaagcgataagtgttttagtcaatttctatctgcttttaaagagatcatgccgatggaaaattgttttccggagtcgacgtatgaggtgaagaaaactttaagttcgatagggttgaagtatgagaagattcatgcatgtccaaatgattgcattttgtatcgtaaagagtatgcccacatggacacttttctggaatgtggtttgccacggtacaagcccaacaagagtaaggagatccggaaacttattctagagaaagtcttgtggtacttgcctttatcgaagtgcagaaacttctgaaaacttattatggcacgagaaaaggcgagtgaaagacggnnnactccgacatcctgctgattcacaagcttcgaaaaaagtaaattatttgaatccagaattcaagctgaaccaagacatctacgccttggtcaatctgccgatggagtaaatccacatagatctcttagcatccgacatagttcatggcatgtgttccttgttatgtacaaccttcctccttggtgggtgatgaaaaggaaatttacaaagctatcgctaataatttcagggcctaaaaaattaggacatgatatcgatgtttatttggcaccgttagttgatgacttgaaagagttgtacggagatggtgtgatgcatacgatggttttaagaaagaagttttcaatttgaaggttctgctgttgtggactgttagtgatttccttgcatataatctaacacccgaataatcccgaaattccctatgtcaaactatattgccctgctattactaaaatactaatctaaaagaaaatgtgattctatcggccatacatcgcgttccaatgttgacgggcataaaatatgaaaaatataaaatttcataaataacacatctagaattcaaataaatctccataaattcataaatcatacttagaaatctaattttataattaagccctaattgtctgctaatttatcactaaagacaagcggtctttacaataaccttattctcgaatcacccttttcaaggggaaaacaactatattcccttggaagcagtggtctgccatctccacttccaaattctttggtggtttaggctttaggtctcttgttattcacaatcaggcgcttctcgccaagccagcttggagaatttggtctaaccctgattctctccttcactcaattcttaaagccagatattttaagagctcgaattttttgtctgtcactaaagggcataacatctctttcacctggagaagcatcctttgggggagagattgttggaatatgttttaccannnnnnnnnnnnnnnnnnnnntatgttatttaacatcctaaataagaatctctaaacaatgtaaataaacacatataaagtttcagaaaccttacagtgg

SEQ ID NO: 126309 - DNA, 696 bp, Cannabis sativa
  modified_base (653)..(659): a, c, t, g, unknown or other
atgttgtagcagtcgctggttgttatttggttgattaagaatgtgaccaactcccaaattaatatacctaagatgggggtaatgacttccccgtcttgggcgcaccttggagtgattgtaggtgcagtctccattatttctttggtcttaaccatagaagccttcgtcattccttcgactgaatttacagcggaagaggccttcttcgttccctcgaccagaggaggtcatcctcatcccctcggttgttagcacagtgttgtaacattcatatgctactctttggttgccaaggagacggtcgataccagctgctgtcgagaacttgataccagctgctatcgagaacttgacagacaggtggtagatcgatgagatgtctcaaaggtcgtagaatgttgaccttccaaggagacttggtgtcgatcactatgaaggtagttataggggtgttctaccgtggggctgtttcgactgttagtggtaatttgatttcaccacatagagtgatgtcgactttgctgaaactatacataagttgtttgtatgactccatattcttgcgaggacaaacccattcttttcggggtctatttgaaaaggtatatgatgatgcttctgttggaatttattttaccaggatcttaaatctnnnnnnnagtatgttgtttaaacaccctaagatcggaagagcgt

SEQ ID NO: 126310 - DNA, 829 bp, Cannabis sativa
  modified_base (306)..(312): a, c, t, g, unknown or other
  modified_base (339)..(348): a, c, t, g, unknown or other
  modified_base (475)..(476): a, c, t, g, unknown or other
taaaattataaaaatattttcaaagttaaagattactcaattataacaattgtaagagagggacctatgaagagccaaacccttttgttaatatatttatatatttcacacccatttaagcctaagaggtgaatgggattattaggctaataaaatggtggattataatttaatagatcaattatagtcataattcataaacgtgctcagtctctaattataggagaattagagatttaggttgctatgttaattttaattacaatttaaattgatagcattaacttaggtgtcgtttggtaacannnnnnntttctaattttttaatcacaaaataannnnnnnnnntttgtttttaaaaattttgctttttgactcaaaaaaaaaaaaaaaaaaaaaaaaaatttgcttttaaaaaacaaaaatgcgttctgtaaccacttttatttttcaattttaaaaatagaaaacaaanntgtgttctgtaaagttcattttcattttcactttttgattttatttacgtcgggggatttgggtttgggtcatgatcgaagtccaagatattgattaaaaaaaaatgtttaaaaaaatattgaaagtgatttttttttttaaattttgattcttaattaaaaaaatggaaagtaaaaacagttttataaaacatgtttttgaaaaaatatttttatttttttatttttacaaactgattaaataaatgttaccaaatgtcaccttagtttaccaatcacccaaatatatcaatacatatatatatatatatctttatcagtgtctatctaacggcattttttggtttaacaga

SEQ ID NO: 126311 - DNA, 736 bp, Cannabis sativa
taaatgattaaaaaaccatagtcatttttgtaaaaagattattggacctatattatataaaataattatttttttgaatttatgaagattaagttatatttcaggtaaaataaaaaagagaaactaaaacaaaacaagtttatatatttgcagagacactttcttgtaaaacttagaaactttattataattggcatgttatagaactgtactttttttccttccaaaacttaaaatcttattggcattgtcagttatatatttatatattttttaaaacaaaggcattgtcagttatatttaaatagccttatgtataaggataaaaatgtcattatgaccgctcaaaatttagtgcattagagaaagaaaaaaaaaacagctcttatttaaatgaaaatgtgttattttttaaaattaataaaatatgtgtaattttaaaataatttttttttgggctcttggacttggactaggtgggagtgtaattgaaattaagtataattcagaataattatagtttaatgtataattcagacaatgcaaacatttctatacttttttcacttgttgtaatttttcttatatttctagaaactataattttgcggcccataatatggccaaataggcagttgccaacaatgtttctggtatggtagaagtctctactattccgagtaatattttctgtaatgaccgtgaggtgtgactatttatttccttctaatatata

SEQ ID NO: 126312 - DNA, 3419 bp, Cannabis sativa
  modified_base (820)..(825): a, c, t, g, unknown or other
aaaagataaaaagatctcacaaaaagatgaactataaaatagagaaaattgtgcaaaaaaataaagctgaaacttcaagcctaaattcgattagcatttgttgacattttggagaaagtcaaaacataaaagttttagatctctcttttatcttttcagaaaatcttgaatcgtctaattttgagcaatatcgagagagttatggccaaaatactgtcagtcaatgctgcagaaaactcaccacctcttctaatcctaagcagaataaattttccaatcctaagcacaataggtttttttttttcagcgatttttattgtattttatcaatgttttttggctataaaagaagtagacttcaatatttttgaggaagcaattcggaggaaaataaacagccaacaaaggagtacgaatttcaaagaccgaagtcaatactggaggcattcttcagagggttttcagcattattttcttctcttttcttaagttaatatgtgtgattttgcttccatgaacgtgagtagctaaacacttaattagggttagatggatattgtttgatattattttatggttttaatgtgatttattttcccccagtttctatgtattctatttcattcgtacttgattacttttaattgccaggccatcaattaattgtttcatgattttgatgcgagatctgacaagtgagtgtggatcatgctatagtgaaatagaactaaattttgatataggacgagagtacctgtatggtttagatagcttattgggtttttgtgtttaattcctgttacatgtttaatttatcacnnnnnnagaaaatttgcatgtaattgagatttatatatccgcgaaaaattaagttttgttctaatttggtttttttttttcaattttagtactaactctgtttgtttcaagatcttatcttctttttttttttttcaggttcactagtttatgagaagtcaaggtgcaactgccagattacctgttgatcctgaaatagaaaagacgtgtagaaagaacaaaagaaggaagaaattggaaagcgctgtaatagagattgaacaaggagtagtcatggctgataacgccaataatggcaacaatcgaggagctatagaagaccaggcttatggtcacaacaacaatgaccgtagcctgagggactatttgctaccaaacttaagaggagctagatcttgtataaggccacctgccgttgatgccaataattttgagatcaagccgaccctctgtagatggtccaatcttcagactagtttggggggctaccatcagaagacccaaacatgcatctagctaactttgaagaactctgtcagacattcaaggtgaatggagttagcgatgatgctatcaggctaaggctgttcccattctgactaatggatcgagccaagagttagttggtatctttgccaacccactctatcaacacttgggaggaattggccctgaaattcctttcaaaattctttcctcctgcaaagtttgccaagctgagagctgacatcaacaacttcacccagtatgacaacgaatctctttatgaagcctgtagagattcaagaacttattgaggaagtgcccaaatcatgggattgaaaagtggttacaagtgcataacttctacactagattactgagcaacacccgaacactgatagatgccgcagcttgtggagcttttatgaggaaaagtgctaatgatacctttgaatcacttgaagagatggtcataaacaatcaacaatggtcaatagagagaggcccaactaaaaaggttgcaagtatgcattaagtcaaagctataaccaagttgacagcccaggtggaggcattaacaaagttggtgactgcacaagccaaacaagctcaagttgtctgcaagttgtgtggagcacctcatactaccaacacctgcccaattgatgtcgacagtttgccaatggaataagctcacgtcattggaaactatcagaataattatggtcattagcaaaacttccaaaagtagttttatcctcaaaaaaatcaacctcaacaaagccaacaatatcaacaacaacaacaagattctagtcaagggtctaatcctcaattagacacattgctacaactcatgacagagattaagccttccattaaagtcttggaaacctagagggcaattggcttctcaaaatactaacagggctgaaggtaacttccctagtactactgaagtaaatccaaaagaaaattgtaacgcaattaccttgagaagtggtaaaaactattctaggccaaaccaagataagccaaaggaggaagaagatggatacccagcaccaacacaataaaagaagaagactactgacggtcttcaacaaaaagaaacaccacctcccatcagcattgatcatcacatcaaaattccttatcctcaaagacttcacaataataagatggataagtagtttttgaaattccttgaaatattcaagaaactgcacataaacatcccattcatacaggctttggaacagatgccaacttacctggagttcatgaaagacatcctatctaagagacggaagttggaagaatttgagatggtggcacttactgaggagtgtagtgcagttctgcaaaagaaactaccgcccaagttaaaagatccatgtagtttcaatatcccatgctcaataggggggtcgatacaaataaaagctttatgtgatctgggagcaagtattaacttaatgcccatatctatgtttaaaagactaaaattaggagaagccaagcccacaacaatgactttacaaatggcagatcattctttgactcatcctttgggtataattcaagatgttctggtaatggttggtaagttcatcttccctgctgatttcttaatacttgacatggaggaagatgagaatattcctatcattttgggaagaccattcctggcaacaaggagagcgttaattgatatgcagaagggggagttaaagttgcactttcaaaaaaaaaaaaagaagaagaaactttcaaggtttttgccacaactgaaattccttcttgttgtcgagtggaagttgtaaaggatagtcgagaagtaactaccaacaagaagaaagggaagtctaaagaattctttcaaacttttcgacgacgtatgaaaaaactgttatgtgggaattgtgaaggtgaatctcaatctagggatagctttaaaaattgcaatgttggaggatagttttcttcgtttggtacaagggccctcatggatgcaagaggtggattttacccaccaccaccgccatactgatgtggtgctaaggtatgttcccttccctttaattttaatgtcacattggggacaatgtgtcact

SEQ ID NO: 126313 - DNA, 706 bp, Cannabis sativa
agaaagactaaaagctagacttgttgctcaaggttacacgcaacaagaagggctagatttctttgacactttttctccggtggcaaagatggttacacttaaattacttctagctatatcaaccattaagaattggcacatattacaacttgatgttaataacgcctttcttaatggtgatcttaacgaggaagtttacatgtctctccctcaaggtcttactttgccttcttcttctaatgcaggaactaatctcgtatgcaagctgcacaaatccatttacggactcaaacaatcctcaagacaatggtacaagaagctgtccgatgcacttcaccaagaaggattcaaacaatcgcaagctgattacaccttatttacaaggggatccgatgataactttatagcactccttgtatacgtggacgatattatcattacaggtccaaatgtttccaatctacaccagctgcaaacatctcttcatcaaaaattcaagctaaaggctcttggagacctcaagtacttcctcggttttgaggttgcccgtgcaaaggaaggattgttcttgtgtcaaagaaaatacactcttcaattacttgaagattctggtttcgtaggcagcaagcccagcaagacacccatggatcctaaacaaaagcttaacaacgaagaaggagagactttagacaacccatctcattat

SEQ ID NO: 126314 - DNA, 1381 bp, Cannabis sativa
  modified_base (1266)..(1290): a, c, t, g, unknown or other
ttttttaatttttaattgtattactttcaaataacatagaaaaaaattagtataaatttagtatacgtgcctcgcacgtagttttttgctagtagaaattaaatgtacttttctataagttattttttggtcttgtttaccttaatttatataagttttttttagcttttagaattacaaaaaatcttttaaaaaagctgtagcttctagcaaacggactttgagaagttattttttaaattaaaatagtttacataatttttaatttattcacaaaagacatttttttttaatgatatctaagtattttgaaaaatatttttcattataaaaaaaattcatattaattgaaatgagataattaaaccgtatttaataatgcaatttaattattatattttttgaattgattcatattcttgttgtatgacaagtgtcagcttgtggtgaataaccgaaataacacaaatatattcctaattataattaaaataaaaaagctagaaaaagattaatttaaactaaaataaagtgtttttaaatactaaaatatatataaacttaattaacactaacaaaagaaataactatataaaaactataaaaatatactaatttaaacaaaataactaaaataagagtaaaaaaacaaaaatacatagatatgatggctaaaaataataattcatgaaaaatatacttttcatttgtgtatgcatgtacatcaatattaataatagataattgaaaagaaagaaaagaataaatggtatattcttttatttatttgtgtttactccctcaatatgtaattcaagaaataaataaatattctttcaaaataaataaataaatatgaattaataaggttatacttatttaaatgtcatacaaaatcacccatacaaatttttatgtcactaaaaacgaacatgccatttcaaaaaaaaaaaaaaacgaatatacgacaatcatgtattttatcattctctaactatatttctaatattagaaaaaaataatgtgtctagtattagtactatctcttcataacttcaaccaaaaataaaacaatttacaatcatattttgattggaagtaataaaataaaatagaaaaaaaaaattattttatttttttatttagttacattttaacatatttactcaaggataatgaaaattaattacatagtattaattctcattcatttgtttactaaatattgtaatgggagaaggtaggaggcgtttagttgggaggaannnnnnnnnnnnnnnnnnnnnnnnnatgggaatgagaataggaatggaatggaataaaatttaaaatggataaaaaaaattgataaaaaaataattaaattttttttcttgttaca

SEQ ID NO: 126315 - DNA, 640 bp, Cannabis sativa
gaacttcttgaacgttctcttcttcggaactcctgcaacagcaacatcagcttcaacttcggcctgaaacatcaggacatagcaacaatgttagaatttgtaatgaaagcaaaaacgaaataaagatgaaagcttttcaaattgcaatgataacccaccatgattgcagaagctactctcggaacctaaattctaagttgaagacgacggagcgacgaccctgcctgagatttgtccttacctccggcgaatgcaacggcgtgtaagaccggcgaagaagatcgtcactggcctgagaagggtgttcgcacgcctcggagagaatggatagagaaaaatgatagtgaaaggaagggagggaggcggcacattgtagtgtgctgtgttgttatgtacgtgcctagttagggtttggtaaaagagaagggcattttacaaaaatactgaatttagggtaatactttttaattttactgtcacacgaaaaaattatattgatattgtcctctttttttttttttcttttataccgtaaatataaaaaaaaaagtatgaggcctccatctttctcaaccacagacagaatcactacaacaataccagaacagtcggaaacaaccattaattctgacaagattga

SEQ ID NO: 126316 - DNA, 1034 bp, Cannabis sativa
taacagacacaatagccatggtgctctctactacctctgtctttatgaacctcttcctcactatagtgtcttctggcaaacatagtgaagacttagtgtcgtactatgttgtgtctatggttttagcaatggtggctatgggattaatggtgatagcatttgttacgggtacatacgcagtattgtcaccttccattggcctggctatcgccaccggtgttattggattatctttcttcggtcttatattctacatagtaacaaggagcaaaagggcagtagatattttgaaagacctgccgctcaattgcagtggggtaataatatttttcattgcagtatgcggattcatactctatggtcttttcatcatgattccatattcgatattaaaatcgatattaaaatggactatgcagaggaattgacataggcttgaacctgaaactttcgtttaaagattatttattttttatttcagattttatttaaaaatttgtaagttcataatgatccgtgtcgtaagccacaacaaatttattgttttttttttaattccaatacttccaattattttagtataattgtaaagatcgatcccacaaggactatgtttatttaattattcaaaagttagaaaagggagttttaagattgaaattaaaatatagcagaaaagtaaaagaaacaaattaaaattgagactacgatatgagagactagttaaaggttattctctaccttcaaccatcattcctaatttttattaaagaatgtaattttcagtttccaatcaaactattaatcccgttaataaaactgaagcagtcaattatctcaatctctttattgtatgtaatcaaggcgaagcactcaattaataactcttttatctaagcaataaattcacgaaacatgcaatttatttaactgatatataaaagattgagttttatggagatagactaatctatgcaacaaatcaatgaaacatataatttatttaacccaggttttattcttcatcacaaata

SEQ ID NO: 126317 - DNA, 561 bp, Cannabis sativa
  modified_base (95)..(95): a, c, t, g, unknown or other
aaaaaatatattatttttgaatagaaaattattttaaaaaaaaaagttatccatgaatttctcataaacgcaagaattcagttatataggcacantttatatagaatagatatagatgacattataagagagtatattttggcaactaaaaaaaaataataatttgaattttttatatgacagtatatatcataattatttaacatattttactcatttttataaaatttagaataatttatggtatcgaaattaatttttaaataatttattttatgcgctataatataagcttaaaaacacagtattttgtaattttgattatgtaaattattaaaaaattcttaacaatttctgataggttttaaataactacattgttcatcatcatataacaaaattagaattgtaattaatttatgtgcatagaatatgtagtattgaaacttgttttatacaaatgtaattcctcttattttaagggaaatttacaaaaatactaaaatttgggttaatttttacaaaaatactgtcacgcggaaattttttcaaaaatactgt

SEQ ID NO: 126318 - DNA, 1986 bp, Cannabis sativa
gattgagaaaatcccaatcagggggaagaagagtttgaagtttgcgccaacaggcgactccatatgcttgggcaaattaagacccaacctcccctactgcaaccgacaagggctcaatagcctggctcgaagaagctgtagtgggggttgcctcgggatgagaagcattggcgtcggaaacgactagaggaggaacttgctcttggatctcgttgtctgaaaccttgagatcgataggttcggccagtgatttcttcttatgggtcgtggttttcctttgtctcttgagggagccacctcgccggctatagagagcccaggattggttgcccttttcttccctttccggtccatggtatcttcataacccatgtctgcaaaacaaggcgaggcattacaatcattaaaaaggccgattaaaaagaggaggaatataattttctgcctaaggtatttaccaaaatcactagaaggtgagctatcactagatgaaggtgcagaaggaccataatattcactaaatttcctacagcctataattttgaatatatcaaaagctcgtttggttctaaatcccagatcgcatctatgtgacctgtcttatcttccatagtaccgtattgctcggttataccataaaatgactcgtgacagttaacttggatgtggaatctaggataccagctgtcaaacttatgagcaatgtggtccacgagaagagaatttcaaatatgaaaattaaggcgggaatctttgaaggtgactaatgtactacgctcagctctaagtacaataggagaccaaccacattaattacctcaggatgctccttcactagattcctgaggggcagtactttgaaggtattgtgcttgacccaagcgatcctaggcctgatcctcgggcagaacaataatctattgccaagaggaatacttgggaatttataatcacatatattattccttatcagtgagaaggcccaccaatcgtaggttagcctcgctcaaaaggatgttgcatgaccgaagaccatagggaagagttaacaggcgcctgtgcctactaaccatcttgcgggtaggagtaggtctcgtcaaaagagctgtcagaataatcaaaacattagtcaaaaaacttgaaaaaggaagactgatgtaaataagtaagaagagaacaatcacttacgaagtttgataaatgtggttgtgccgatgggggaaagaccagacgtccagaagaagttattctttaaatacactttatttggcaagtctagaataattttaggctcgccagggtgagtactgaaatagaaaaagctcattgcagtgttcttcctcaatggaacaaccttgattgagtaaagatactctatctctacttgagtgggacacccccaatttagaattttgtacaacactttcaaactaccaagaatcctgtaggagatgggagttagctggaatagggaaattccaatgtggtttatatagtctttaaagtagttccgaagaggaaggatgctattgcactgatatgctcaaggctccaggcactcatactaattgaaccactggtactactctcaccactggtccctgggttactgcttgcaaaacatgcagggggattgtaactgaactcaccctctcgtactgatctaacttggcataatttcccaagttcaattccacaagtcttcagcatctcgcccgtgcaacctgagatagatcgcaccctggattctatcaactcagcctcaaaggtgacactgggatcctgaggagtttttgatgtacgtggcttgggaggcataattttaaaatccaagtcacctggttcaaaagcaattgtgacgttgggtaaaaacaaaggctttgccacaagaataaaggacacgctgggagcatctggacaggttgcttgtaacgccctaatctatagggacgccacgtgtgtgattttataaactagtttaatact

SEQ ID NO: 126319 - DNA, 806 bp, Cannabis sativa
  modified_base (46)..(62): a, c, t, g, unknown or other
  modified_base (745)..(756): a, c, t, g, unknown or other
tgtttaatttcattgttttagatatattcatatttaggatgttaannnnnnnnnnnnnnnnnaaatctagatcctggtaaaagattaccaacatattagagtaaatacataaaatacaagacattagggccaacagaaagatgctaccttttgggcagaggcgtccatacaatgtcagagggtcattattttacaaaaaggagtgtatatctccttccagtacacgcattaccatgttctggtagaggagacaacatttgatagggtaggccccaacatcagaagatagccacatcaccataggagggcttccaatgaatctcttgggcttccctatctagatgtgcctccttaactgtccagagggcattgttcgcttcatcttctggtcggcataatggccttccaggagtaggaggatcctttctccgttactgaggctcctagaagtatgaagggttggggcccgcctctggtttggtctcgggtttcacatgctggaaggcttgggttgctgatgatgcatatcagttacatccttattatgccacgtgtcatccattcgaaaacgtggataacactcccattataagtgtaaatatatattataaaaattaatacaataattatgttttaaacttacgtaaatgattaaatattacacaaaaagtattattgtgcaatattgaataatacttttaatataagatatttatcatattttttttgtgacagtcagtagtcnnnnnnnnnnnnaggggaaataccgggtaagttgtgcaatcccacatcgcctggggaaggtc

SEQ ID NO: 126320 - DNA, 1917 bp, Cannabis sativa
  modified_base (1883)..(1887): a, c, t, g, unknown or other
caaactgcccgccgctaatagtattttataaaaataaaaataaaaccaaccaattagcgatggatattggggtccgccgctaataccactattgataacgtaatcaatcatattctaaaacttaaactcaaaactgggcaattctctattgataaatagcatggcaatatcctaaatatcgataaaatacaagaacctatgttatacccaaaattcgggtggaggacacgtgtcaaggtaaagggaatgtgaatcggtgccatatcttctatggaataactcattaattgcataagtgtcagagtatatttcgtaacccgctgactgtaaggtcttaagcgaggaatcaaagtatgaattgatacttagtgcataactagaaaccatatatcgctaaaagaggatagcgaggaaccaaagaaaagtaacgcgtaccctaacttgcaataagcaaactaagtgtaaaagttgaatcggctggaagagcaagaatgcaagatgaccatctcgctacgaggaagctccctatagtccatccaactaacaggagcgaggctcataaccctggcaagtcagaagatttccatatacccgcaatagacgtaaaacatatcaagttgacatcaaaaagaaggatggttccagctcgccattggaatcacttcagtctagtttctgtcgagacatctctagattcaactattaaatacgtgtttaatacacgatattattgacccagtaaaagcaggaaagttacagctgtatgactttcgaaatcatgcaccgcgtttacattttgtaatatgtaatcagatcccacgatttaaaggataatagctgtaattacattttgatcaactttgtaattaactgccactatgcaattataaatggtggcagacaatctcaaaaaagggacgaaaaaagtcttatgcaagaggccttaaaaaaaatatactcagaaatctgaataagattgaatcgtggactgtgcagaatttcaactataaaaccatgtaaaaaaactcggtgttcttatattatttttctataacttttattacttctgtgttgaatcataatcgtgaggctcaaatttggttaatgaaaatatgtgttaacagtttggttctttcattgagagcctctgtgaaaaaactcagaaaaagtctttctttctttcaaataaaaatcttctcctttacggctgaaaatccagagaatattaacaccccacatgaggaaactaaccgtcgttctcgaaaagagcctatcggctctagaagatcaactcatctgtcgtccagaaggaccaccccttctaagagggcccaacctgaggatggtcccagtgctcggaccacacgtcccaagagaactcaacccgacgttggccctagtacgcggacaacacgctcgaggagaactcagtgtgggaatggttagaatcccgaggcaagagatgaagagctcaaccgttgaggtgcccacactataagagaatgaacttatgaaacaaaaagtcgatgcttgagacaccgtcttgaagaggcgcagcgtcgaaatgctgagttagaacgagaggcagactcggccagggcggtgcaggggacgaacgctcaaaatcaacctaaacctggagtgagaagaccacgaggtagacctcgtggctcacgaaccaggagacaggaaaaggcccgggaagaacaacccggggaaaatgagacaaccctaagaatcaggatgaacagccagaaaggagacaaccggaaactgatgaatgagaaatccctcatgaaaatgaggaggatattggaactcagccgagagaacggagatcacctgctaggaattgtttggttttgtgtcctaaataaaacccnnnnnaatctgattagttatcaatttagacttttg

SEQ ID NO: 126321 - DNA, 695 bp, Cannabis sativa
gtggttttctggtgctttgcttattgtagttggggttctcatccttagtaaatcaagtattcacaacaacaaggccttgaagacagagtaaagcttacctaactgtaaatctcttcatttctttctttctttgccaaactgaattttgcaaaataaatgctgtttttaactttttatgtggtttttgttgatttagactttgttgacaatggataatgattatatgcctttacaaaattgtagtaaacaagtaatgaatggtggtgttagcaattgttctgctatttctgtatgcttaacattagaagttttaagagagaaacgagttcaatgaagggttcttcattgcagggtattgtgagattaaatccaaattcttgttcagcttgtgatacgaccttgacttaatgatcatttaactactaattcataattgtaaacaagacacatagataggctttttgttttactcattcaagctgagaatatgtgaggaaaaaattaattctacacatatttcaggaaagaaaagtgaagttgtatcatttatatcactcttggagactttacttttggtctccaaggaaaaaattgtacatggtactggcaattatgcctttaaaaaattgtagtaatcagtggtattgttagcagttgttctactgtttctatctactcattgttaaacgcttaag

SEQ ID NO: 126322 - DNA, 2042 bp, Cannabis sativa
tttacttttaaaaacaaaaaactaattaaaaaagtattactaaataccattccaattttaaaaagaatactaaattacgttacaattatatatgtaatataataatccaattagatattgtttaattgggacgagacaaagaacacgaaacacatctttgttcctttcctctaaattccaaatccagactgcctctttataggctcgccaacttttctacaatcttttgtcatcactaatctagaaccctccattgcatcgcatcgcatgatctttctgatcagccatggcaactatctcaccccaaccaactctagacctctgggccgttctctctgaatcgaagcgaatcctcaacgctcattctcgccatttccttgctctttccgttctattccttctccctctttctttctccttcatcgtcttccccactgttcaaaacctcctcgctgctccaatccctgataactctaaaatcttcctcagtttaacacttctgggttctcaaaatgatcaacccttctattccacgaacacccttttgctctctcttggtttcgccatattcgccttcgtcttctcgctctgcgctgttgggtcaatcacctactccgtcttccatggcttctttggtcgacccgtcaagctcttatctgccattaaatccgtcttagcttccttcttccctcttctgggaaccgctcttttcgtccaaatagtcgtctcagtcatcgttctcatcttcgggctcttcctgtatatggtgataacttcagctcggctattggggtatgagatcgaggtctcatctccatatttcatcggattaattgggtccgtcggaatcgttctaatggcggttttgttgtatctgcaagtaaattggaccttggtttgcgtggtcgtggtggtggaatcgaattggggttttgacgcttttaggagaagtgcatgtttaattaagggaatgaaaagaattgggttatctttgtcgctgttttttgggtttttcgttgggattttggcttggtgtagttcgttttcggcaatgggtttcgatgatgatagtgctgatgggtggaggagttggcaatttgtgcttcaaattgtactgacttccacttttcttatgctggttctgctatacgacgtcgctgccactactgttctgtacatgtactgcaaagctgttcatggggaactagctttggaaattgctgaagagtttgctagagagtatgtttccttgccctttgatgatggaaaagttccccatttagtttcggttgcctatgcttgagcgttgtaatcaaggttagtcgactctctaagttctctacctgaaattttcttgtatttccattcctagttttgttgactcttttacttgtcagtgtcgttttgtatttgtaaaatgtgatgtaaattatgacagtgaaaaacaaagaaaggttaagtaatatagtgcgaatgatatgaaatcattgagctttttgtatgaccatttggattggatgtgaatggataatatgcgttcatggtagaccatattgttttgcctattttattattttacgggaatgttttgttctggttacacttacatttgttcagacaagctcaggctcttgtcttttttgcgtacctggatttctggtcaggattctcaggaacataccaaggcttagcttccaaagcttgcagatgcactcttcaatagttgctacagctgagaacaatcacaaaaacagagtgaaagaaaaagaatgaatattgctgagtttgttgaataattatccaattaagtcttctacaaccctttaagttctaaaaatttaacaacaacactgaaacagaacaacttattattacaaaagtaaccaaatgaaacggttgagatgtttttattaatcttaccgagcgtagtagtctttgcttgactgctccacgcgggtatcatgtaacctattcagaggagaagcaagaataaactaagtgacccttctaatagaatcacattcaagcaatatgactggact

SEQ ID NO: 126323 - DNA, 1330 bp, Cannabis sativa
tttaaatactccagccgaaaatatttgttaattaaatatgccaaaaatagaattaacaatttttatttgttgattttatttaagtcgggtctgggctgggcttgaggtcgagactgcaggtgggtccaaatctggggtcgagtcgaggtttgatatctaaagtctaagttggtgtcggagttcaaaatattaattaaaaaattttgaaagtgattttttttttttttaatttttaaaatttagattcttaatatatactcatttagtactttgtgtttttatgaaaataatatttggtaccctatgttttcaataatacttaatcggtacctcatatttttaaattgtacatatttggtaccctaaaataaaatttaatcaatacagttatatcaatttaaccaaacagttttcagttatatgtaatcaaataaataaatttgaattcagaattcataaaatttcagactattgatagtattgattaaattttatcaaaaaattttgaatttagggtaccaaataggtatgattttaaaatacagggtacgaaataagcattattaaaaatacagggtaccaaacttgtatttagataaaacacaggataccaaatgtgtaaacagatttatagaatataattttgaaaaatatttttatttttaaaattttaaaaataaaaaactgattaaaaaatattatcacccttactaattgacttaatattataattttactttttaacaatctggggaattgccaatattactacacttagacaaaacacaatataacaaaatgtattattattattattattattaggtgacaatataacaaaatgttaatggagtgaagaatatactctttcggaaaagaggcatggaagaatatgccaaagttatatggatccatttttcttttgatattatatatatgtatgctaattaaaaatttaaacatataaaatagtacatttttttttattttttaatgtatattatgtacgagcttgttatggtgggttaataaactacatagaaggataaaaaaaaaaatcattatcatgggatgcctgtattaagcatctaacactaatatagtgataaattcacatcaataaagttttatgtagatctttataacaagatataaatccaataaattaatttctaataaatcacttaaatttttttatatctttatatattaaaaatgctcatttaataacaattttttagtttaacaattctttttaacttatctgtttattttaacagaatataccattctttaacagaatattcataattaattttatattatttta

SEQ ID NO: 126324 - DNA, 1328 bp, Cannabis sativa
tattttagtaaaggttaaaagaaattaattaagatttttttttttataaaatgtgattaattaaagaaaaatagtttgaaatagttagagtgagaaaagtaagaaaattaaaaagagaaaaaaattagaataaatgtttgtactttaaaaaaaataataaattaaaatttgtgagagaatacaatagttttaaaagaattacttaatatatatatatataaataaagataaaaagaaaatagattaagaaaaagaacagagtgagagagagaaatagaaagagaagagattagaaagaaagaaagaaaaaaggtcaaacttaacaaaaattaaaaaaatcatccaaagttgactaaaaaaagatataaagaagatggaaaaaaaaagtttttttaagctttaataagtaaaaaatactaaaaaagaataaaaaaaattatgtacggaaagtataaatacaaaaattcttttgtcgaagtataaatgtaaagtttagaaaaaagttagtatttggtgcccctaatttatatatgttggtagttttttatttgatttgggttggtagttacttaaatttattattttggataatatttctcatttattatcgatttattattgttatctgcatttctatgaagtataacacgtgtcatttaatgaggatggataatttaatcctccttcacttgaagtcctttgatactactccgtcacggagaggccctggaattggaaattatctaggatagaaagacacacataagcctactcatacccatcttaactttcctgataaggaaggtgaaatacttctcctagacccggaggggtataaaaagggaagctcactgagacgatatttggatgggcactcgaaaggtttaacatggacatcaaccatcctacaaatgttgacattttatacatgtcaggtcaccaaagtgatagttatactttttctgacaaagatcagatcttgtcttctacatccaagcatggtagtgcgcataccaccaccaccttttggccaggaagatataacaaactcctgctcgtaaaggaacaagctttgagcacatgtggcccctacttttaagggttgcaactttgagtgacacgtgtctatgtgggacaaaatggtcttcattatctagctgttgttagactataatgtagtatatgtaatatagcatatacaaacgatatgaaatgcggaaaataaattgtaatcatatcgaaaatatatgcaatgaaatgatcgatatacctccagctattgatctttgagcttcaatccctgtgatagcttcggtgttagagttcgg

SEQ ID NO: 126325 - DNA, 868 bp, Cannabis sativa
attaattaaccaagagatacatttcattaattaaatagaagatgaaaaatataaaagtagatatgatctgtaacctatatatttgtatataggctgtaaatatatgtatatcatattacacggccagacctatgattacttactagatatagttgaactcctcaagcttcccttattttatacgttttttttttttttttttttttggttagtcccttattttatacgttaaataaattgaatactggaaatggaatgtttgggacacataaaaaagaggtgtcaaatcattgcattcatatatttgccacaaaattaaagtataaacgagtgagtgtgaatgtgatatccacacacgacaatatgatacacatttttttttttaaataaatattattaataaaaacaattcaaaaacacaaatgagctaaatcattatgtagtgaattgatattcccaatcccaaattgtgttgttggaagtcagtcaaccattattatagcaaactaagaccatggtcatggatcgaccgatcgactttgtcactactcagagagacacgtccatatcatcattgggtacgtatatagtttttgtagcacatattaattgctgatttagtgtctaatttagaaagagttctggtaggagaagtattaattataaaatagaagatataattcaattcgtaattcaatttaatccgtaaagtgcatatatttatacttgtgcggattaaattagattagaaaatttaaaatttgcatatatacggattggatattgattaacatataaaaataatcgatccaatctaatctacatatatttatttttttaaaaaaaattatatatacaattaacattt

SEQ ID NO: 126326 - DNA, 1099 bp, Cannabis sativa
  modified_base (813)..(817): a, c, t, g, unknown or other
gcattagtacatccctactaaaggagtacattgtaaaatcactcactctttattttttttggtaaaataatcataattttttttttttgctacgaggtaaaataatcataattgattaaccttataaaatctatagacataatgagtgagacactgacattttaaaaaactattgtctcatttaggcacgtgacatgtttatgaaagaaaacggtggtctttaattaattcatatgatgaaaatctaatttaatatattatatgtttgaggttttttttttttttaaataaatatgtttgtgaaatttaaattatgtattgtactgttttttagtttttatcataaaagttcgagtgaatttaaatgttagtttctaaaaaaaaaactcttagttatatagtaactcaaattaaatattattgagaataattatttaatttgatgtctttattttaacaatgtaattacatagtagtactgtaattaaaaaaaattaattggtatcaattatgattttcaatacttataatctcataaaaaattaggtatacttatattttataattacaaaatattattatttttaaacaattaattattatatattgttggtttcaaaaatatattattattattattatattgttattttttatgtaagtcactaatttatttgtaaaaaaataagaatttgtattgcttgatatccaaccatacttttgattaaatagaatataataccataataattaaaattcatgtcttaattaattcttaaaaataattaagagaaattattttatatactattnnnnnattttttttaaaaaaaattagagtttaaattactctaacaaatttttgtaaaaatataaaaaaatatataaaaataaaaaatcccaaaaataattctaaaaaataaaataaaaaagttacttacaaattacagttagtacgatgagatataggttggattatcaattttctcttcttaataataattacaaaaacaaatctccaaataataataagggtaaataacggcataagtactcaaagttttaagtttgtaagcggcataaatttaatgtttatttt

SEQ ID NO: 126327 - DNA, 1109 bp, Cannabis sativa
ttatgaaactagttttatttttaatttatatttcagtgttttaggaagtgatttcttctttgtttttaattgtaatctaaattaaaaattaattcacgtaaactaattatttaaataactaaaatcttctttacaagtaaattcttttttacccttctcagtattattactctaaaacaatatacattgtaatcaactaataaattacaattgaacattagaacatattaaagataaatatgcatccagaatccagtttcaaaacaacagattcatgagaaaccatttccaaaaagtgaatagaaaataaagcattacaaattagtttcaataataacatagtacatactttccttcgagatgctcttttcttttgtatcttaattttcttagtagtatcaactatcttgtcaagctccaattgattagaatcatagactgcttttatctgttaaaaaataaatacagaaataaaataaaatcaaaataatatagcaactataataacaaactgaattaaaaaattttaaaaaataaaacaagtttctaggctcttaaataataaaaattgaacaaaaaataaaatcagtttcatcaacaacataatgaaaaaatacaattgtgcaaaaacatataacctaaaaacaatacaaacttttaaaactagtatcaacatttaaataaactaaatatttcattaaaagagacaaaaaaaaactaatttcattaacatcataatgaaaaaaaaaatacaatgcaaaaaaatataatgtaaaaacgataccaattttaaaaacccatttcctcaacattaaaaaaattaattatttcattaaaagcagcatgaaaaaaaaaactagtttcattaacatcatattgaaaaaaatacaatacaaaaaatcataattttattaaaaggggtaaaaaaaaatagtttcattaacacgataatgaaaaaaataataatctaaaaatgatactaaatttgaacaaaaaaataaaatcggtttcattaacaacataatgaaaaaatacaatgcaaaaaattataacaaaaaactgttgggttttatgccctaaataaaactcaatttcaatgtaatccattt

SEQ ID NO: 126328 - DNA, 1151 bp, Cannabis sativa
  modified_base (1088)..(1121): a, c, t, g, unknown or other
tctagcaagtcactaaattgtcacctcatcaatttttttagtacacattaatgggtattactcattaagaaatcatcatcatccatttatatatatatataaatatatatctgaaattcggtgtttccgcaacaaaaaaaaaaagcaatttatttttacactaaatgaacttgataaatcatgttggaaacttgattactcagaagagcgatttgattaatcaaaaatagtaaaataagtaacgcaaaaagtaaaaattacacaatttttttttacgtaatgtcagtattctttcgaatactcttaatccacaagatcatgctcaaagaatgaaattaattaataaaattttaaaacttacaagaacagatagcttatgcaaagtgtgaatcccgctaaacctttgtcgcaatcttcttgtaaaatatctcatcaatccaatttctggaacacatcgagaagttgaatccattcaattcttggtatatactcactttcttctgaaatgagactggcgaaaaattctctcaaagattcttggcttgttcatttattcttcttgaatttgttaagaagacaaatagaaaaaaaaaaatatacatatacgaagctatagctgagcacactaagctttacacaaacacccgtcacaagacaacaatatttgagaagatgagtagaagagatgaaaaaattaagctacactctaggaaactgttgatgcagaaatctggccaataccatctcactagattggtaagataagcaatgattttttttttttttttttgaaaacagtaatgaactatttaactaactaagagagggacaccagaactttatagtagctcacttcccgtgtcgtgaaagctttatttcccacaagaattataaggcaaattacctaaggagagatcttaaattttagagagagatgctctaaccttatggagatttttttttgaaagtgcaaaataagcttgtagagctctccttttatatgcaagtaggtccattaaaatcataataaaacattacaaaaacgtgaagtattttatctagagtgtgttgagttttatgccctaaannnnnnnnnnnnnnnnnnnnnnnnnnnnnnnnnntaataaagatcaaaaataacatttaatgtt

SEQ ID NO: 126329 - DNA, 1099 bp, Cannabis sativa
tctgcaaagttaaaagtaggatgaaactagaagcgaaacctctggtgagaagagtgaaaagttttaaatttaaaaggcgatgagaatgttgtgagtgcttaatatgtaccaagaggattgccttcaatgggaagcgaacgaccaagatcattcaccaaaacgacatctgaagatctgacagatggaagctgagaagactgcaccggcctaaaatatttaacattcattatggcacacctcgtgaaaagtgcttattaaatgaagggtctattcaatcaatttcccatcattttgacatctcatgagacacgcgccaaacacgcgtgaattgcaacagtggacatttaaagcactgccaatttacgatgcaaacgatatcctccgtcactgacataccagttgacaaccatttaggtgacaccataaaacttgaagctacaccacgtgtcagaaacaaatcatgacaaagcgaagaaacactgcaagcacccagaccacaagccgtcctagaagtatgggggtaaatgttgtctgggcttttgtaagcttggcacatggaacctaactgaggaggccgagacaatcaccagctaattaatgcctttggccccaccttctatgaggggctttcacgaaggataccttcattgcaaggcggggagacgtggagcatcgatgtacatggtatctccaagtcccaggagcggaagccaagcacccttcgaaagttgggggcttccttaagtacgcatatatggggtgtggatggatatagaatgatttgtatccccgtacgatgtcacaagagagctttgtccgtacttgttagattatagaagtgacatccattctttattctggtacgacaccaagtcttgtcccccacgtcaggccatagtacaatgaatgcgcaccatcatacctgcccatggtccatcagccatttacaggggtagtccaaaaggaaaagtcttttggtgacacgtatggaatgtctgaatggtacgggttgtcatgaaaaaccgtatgatgaagcaactgttggcttttgtgccctaagtaaaacccatttcaatataatcacatttactaattaata

SEQ ID NO: 126330 - DNA, 1378 bp, Cannabis sativa
taaccctaaatcttaacatactcaaatatatatcatggcatagcattcattcaacatatatcactagggtaataaccctaggcaattaaaccgctcacgttagggtaataaccctaatcccggttactcattactcacacatatcatttctaatacaagtgccaccgtgcataactcgacgtgctaaatactgtcttacgtgatgtcccgcaatagtagagattccaaatcccaggtgctcctgaccaggtatcggtaatcctagtcacaaataccgggattttgacaaatagggttaacccctgattccacattcataatatataaacatggcactaaaaattcaaataatcacatagagctcgaaacgagctttccagcggtatatagaactcccaaaacgtagttcggatcacgaagttatgcaatttcaaagttggaactcaaaactgcccagaaattcgagggcgggccgcggcatgcaaaagccatgccgcggcacctgggaccagctcccaggttccaatcagaggggtgggccgcggcatgctaataccatgccacgacacttgggttccaaacccagaaaaccagcaacaaacatacgaatttcagtaacaaaatccatctaattcatccccaaattataaccaaactctcaaatcacaaagtagagttgctagcaaatattagagagttaaaattcatatttcaagcatcaatttccatcaataacctcataatttcagattgcacaataaacacaaaatcatgccttaaactaacaaaattccaagttcaagagcttgagcttaaaccttctcatctttattcattttccagcaacataacactaattaaaatataaattccaacctaggaaacaccttaaaaactcaatcaatactcaagaatagaacttacaacaacatcaagcaataaaggctcaatttcaacaagatcaaacatcaattctcctaacatgcaatctcaagaacaactcacctctttacatgctcttccaatataaaaactcagcaagaattctaaataaaaaccagtaaaaagagttacctcaactcaaacaagtgccaagccacaatcttcccaattctcaagcaaatccacacccaaaatccagaattgaaatcaaaagagggtttgagagagagagagaggttcgggtaaggggccaaataactagaaaattcatcttattttctaaaaaaaaaaacttagggccaaaaagcacattcatgcacacacaagggcaattaagtcattttacacataaataaacccaattaattttaagattaatcattataaaataaaatgccaatattgcatttcgggcccgaaatacctggttgtgact

SEQ ID NO: 126331 - DNA, 536 bp, Cannabis sativa
ttggcttagcaaaggagatgagaacaacgcttactttcatgctagtttgaaaaaaaggaggatggagaatagcattacttcctttaccaatgaacaaggggtgatcatagacaatttctctgaggtggtcaatcactatattggtcacttccagtgatacatgggaaccgaatccagagctacagctagactcaaaacaggttgtatggagatggggagttgtttaaatcttgagcaacagctgagcctgatcagaccgtttacaaagaaagaaatcagaaaagctttttttcagtatttcggatgttaaatccctagggccagatggttatggagctggttttttcaagaaaatgtggccggagctgggtgctgacttcactcatgcggtggagagcttcttcactacaggattcatgcctcaagagtttcatgctacaatgctctctttaatcccgaagactgaaaatcctacaaaggcagtggattacaggcctatagcttgctgcaccaccgtttataaatgtgtttcaaag

SEQ ID NO: 126332 - DNA, 1431 bp, Cannabis sativa
ggaattttcctgtttttttcccatactaatatgttggactcaaaaacaaatattaatgtgacctattatttaaaattattattttcaaatataaaaatggtatattttttatcaataaaaaaaaaatcaaaaccaatattttaatttattttataatttctttacaaataattaccaaaatttaaaatttaaataaaattcaataaataataactaacttcatattttatagtaaatattttatgatatcacttacaaaatttcaagataatattctcaataaatttcttttacaaaataattttataattttttaaaaaaacatatatacaaagtagctaaattatatcttaaacatatattataaagccttatttttagatttattttttgtgtgtttaagataattttaagttattttttttaacaacacttgggttacttttaaaaatttatgacgtgaataattattgtacatcaactttttggatactcttttgtatatatatatcaataataaatatatgaaaggtaaattaaatttaacaataagctagttacataatttattagtaaaatttatatagttttttatatatttatatataaaatgtagttgacttctttttcacaacatttaacttactcttcagaatttaaatgtaggtcagtcttttttttttgaaaacatttaggttactggtaaaaattataaaataaatgtttatagacgttaacaccaaattatttttatttgctcatagcttagtttcttaaatgttagttttttaaattacaaaagtaaatgcaaaggacatgattagtggaggtgctctgtgggaactagttcagatttcaagagactcttccagggaggacatctgagctcttgctcgtcgaatattgcattcgagtcccaccttctattctgaaatgcattgaccacagatagattgttgatcagtatgtaatttcagatgaatagactccataaaaatttattagtgcattgtgagctgttttttttttttttttttttttgctatgttgcataatgtgttgtgcattgtgtgatatttttttttgcgaaattttattgtgtaattttttattatatttgtgatcaatatttttatttttattcgtgtgtgtgtattttttacttcatttggttgactgatgaaattggtttcacttgacttcattgtttatcatttatgttttgttatgatttttcatagggtcgaaactggtttcaccgggttcaaggcttcgaaactagttttacatgttttgagagttctgtaatagggttgttccattttattatgttattgcatattttttattttaagttactttttaattattttgtttctagattcaaaacttatacttatattttgttttctgattattggtatacattgt

SEQ ID NO: 126333 - DNA, 836 bp, Cannabis sativa
  modified_base (68)..(70): a, c, t, g, unknown or other
tttataaatgtaatacaatatatgtttatttattaaagtttaaattttatcacttttgataaaccctnnnattagcaaaggttgcacaataattataacaagcactgtatcacgcctaaactggtagggtattacatggtgagtctgcactgtttggtgagttggtggatatatggcataggggttagtcgacttaaccaatgctgttattggggtgtaaatcttagacatattagagtaattgtctttgagatcacaattagaggaactataaaggcctgccttattagaaggtttgccagaagttgaactgagtggaggagttgttgagcagagcaggtgcaaattggacaattggaaaagatgaagactcaccagcaaatatcgtgttatggaaatgattcccagtatgcaaatattgcattgtgatagtgggtttcattttgtcagtgagtggatccatatggaagttcaaagtaggtaggtaacgataaaaatttgaaaaaaaaattggaatgaagggagcaaataaagtacaaatttgtaagaggattatagaataaaaccagaatattgaagataaaacttgaaaaattagaagaaaactaaaaaaaaaaaaataataataaaattattgaaggacaacatttgcctcaaagcaactaagtctattaacaagttaaaccataagttttcttaagaaaaaagaaacaatattatatgtatttttaattaaattaaaaatatatttacaataaaataagggataattacctaaagcgctatttttggtaaaatttttatatttttatgttaaaagtttttttttttttttt

SEQ ID NO: 126334 - DNA, 857 bp, Cannabis sativa
  modified_base (824)..(831): a, c, t, g, unknown or other
taatgcatcaaaattagtattttgtaaaataaggaaaaatattggggcgttacacataaaactcaaacccaatctctctctctctctcttttctcaacacctctccctctctctacctctcgatctctctcttcaaaatcacctctcgaaactcatttgatctcatgcttctttaaaatgataattgttggtcgtatttatgggtccatgatatagatcctaaagttgttgattggaggtgctaagttgttaaattagttacgacttaaaaaacttaacaaactcctcataacagtatctccacgttagcataagataaagtgctcccaaatgaagtgtacgctttcgggactaagaactaaagcacacgttgaatggtctttctagataggaatagagatggatggagttcattatttgggactcccttccaagagagaatagctagccgttcaaaacacatttccagaggaggactaactatcctgaagactccttcatgatggacatgataaacatccgagaatgcccttctgaatgacaattaccattccataaagcttcttctggatggataagttagaaatctgggaacgccattccaggtgtcatctaactttccataacagaataactttgcagatcttaacgttttgagaaactataccataaatttcacctagtttcttcaaattaaaatattgacggtgatgaagaaacaatgcagccatcatggttactgttttaaatatctcaatatattaactttagagattgatcaagttcaagaaatgcttgaatttgtttatgttgggttttgtgcnnnnnnnnaaatccatttcaatataatcatattt

SEQ ID NO: 126335 - DNA, 2195 bp, Cannabis sativa
gagacagcttgtgtatctctctggaacgatcccatgattgtagggattgcttttgtgcttgagcttcacgatattagctctgaagtagttaagtcttgatacaccggtcggagaggtaacttcactctttgctcgaatcatcagccctttgctctactcggtcaagtagactttgtgcgtgcaaatgtgttacttgaagttttttcgaaacatttctctagccaagtgtaaagaataatgacacgtgtcactaatacatattgccacatcatagtgcaaaaaataggataccataaaggaatgcctaaggtctcataatccaacggttatccataaccacacctgcacagactccaaagagttttgatgatgtggcacctcaaatggattaaaagtaataattacagctgtcttttcaaaaccctcgacaagacaaccaaaagtcaccatctcgtgacaatctatctcctacctctcgcttatagtttcccttgtgacatagctgtcaattacaactaggggcacgtgttatagtgtgaatttttcacctagaaactcaagaccaggctcccgtaaaaataacacgtggactcactcgaggagtgctgagctgtcagaaggagaccacttgagtaaaaacctcgcctgaaccagactcagcgagatgatgtgaccttgacacagtctagtctcattattacacctcgcatgatgctggactgaagactgggtttaagacttccatataccaagatatatgcgatgtccataaaggttttcctgcaagttagtaaatatcgattctttactcagcgagttattctggatgacctaatgcactcgataacccgataaggactcgtatgtcctaagttatcgactttttacaagagatccatatacgcatctcaaataggacgcatatatcttaaacacgtgagactcaattagtcttgtacgcatcttaagcccacgagcttatttgagaatatgaacagacaactcgcaccaccaaggtcacatacgttgctatagttagtgaattgggccgaaactgttcttcatttattatatttatgtttctactaatttaaatgttgatattcaatgtaaaaacggattgataattaatcaagttctatacaatcaaagaacacttactttgtatataaaagagtgatccaatatgaaatgatcaagacagaaacccttgaacagtagactaagcagatcgtgatctgactgaaccactatacttccattgtgttatttatattttccactacgtctaagtgtccattcattgaatactcaccattctaggtggagtaatcgcatactttaatactctattttaaaattttatttggtgttgttaaaatttctccaacaatactaattaaaaaagaaaaggtcataaaaaatagaaaaaatagtacaaacttatttataacaacacataatgatttataagtccacataagatgtattcgaaacacaactaaaagaaaaaataaaaaaaaatcacgatccttgtgcacaggtacccacacactcatgggcatagttttgccatccaccaagggcacaagttgcacaaatatgaaacttttaattcttccattagactttacacagtgtttggacacataaaaaaagttgtggataccaattttcatgacaaaaagataaatctattttcttaatttttttttataattgaaataaattttaaaaaaataaaaaaatcggtacaaacttatttacaatgacaaggaatggtttcacaatccatgtgggatgtatttggaacacaactaaaagaaaaaaacaataaaaaaagaattcaataataaaattctgatgcttgtacactggcgttcacacacttctcctccttattcttctgtggcatgggagaagtgttaaacttcccctttttgccattgttcctcccagatttgttggtgctgcacttattttgtagtgtttttaccagtagaggtctgagcatcattgttattgcatgcttgtgtgcctggtgggtcatgaggatgttgggtgcctcatgactacttgctactgggcctatcgtatggcttcctcaagtttgatgaagttgtctgctctatcgacgaattctttcatgttgttggtggatatcctcttgatatctttgttgggttttgtgccct

SEQ ID NO: 126336 - DNA, 824 bp, Cannabis sativa
caccgtaccacaccattttttttttgcagtgcagttttcacagttttttagtttcgcggtgcaggtgtggtttgggaaattgaaaaaaccccacgggcgggttggtttgaaaaaatggtcaaaaaccgcaccacccgcaccgcaaacacccctagcagacatagatagtatcttgatacatttggcaatgaataaagcagtttagaattggcttcaacccaggttttgaactgaggttagaggttttcttggattgataggatgctgcgaaatatttgttgaaggattcctatgctcttaacggaaattaagtcaaaagaattgaaacagaagctaactattgcaccagtgttaacattgtcagtcagtggggagaaatttgtgatttactatgacactcctaaacaggattagattgtgttttggtatagtctaggagagttcttgcatgtccacctagacaatggaaggagtgtgaacagtggtattccagtcatgatattgaattggaagtagttgtttttgcactgaaagtttggcgccattacctgtatgttgaaaagtgtgaattctatacggatcacaagagcctcaaatacttcttcacttagaaggatttaaacatgaggtagtgacgatggttagagctagataaagatgataactgtgagatttactaccacccttggatagcaaacgtggtagcagatgctctaggccgaaaaagggccaggacaagtttatgaatagaaaaaagatttcaccaaagtttgctagagatataactgttggaaattattttaccaggatctaagatctactca

SEQ ID NO: 126337 - DNA, 542 bp, Cannabis sativa
gcagctgccgccatcaacgagaaaaagagtactgctcacatgtgatatcactttttgcgccggactacttcctgccctttttcctttacctagctaccatcgttgtctttctttttttttttttttttggaaattatgtctttaagttttttttatgtaaaataaataatgtaaaaaattataaaaaaaagagtgaaatatataaaatatattataggtattatatgtaggaaacatccgcattgtaatataaaataaatataattttagtttttgtatttcgtttgttaaataataatttaggtcatgttttgtaaatttagactatgttttttatgattttgcaaaattattttaggctaattataacttttatcctttttcgtatgtactaagtcatattttatggattttttaagccgttaaaattttttcttgaattaaaattgttagatttaataaattgtctaattctattcaattttaaaataaaaacggtcagaatcccagattaataccggcgggtcccaccggtattaaaa

SEQ ID NO: 126338 - DNA, 1706 bp, Cannabis sativa
  modified_base (49)..(51): a, c, t, g, unknown or other
aggcggtgtgggattgcacagcttacccagtgtttccccttacggatcnnnggactactgactgtcacattctaaatgatccttggctgccagatttggttcaaccttttgttagctcttctcacccaggtctggaaggtaatacagtgtctagcttaatgcaagtcaatcagaacaattgggatgaggaagtgattactgatttgtttaatgagcgagacaagtctcttattttaggaattcctcttcctggaaatgctgctgctgattgctggttttggtgtagagaagcttctagtttctactctgtgaaaagtacttacagattccttcaagatgaagctgaccgtaatcaagatggtggtgatttttggaagaagttctggcaaattaaagtacctcagaaagttcttcacttcagttggagagtcataacaggttgccttcctacaaaagtccagcttcagactaagcacatcaatgtggatttactttgtcccttctaccatggtgaacctgagactatatttcatgtgctggtgctgtgccactttgcacattcttgctagcacagatcagcaatcagttatggcatgggtactgaagttgattttaagaattggtttgttaatgtgaccagtgggggaaattaatacaaggttgcagaggtcttaatggtagcttggcaaatatggaatgctagaaaaacaaactttgctgcaagtgtagtccttacggcaagatcgcatcttaatcaatggcaatgtgctcaacaaaaagggttagatcctttacttgattataatgatcaagttttggataaagagcactggacgaaacctttggctactacgattaaggtaaatgtcgatggggctatatttgaagcaaataactattttggctttgggattattgctagagattctgctggccgtatcatagaaggagtttccaagagctgtattggtcgagtgtcacctgagtatgctgagatttttggcattaaggaagcactaagttggattaaaataaaggattggcaagaggttactttggagacagactgccttgttgcagcccaagcaatcaatagtactgtccgtatgccatcaacattcggcctgctggtttcgcattgcagagagattttaaatgagttgaattttcttaagtttaactttgtcaaacgttctgctaacaaggctgcgcactttcttgcacgcagtgcttgttatatgacagatcgtattatgctttctaacaactgcccttcggagttgttaaatattgtattggttaattcattagtttaataaaatgccaatctttaattcaaaaaaaaaaaaaataccataaacgcccaatttatgattggtaacagtcaagagctttatggtggtcattcatgttcataagggagtaaaaactctataagtagaggtcatattgttcacttgtaggagatgtagttaaaattatttgttgtagttagaactttgtgaggatatgttcatccttagacactatgagtatatgaggttttataaatccttataagtatttctagagtttcccttagacgtcatatgaaggaagacatgacttttaggacaaaaggtcattgagccttggtcaagctttttgtgtgttattcttcttcttcttctctagttttcttataatcttaatgtaatacttttatt

SEQ ID NO: 126339 - DNA, 812 bp, Cannabis sativa
  modified_base (30)..(37): a, c, t, g, unknown or other
  modified_base (735)..(743): a, c, t, g, unknown or other
tatacatatttcataatttaatgtgatagnnnnnnnnactaataaaataataaaaatgacataaatgtaaatgaaaaagtaatgcatttattatggtgcaaatattgtgccaaatttgacacaaaattttctatgtgcaaaatttacatcactttttagcacactattgaagcatactttttgttaaattagctatattttagcttttcaattcttatttacacgtctattggagatactctaagaggttgtaattagcattcctcttcaaatatatcattcaaaaaaaaattaaaaataaaatcagtttgttagataaaaaaaaagtgacaaaaattaaaaatttgaaatcaaaataagtgttacaattcatttaattatttgtcaaaggtttttcactccataaattatgctaggagtcggtaagaaagtgatattcattacagagagaaattgctatttaatatttaattgtggcttttggttaatcatagttcctagtcctaatccaaaaaaatgaaaagctggtgatgatagattttttttttttctttctaattcataatttagatttttttttcggttgatgatatatatatatatatggtttttagttattcataatttagtttctaattctaatcaattctttaatcaataaaaaattaaaaataaagtcaaaaatgaaaaacgtgtgatgataaatttggaattattatattttttaaaaaatannnnnnnnnaaataaaaaataaaaaaaataaagccaacaaacaaaaaacttatgattatgattgttataaaataatat

SEQ ID NO: 126340 - DNA, 984 bp, Cannabis sativa
tttttttttaaaaaaagaaaggtttaaaaaaaaaattttatttgttgaattttattttatttctcaaataaaaaatttattttttaaaattttgacctatttaaataaagtaaaatatcatcctatgaaacaagtgggatgaagcctaaacttagacgacaaaaagcaaaagggaacaaagaatcaaaacccattgtctcctctatatgaaaatatagaatgtgtatgtacttacttaacaacaatacatgaactaatccaccaaaaattataacataatttaacaattaattataccaaaatatatatttttatataaattaataaatgcatggtttttggtttttggtttgtggttgaagtgaaaaagtctatatgaagcatatgccctaaagatggttccactccaattgggttatcacaaaatcatcacatccatacatggcttatatatatacatatatatatatttatatgcttttcacaaaaaatatatgcaatattctttaatcaacaaaactagcccatcaaacttattttgcacgttttgccaccaattaattataatacgaatataagaaaagaagaagaagaagaaaatattcattgtactatataatatcatggtttaagtgctaaagaatatacattatacaccaaccatgaatttcttaattacttttattcattaagtacttcataataaaaagaaaaaaagagtgagtacacttggtattaaaatactatcaccacaaaaaaaaaaaactatatttagtaaaacttaatttttagtcacaatataaatttgtgtgactaaacttttcttatttctttttttaaggatccccgaatcgaatgatattcttgttccaattttcgcctttttttctccctctgaattaaactttttcttgccataatgattcaattcctattagtttaataaaaaattccttgtgactaaaacatggtatttagatacaa

SEQ ID NO: 126341 - DNA, 1602 bp, Cannabis sativa
agggcataaaacccaacactaggacccttgaagaatgctgcattatggaacaagtgacataataagaggaatctaataaggtagaaattgttaaattagatccctctatatcacttgttacttataaaacaataaatacaataaccaaatacaatgtaaagctcgtgatttttaatcgccagaaataaaaacaacagcagcaactctccaaatagaattttgtcctcttactctaaaacaaggaaaataaaaaactatataaaaggaggacctcaccaagctttgttcaaagcaagaaatccagaaagaaaagtgagacccagatttagagagaggagctcatgtgttgagctcacactagtccttgtgtggtggaagatttggaagatcaaagtgtgagttttgtcattacaacatacgaaaagaattgatgatatgtacactgataggcttcgagaataaatattattttcatctatttacattcaattatatatatatatttggtgatcttgggtatatggtacaatgataattagtaacaattattttattgcgtacctgatttagtttcataaaaccaacaacccagacctggacctggatcctacccgtagtcagtgttaggttcaagtttattaaaaatatattataactttacacaatctattaataagtcaataccaaatatagtattgtgtatgaaataatactattacaatacaatacaatataacacaacacaacacaatataatacaatacaatacaatccaacaaaatacaacacaataggacgtatcaaacgagcttccactactacaaatttaagctttagtgacattctttagtcactaaaaatttatttatttattttgtttaatttttttaattaattttaaaataaaggtataaagtgtccttttttcccatgaattgaaaaacttttccattcccggaaaaagggttaccaaaaaaatttttatttttttattatttttttaatggcaggcgctaaatgttttgaaattttcaaaattcagtttccaaattccaataaatatctaattattgaataaataaataaataatgtaataaatacttatatagtaaatgatatagaaagaaaaaaaaaataagaaaaccatggcaatttttacaaaaatattagattttagttaaaagtttataattttactgtcacacgaattttttgtataaaaatactgtctttttataaaagaaccgtaaaataaaaaaaaaaagaacaattaaaacaatagtcgaacaaccgtagaacaatcatgaaaactaaacacatgccacagtataaaacttacagtattttttaaaaaaattccgcctcacagtagaaaaaaataaaaatttcagtatgtggtgtaaaaatcacaaatcctaaacaatttattcacctctctctcctttctgaagcgcctctccctctctctgaagcttattagaatttgctacacatttctacacaatttagtctagaaatttctatacacttgtagaaaaattatctaagaacttaagagaattctagattagattaaatctagaatatactagttatgttgt

SEQ ID NO: 126342 - DNA, 1660 bp, Cannabis sativa
  modified_base (764)..(772): a, c, t, g, unknown or other
catgttcttatatatggctcaattctctaccatttattccatgtgggacattgtccacaataagtaattagattgtatattgttatacataaatatatgtatgtaaaattaacattaaaattttacttttttttttcttagattggatggatccaatctaatctaatacatactggaccttaaatattaaataaacccgattcgattaaaaaatagtaggtttaaaatattgaataaacccaaattgaactaataaatatatatgaaatatatccaacggatacaaccaatctaatctgacatctaatggatattgaatcgattggatgactgaaattaattagatcggatcaaatggtaaaatccaacatccaatatataattggatcatatctggataggtctaaaaaattgaatgtccaataaacacccttatatataattatttgtgcaacttcattattataatgaataataaaaaaaaaaggtatgaagtgtaagagataataattaattaatttgttacttgatgtgttaaacactacaaaaaattgttacttttagtgacaacataaatttattgtgactaaatagtcacaacaaaaagtcacttgtgactaaaacatagtatttagttaccagttgtcactaatttaattttagtcacaacagatattgtgactaaaaacacatttagtcacaataaattgtaatttttgtgactaatactttgagccacggaacttttagtcacaacacaatannnnnnnnntataattagccacaacttttttatctttaatcataaattttgttgtaactaaaaataaaattttttgtagtgaaatttaattcaataaattatgcgactaaatggcattcttgataaaagtatgtattttaattatagtaagttgtcaattatcatttcttattttttttattgttttataaaagaaaactgaagaatcttaagaaaataatcttttatttttgaaatttgcttagtgtcgaacttttaaattaaatgtttaaaaattattacaaaccaaatactatataaaaaagattagaaaaatgcaataaaaagtgtaaataaatatagaggaatttacaaaaatattagaattgatgttaatttttacaaaaatactatcacataattttttttttaaaaaaaaaactatctttttataaaacaatcataaaatactaaacagaataattaaaaactatagtgcaacaactaaaaaataacagtagaataataaataaaatttaacacaatacacaatatgaaaaatatatagtattttttaaaaaattctactcacagtaaaaaaaaatgaaaaattttagatgtaaaaatcacataaatgtatgttatatttatggataaataccattttggatcctgtgttttgcaaaagttatcgatcgaaccctctgttttgttaaataacaaaatagaccttgtattttctaaaatagtaaaaataagacctgagcttaatttttgacaacttttttttgatataactaacttgaagaaaattcctaacacaaaaaatatagaaaatgtcaacagttttgtcataacacctttagatcggattattgttaaattttattttgacaaaaaattagttcagggtcctat

SEQ ID NO: 126343 - DNA, 523 bp, Cannabis sativa
aggaaagaaggaaacatgaaaaaagtaggaattaaaattagaaattctatgtaaaatcataaatagtaaaaaagaaaagtaatgacaataaaatcattttatattgatctgaatatttattaaagaatgtacgataaataatttttatatttatttaaaacttactaatcaatagcaaattatatatgaagatttagttttttaaaagtaaactagttatacaaaataagatttagtttttcattaatcttagtgtaatagaggagagtttttacttttgtatttttaatgaaatttattttcagatatttaaaaagtaccaaatatcattattgttatctcatttttcgcacaatgacgtggcagaatacacaacatgtgtcctgcattcttcacatctagacggagatgaatatcccgcacagattttatattatacatctacctgtatacttctaattacccgagcagggtggaaggcagattatccgagcaggagcaagtttggctttccaaactactt

SEQ ID NO: 126344 - DNA, 1170 bp, Cannabis sativa
attctcttctactatgcattccactcattacactgatacaacatactctatatgttactttagtgacacttctttcacaaataaatatattgtgacactcttaactctttgacacttgtaaaaacagtttttaaggttcgattctataattaatgataactgtgttgaatgagtgaaaaatataagttaatacatgatttgtcaaaaaaatggaaagcgtataaattataatagcactaccttaatttattatgtaggaaaccaataagttgacgaagaataagatttaaattgtgtaatattcctcacttttgtttgtgctagtatagttttctataatctttttcaaaaaaaaaagtatagttctagaatcaatgtgacattgtaggtacaatacattcaaatgcaggttgccaaattatattagggatttgtattgaaatttgtatatataatagtgaggatgaagtaatattaaataatttgtaagaatttaaagtttgtacctaagtaaaaatagtgctttgaacaacattataacctttgacattgtacaaagtgtaggacttttcagagtgtctgaacttaagtggcatttagttgggaggaatgaaaatataggaatggtaatagaaatagaaataggaatgcgaataggaataagaatgaaatggaataaaatttaaaatgtagaaaaagttgataataaaattattaaattttttctcatgttacattggaattttctttcctttcattttaaaatgtaatagtcattctaccaaaatagtagaaaggacattttattggaatgacattccaatactttaaaatcctgccaaacaaaagaatagaatgacaattgtttcctttctattccattctgtctcattattaccttcaaccaaacgccaccttaggaactaaaatcttgcatatattaaaagagctaataactgctactattcatgaaaaggtcaatcaaaacgattagtctaatgagattgcacctttagttcttttcctgcacttatatatattaataaaattctacagatatttagaggggtgttcatccaatccaatccgtactattttgctcctagtgcattcgatccgcattaagtgcggatttcattttttgaatccaatccgcacaatagctaaaat

SEQ ID NO: 126345 - DNA, 516 bp, Cannabis sativa
  modified_base (460)..(462): a, c, t, g, unknown or other
ttcgaggaggttccagcgccggtggcggacgtggacgtcgtaaattcatgagtgattctaatcactttgtcaaaaaaaaaaaatattattataaagaatttataaatttttttctttataaaaacagaatttacgttcattttaaattaagtaattaatagcattaataataagatatctatatttattatttaattaaataagatataagatagttttattattttatttgatttttctaaataacactaattaatacttaatattgaatttaaaatattattataacaatgatatttctatccggccggtacaaaacaatatcttttttttttctttacttttgttaattatgtaattaacaacaatgatattctatattatctatttcttgttggataagttgtttaaaatttaaacgaatatgcaataatcaattatatatatctattctatatannntgtgcctatataactgaattcttgcgtttatgagaaattcatggataacttttt

SEQ ID NO: 126346 - DNA, 984 bp, Cannabis sativa
tcctagagtcttcaaatacggtaactttttagggcacaaagatatccttaactttgctagggaaatctttcaaggctttggttccaactttgatggttgagccctgatctttgttttcgttttttggattattgtaatgtttgctatgtatttgtgattttcagctggttaagtgtttctaactctcttaattttatagtgtatgatgccaagaaggtcattgcagccttccaaacaaatattaccaaccaaagtaatgccttgagagcgatcgctggtgtcatcaagaaagttcctaagtcaaaacctttcgcatctcaaacaaagcctaaggagacagtacccccaaaattcaaaccaaccagattggttgatgcattactaaacccagaggctaccattcatgtcatcccactgcgtcagattccaccttttgcttctgctcctctggctccagctgtcaagaaaatggagaaaaaaatcatcgatctttgcaaagatgaggttctagagaaatctcttcttcaaagaagtccatgaatgcagaggagagaactgctaagaaggctatactcgatgccttggcagccaagagaagagagcgagctaaaacgaacttagcttatgatgactcagtggggagtactgcccccggagactttgaagaagtgcacaaaggtaattgagttcctcctcgatttccaatatgacctttggctctgaatgactacgaggtggcactcgatgaagaaaaagaccaactgataaactgcacttgggattttaaattaggggacgtgaacctactttattgataactttcttcaagcagaatgttgagctatcatctcaggacccatccataaggttgtctaggaagttagtggtgttgggattttatgccctaaataaaacccattccaatcgaatctgatttgtcatgaataaaagattagaagtcatttatgtttacatgttgttttc

SEQ ID NO: 126347 - DNA, 1070 bp, Cannabis sativa
aattgggcctaaattgtaattaaatgtgattagaccttctaatgagacaattacaattaattaaagaataattacattaaattaaaaattttatattttaacgtttaatttttattttttatttttatatttttatgactttctataaaaacaacaagaaaaccatataaaagtaacaaaaaataatatcaaataaataaataataataataacatacaaataacaaaaaatattcaacataaattaacaagaggacactataaaaatattacattttttgttaataaaattataaaaatcataaatttttttgaattttcatgcaattgtatttttataaattttttattatttttatgtatttgtaaaataatatcgttaattaaaggtggtataacatgtaattttgacccaatggaccagcctactaggagtagtaggcaagctaatgtgacttgtcttgggaagagaagttacaggtgtaggtaggggtgtttatcaaactgcttacactgtattatattgtacaaaaaaatatagtttgaaatcttttgcagtgcggttgcagtatgtattttttccaagccgcacagtgcaatgcaatttgcggttttaaatttaataactacggttcaaatcgcaccgtatttttacagtataatttttacaattttaagatctcgcagtgcggttaccttttgagaaattacaaaagcgatttggtttaaaaaatgtcacaacccgtgtaccacctgtatcgcaaacacctctaagttaccatttttgtgtatgggctaaaaaagtagttgttagagtaatgggtgtgcgtatccttccattttgaaaggaaaatttacatggtgtactaacttttgttatttttttacaaaaatactgccacgcggtattttttatttttttactgtgttttaataggtttcatactgcggtatactgtgttaaattttctctggtgttctactggtattttataggtgttttactggtgttctactgttgttttgacttgagttgttctgttttgtattttactagtgttttataaaaa

SEQ ID NO: 126348 - DNA, 586 bp, Cannabis sativa
  modified_base (47)..(49): a, c, t, g, unknown or other
ttcggggggaatttttaacggccaaaaaaattcagggggcacgattnnntacatgtcaaaattcaaggagaaaaattactaattacaaacacacaagtaactaactatttaaactatattctcaatagcgtaaattagttaatattttctataaaagtattataatgtatactattatataaaaaaaataattataatttcaataaaaacacccttacacgaatagagataaaaggtagtgtccctactatataataatagaattttctcaaattagttatatatttaaaaccttaatttgttttaatttaaagtagggaaaactttaacttaattattagaactttcatagttattatttgtatctcacaatgttcatatgaagcctccttgtctcagaaaccaattggatctgctataagtcatttactaaaaattattattaatttattaattattactttttattttattataacattcttttgtattaatttttttgtatcttataactatttaaaaagtaatatatatatactagacagatgttacgtgccaagtcaggtatgttaattttattttagtt

SEQ ID NO: 126349 - DNA, 2924 bp, Cannabis sativa
  modified_base (1739)..(1742): a, c, t, g, unknown or other
atatatatatatattggtttaatttgaatttattcaataatttagacttagtattttttgaatcgaatcaatattttaagttcaaaatatattggattggattagatccatccaatctgaaaaaaagagtaaaattttaatgcttatttttatacatacatatatattttacgtataataatataaaatctaattactcatccaaactaaataaaatgctaattagtaggggtgttcatcaaactgcccacaccgcactgctccgcaaaaaaaaatacggtttgaaattctttgcagtgcagtcgcggtttgaatttttcttaaactgcgtggtgcagtgcggtttgcaggtttgaattgttaatatgcggtttaaactgcaccgtatattataaaaattccaagttttttttatttatttaggtccaatatgtgaaggtccaacccaagcccactaattattgtattgttcaaacttgaaacttttttttcatatttattttcaagccttatgggatttttgacaagtgttgctcaagctttgttgtagttgtgatagattaattatttagtgatagtccaaaccgcataaaccgcaccgcatcgtactattttttgcactgcagttttttaatattgtggtacgggtgcggtttaaaagattaaaaaagaaatgcatgtgcgggttggtttaaaaaaaatagtcaaaaaccgtaccacccgcatcgcgaacacccctactaattagtttgattggatgttggatgtattagatttttggacaccccatccaacatccgatccgatccaattgaatattcaaaagtaacattcaatccgatccaatcataattgcatatccaatgtttggcaatcgattataattggatcggtcgattgtcattggattgaatgatttatgtacactcctaattacacccataaaaggtccttttggtagatttttatatgtttttgcattcagaaaattattttaatataatttatgatcacatacgttgtaactatttaggattagttgtaaatttttaataaattctgaataatttacaatgtcggaaataaagtttaaatagttatttactatgcgtagaaaaaacagtagcacatacaacaaagtatataatttatattattttcggcattataaactaattgaaattttttgaaaagttataagtgatcttaaataactatatacacgaatatgaaaaaaaaaatttctcaaaagtacagaaacatgtagaaggtccaccaaaccatccttttgaagatatactgtagactcaccctataatgtataaagtaatttgtgacataaatactaagtgttactttggttgacgataaatacttaagtttaatttttgacggtaataatacctaagttatatttctggaacttcagtaggtacctaaccattaagtatcaagtcaatagccacgtgacaatccctaattagtccaaatcattaaatttttattttttatttaaaaactaatttaaatatgcgaataagaaaatgacacgtaaataatgactttacacttaacggtcaagtacttacaaaacttttaaaaatttaacatattattactgtgtaaaaaattaaactaaaatatttatctacaatcgaaaaattaataaacctaaatatttaaaccgtaagttactctaatatatatagggacacgattttgtcccgtgatgtactttnnnngaatgtattatatggtacattagatgggtctcagggtatattgccatttttcaaccctaattacctcttgatcaatcccagttctcagatcaaataactccccatttaacggctgtcgtacatcacagaatacattctcatcacggaacaaaatcgtgtcccaatatatgtataaatatatatatataatatatgttggttcattgtactaaatattttgtgtttggctatgtatgttatcccctcaatttagaccacctcaggccaaaccgtccatttatctttttctttccatgatttcatcaatcactttcctggaaactgagggaaagttttatataattaattaaacttaaggacaaatattcaaacttaattaattaatataagtcatgtatagtagaactagaaaaagtgcaaaattaaggttataaaaactcttaatctgaaaagtactcatatctatctatatacacacatatgaatatataacttattaggtaaagtaattttaatacaatgcacctaactaaaaaaatatattggtataatccctaactgttttggcatttagaagaactttttagtctaatttttttataattatgtacggttatagttatttaagacatcttataaaattttgagaaatttataataatttacaatatagaattcaatgttcaaaccgtctatttcacacgcatataaaaaaaaaaaatcatgtgtgcaacagactctatgaactatattttcgttgtgttaaatttttctgaatttattaaaattttacaaaatacctcaaataactacaacatatacaatcataaaaataaaattccttactaatcttttttagataccataacagataaatgtatattagtttatctttttactagttgggtctaccgtattttgcaagttaatttaaatattttttcaataaatttgtaacatgttgattctttgtctttgtcttcaatgttttttataaattaacaaggtccaaaattatttactaattttgtggctcttaaaaatatttaagatattttatacacgttttatttttgtcaaatagaaaatttttataagagaaaaattattaatacataaaatatctaactaattttataaaataaataatacataaagtttttattaagtttaatttttttt

SEQ ID NO: 126350 - DNA, 831 bp, Cannabis sativa
atatatttctcctaataattatttgattttgaagtagacaaatttagaaagattggatatagtaatgaatgcagcaagtcataccaatttccacaaaagtagatgttttctaaagtgtttatgattacagatgtttatagagaaattagtaaaaaagaaaattagaagaacaagtcccaccaaaccaattggcattaatgatgctagtctgagtctatgttattggatccattgctgctttgatcgtgttcactgctgagattatgctcatcttctggtaagggtggtgttgctggtgctggttctactctttcacgttgctcttctggttctggttctggttcttgaaatagatcacgtaagaatggatatacaattctgtcatattcaagcattttttgctcagataatccttgtgctgctgctactgctggtggtggtctttgatcatttctcaagtgctggtgtggtcttcgatgatattgatattgtagttgtcgtagtaactgttcaggtctttgataatgatattggtgctgttgaggtaagtgtattggtctttgataatgatattggtgttgttgaagtaagtgtaatggtggtgcctgaacttgatggtagtttggtacttgtactaatgcaggagcttggtttggtgctagtgctcgtgctagtgccaattcatgtgcccatattgatgcaagtgctggcgcttgtactagtgctgctggcactcctgctaatgcaagtgctggtgcttgtgctaatgcaggtgcccatgctaatgcaggcgctgatgctggtgctaatgcaggtgcccatgctaatgca

SEQ ID NO: 126351 - DNA, 810 bp, Cannabis sativa
gaaatttaattaggtctacatatatatttttagtaaatataataattatcataaggcagacatcttgattagatctgtgactctactagcactgcatgaacgtttctttcgtaaggcagtgcatgacatgggaaaaatggtaaggggcaccgggccaattaaacaccataaaagtgacatattaaattattactattaagtattagttgtatttagtaccatctaataataacatcttgcgatttactagttatattttataaaattattatattaaattatatgaaatttgattattttttttttaataaatcaactattttattaatagcagtcgattaaaataatagtgtgcaatctaatttagacatctcccctgttgaagacacgaccaagattaaaattacaaaaatatgtcaaataatcagctgctgaattcccagatcatttgacaaaaaaccaaaaataaaatcagataaaaaaattgcagcatcacatttaaccttaaaaacacctatattaagtttcatatactacttagaagacacaaaagtaaaattgttatagcatgttcattgaacctcatagcttcaacactcaactattgtgtaaggtacgtaactgtactactaacaactctttcagtcacagagatcttgttattctcaaccattaacatggatttgatgacgagccatcgaagaacaaagaagaaccaataacgaaataatacaaataaaattatgtcacagaaacaagactggaactatgtcacgatcgacaagactaataaaacactcaaaatcatgt

SEQ ID NO: 126352 - DNA, 2465 bp, Cannabis sativa
  modified_base (1994)..(2003): a, c, t, g, unknown or other
  modified_base (2092)..(2093): a, c, t, g, unknown or other
  modified_base (2436)..(2439): a, c, t, g, unknown or other
agctagtctttagcaacttcatcttatttcttgcttcctctttgcgcacaaacacttgtgctctttcattgaattcattattatttctcactggacgaccctgtaagtgatcccacagcttgcccccaaatgttgagaggtcaatcgtgatccctgcttgaagagcagtaagttgaatactgtcattcaagtttctaactttagcagcggcagtactgaagcgactcaagtgagccttaagtgacttgcctggttgctgctttatgttagttagggataatgcttcaggtcacctatctctagctgcctgaaattatttcttaaaatccttggacagttgttcccaagaagttatcaaatggtgagtgaatttatcgaactagctactcgctgccccagtcaacaaggttgggaataaaatgcgtcgcagattatttgagacgttcctagctcgcattatggtattgaaattattaagatgagcgactgggtttgaagtcccatcatactgcgagacgtgtgggtttttgaatccttgagggaattcagagttcataatatcaggatggaaaggctcagcctcctcgtccgagtcatagccaggtaatttcctgtactccccatcttcatatttctaaacttatcctccaactcaatgattcacaacttgatgggatccactttttgttcattcacattaagttgatggcataagtcaagtgcattctgatctaattgctcatgaagatcgggttgtcttcgattcaaatgctcacgaagatcaagttgtcttcgttcataattactcacagatctcgtatctgagtaactctcaaattgataactccttgcatttctcatactttcttgattagtataacgtcgaggtttgattccttctcacgtttgcgttcctgatggactttgcccccaagacctcgagtggtccgagctagaacttacctcgtcttgaatagggctacttcgtcggaaaaggttagatacatgccctctgtttaggtaagtatatgcctcctccctctcagatcgagaaggatgctgggggtgtctcggtggtaacctacttgttctagcttgagtcctatgatttctatcgttattacgagggatttcctgttccctagtttggggttgccttatgttctcgtttctgcgagaagcctctagcacatcattattttcattcccctgattcgtaaatccttggggtctttgaggtacttctcgacgaggtgcttggttattttgttgttcatctacaagaacatccctagttcccccaagttgctcctcctgggtgttttagggattcccttgattttcttcctgcctcttggttcttgaaccccgaggtctacctcgtggtcttcttactccaggattaggttgattctgtgtattatttccttgagttgccctggccgctgtagcctctctttccaactcaacatttcgttggttagattcggctaagcgttggcagcgttatctattttctaattccactaatggtacatacctagtgggatcataagcaccctcacttctaggtacatagccagtattagtattggtttcctcgttccttccttctgggttttgattattaccacattggtttctttttgaacgtgttgttctagaagtgggtggtctttgagaacccattggttctttcccaggacgatgtgtagtttcctcaggatgacttccatcgttttgactatgatcagccatggatagattttgtttgttaggagggattttttctgagttttatcacgtaggctctcaatgaaagaaccaaactattaatacaaattttcgttaaccaataataagccttttcgtaataaatttaacaaagaaattataaaagattaataaagtataataaatataataataaccccaggtattttacgtggtttgcagttaaatctgcactccacgagtctatcttattcaagatnnnnnnnnnnatttaatacaatatacaattgatagtttttctttcaaagatttttcgtccctttttctgtggatctgcccctatttataggaatatggnntggcagttatttacatttaaatttgaaatacataaccgtttcatgaaatgtgggaattgattacgtttcatttaaacacgcgtggataacaattgataaccacataagtgcttatcattcttatcatctcgctttgcctgtagatggtcaatgctgacttagacaaatatatgccttacaacaatggcatgagcaccagtgtactgagcaaacttaagaactgctctttgaccataaggtctcacagactgggcaattgtgtcctacatatttcccagttgttacagttagttattgtaatgtggaaaatacgctaagtgtttatgtaaagaccgcttagttnnnnttggaaattagcagttaatcacgttt

SEQ ID NO: 126353 - DNA, 1927 bp, Cannabis sativa
  modified_base (220)..(222): a, c, t, g, unknown or other
tgaacacaaagaattttttacgtggttttacagttaaaattttgcgtagtccacgagtcaatcttattagatttctgatggtttttagggcctcttctcttatgattttttcgtccattttttaatctaacttgcctctatttataatcacatagtaggcagttaattacagatttgactgtaatctttacaacatttatcccctaaaatcgtggggttnnnttacatatcacgtagtataaatgaggttaatattcgaaaatcacacagttgtgattaatccgcttttactgggtcaaaatgatcatgtatttaaacacgttttaaatcatagcgttctaggatgtctcgataggaactcagtaccaatgaccttgatagcgagttgaagctttttcccctatctttctaaggtcgacgatgtatgcctcgttgcttctttgtttgaaggcttaacacttcattttgacaatcgcagttcttattaacaaagagtacttcagcaaatatttgaatgtcagcttctgacttgtcaagactataagtctcactaaaagatgtctgaaattgattggtgaaagtaacaggagcgcgtcttcctatagcgagataggcgcctcgcttattaggtcttgagtccacccaactgttatacttagtttgtatattatacgctaagtgttttcacagtcaatatgcatcactttcgtcttcctaggtgtaacgaagctgatgtctcgccttatgcatccaatgccgcatggtttctcgttaatacatgaggcaatagtttgtatatctttatctcgcataagaccttatagtcagcgagttgcaagtatactctgttacttccgcatttaatgagttattccattaaaagttattaccgttacatgcatcgatccatattttccttaacttgacacgtgtcctccactgaaatggtagccaaattttgggtataacataagggatgtccagatatacaatcaagtacgatcatatgcattcataaattaaaccgaataggcccgaaggcccattatgcgattaaaacaccacagagcatgcgagctcgtgtgtttggaatatgaatagtcaatatgcgactttgcaagttgcaaacaattgggcaattaatcaggaacagatgaaactgttcttacatttattctttaaacgactgtattaattaaattatgtaattaatgtgataaacgatcctatctgatcggttatgtaagatcaaaggacacttgctttctatataaaagagtgatctaaatcaaataaactaagctgaaaactattacaaaagtggactaagcaaatccagttttgactgaaccactatatttctctgtctcctttatttttctgttcttattttgtttattttcgcagtgtaaactttgagtactcactattctaagtgagtactcgcattactgtaagtaagtgttcttactttgttcgaatactcgcatattttggtattgtctaatttcctcgaacaacacaaagtaactagacacaacaaatagtcaaagaaaatggcacataacaaggcaagatatatcaattatatatatatatatatatttaaaatagaagatatttaagtaatagattgtgatgaataaaatgatagggacacgattttatcccgtgatgtacgacagccgttcgatgagggagttatttgatttgagggctgaggttgatctaggggttattagggttaaaaaatggcgatgtaccctgacacccatttaatatattctgagatccatttaacatactactgaatacattccgtaaaagtatacgagtgacaaaatcttgtccctaaaatgatagggaaatttgattttctatacttagaaaatcaaaaaatttgatttctaaaccaataatttaaacc

SEQ ID NO: 126354 - DNA, 1963 bp, Cannabis sativa
  modified_base (1895)..(1928): a, c, t, g, unknown or other
ccagcctctggacaacacatggctggccaacttgctccctacaagtgtctagctggtcgggaaagggcgaggcaggattttctatataattctacacgtggactgtgagttgggctctaatagcctaacaaaacatttgcaaagtaactacgttcaagggaattttagtcttttgtaattaactaaattaatatacaaatacctaaaggtttagttgtagattagggtaaaactctactatataaacagctttaactctaacctagaaatctctaagtctcattctagcctccaagtgataaaactctaagcctaaatctctaagtctgataactccctacctcattctctctcacacgcccatacaagcattctcagtacttgagatttgccaaccttgatttttactttgtatccttaagggtgctatatcagaccctacctatagcaatctaatagtattttccctcagtatcaatacaactaaaagcggagtaggtcattacccgctatctaagggggaaaacctctataaaattctttgtgttctttactttaacacccttattatgtaacacatggcaaacatcagattcataagaccccactgtcggttgaccactttttgagatcaacagtttggtgctttcattgagagtgagtcgatatcatatttggtaaaatgccatggttaacacaatacgaaccccaatcgcaccatctacatcttcgggtctcaagacccacaaactgtagatcttgatgttaaaattctaaccacaactggaattcccacaaacactatacatgttgtcaatcctatcacaacaacaggcgccacaagcctggccactacagctggccaaactgatataaacatcctaatggatcaaatagcaggtcgttgccttcaagggatgacctaccattggcacctgccactgaaggaaggaatcatgggcgatagcccccatagacaacaataggatctcatcttcggtaatatgctagagagacaggaccaggagttggcgagccccatgtggacttgggagaagatctagagttagcaagacttagagaagccatttgccaagctgacctaacaaagcaccacgagctgctaattgcagtgtattcgctcaacaaagacgtgaattcctgaggtggatggatgaccaagagtacatcctttttatctcaccaagaggagttggatctctgtaatagagaggccagcaacctgataaggcagttcaacaagagaaccgatggaaggggccaggatctcatctgatatccgctccaaggaagactagttgatagatcagggagagtctatcgacaagctgaccaacctggtccctcggggactaggatagatcttcccttgctagagggaggatagaccttgccttaaaggtcaaactacgataatagtcacatccccacaaccagcggcaggggctggccagggatctctagctcagcaacagcccctctcattcaggttttggtagactagccatctgcaggagttcccttggcccgccagtgaagagtagtccctccccgacaggagcagggcacccagaggtcagtctttaactgacaagaatcaagagcgagtggaaacacccaaaacgatgatttaagaagtgaaactaatcgatttagacaacttgatccactaaactccaacaactggtgcgatatacctttgtcagcacatcgccaacatcaatcaactgaggagtcacgagcagccagactctgccctatgcaggtgtggatgaccatggaggagttatgggtagccagaccctgcctaatgcaggtttggctggccacggacagctgcctagtgttgggaattattttaccatgatcttagnnnnnnnnnnnnnnnnnnnnnnnnnnnnnnnnnntatgaactttctaaaacgatataataaacacatat

SEQ ID NO: 126355 - DNA, 693 bp, Cannabis sativa
gagacggctaaacaacaggccgcaacctctccacagagggcatccgagaagtccaactgagccgagtggattcggatcaccacacccaggtgattccttatgacaactgcaatacacatactctccaggccccctctaacatcataattaagtttaatccagtcctgaggaggaggagaccaagactcccaccgtatctgagcatgatcaggtaagatagtagcatgaatgtctacaaaggaataacaaacaaagtcaatgtatttcttcacatcaggtagacagtcattatgaaccacttcgtttcttgtcctccaaatagtgtcgactacaattgaagcataaagaaagacctctttagctcgtatacccttgtccttgagactccaaataaacttaacccagtctcacatgcaaatgccattatcacaaactgggtaaataccccaaggcaaagatctccaaacatgaaacgccaaatcctaagtaagaaacatgtgttcaatagattccccccttaaccacatagagggcaattcatattttcaatctgaaacctgcttccgattatagttataacggggagcgcattggacaggatgctccaccacaaaatcttatgtcgctccaaaattttgctattccatagtttgttccaaagtgatggagccacctcacaatgaggcgctcttt

SEQ ID NO: 126356 - DNA, 582 bp, Cannabis sativa
gatgatcaaggtaacgaggtttctctcatttttcaatatgaacatttacctgatttttgttatgattgtgggatcattgggcataaggccttggattgcccattgaaagactttgctagggataatcccaagttcgatagtgggagattcggttctcggttgtgtgctccgagttcgccaccgcatgatcgttttcgggtccagagacattgtgagagttctacttcacataggccaattatgactatgggtgaagcctcgaggattgtttctgcggttgagcggaaccgggttcgttattcggggccaacatcggaggagttggctcctacctctgtgttagaggctcgtgaacgggaagaattggctgcggaggagttggtctctaatggtcctgctgtacaacacgcggccgtggcacctgagggaaatttcccaatggttgttgatgagataggagtgccgactgtgatacctgaagtggagagggcagaggtgttgtcgaaggtttcttcagttgtggatggttcggccgaagtggatactgtgttacccatgggtgtgagtgggaagcaagtgtca

SEQ ID NO: 126357 - DNA, 819 bp, Cannabis sativa
tggctttgaacctcactggttcattttattgatttcatctttcatcttaagaatccatttgcactccacaatctttttgttctccggctttggtaacaacccaagtcttgttctttcagaatgaatccatctcttgtccatggcctgaagcaatttagatttgtttccacttggaattgcctcttcgtagcaccgagatcttcaattttagtttgttgtactgctaccagtgcaaatgctattaagtctgcttccgcgaatcttgctagatggtaaatctctcttttggttccatcacgcgccaactgataaccttccagatttgcctatgtgaatccttttaaaacttctatttggtctttattatcttttggctccgcttttgcttccgtctgcgcattgtcttccagttccatactagctttcttctgtggaccttcttttgggagcttcgttccgaaatccatttccatgcttgtagttcttttctttcttgtttttcctacatcacaaggagacacactacctttcttggatgtcaaatgaggatattctaactcattgaaaataatatttctagtaatcactacctttggcttacccttttcaaaaatacaaattctatacccattggtacctaaggcatagcctaggagaattcccttaacggatataagttccagcttgtcaatagattagtgtacatatgttgtacgccaaaatattcttaattgcgttaggttgggtgttctgttataccacatttcataaggtgtttttaagtctataactctatttgagcttctatttataaggtag

SEQ ID NO: 126358 - DNA, 757 bp, Cannabis sativa
ttttttttttttttatgtaatgaaaatgcacgtatgattctcaccaatgtcttatgtgaaaattgttatatgcttaatacttttgcttattttctataggggtgttatggattggtttggtctaaaattttaattttttcaaaccaaaccaagacagactaattaaatgatcaaatcaaaccaaactaatttactcactaacagattggttttggttcaaaaccatgattcatatatcatagttgttttaattttttcttaagtaaatcttcatttttttgataatattttttttttttacctttaataaatttataatacataaataataataataaaatattctcaaaaataatattaagtcaatatctacattcttcaaaaattgtcccaaatatcaaaattctatccaaaaggtatgtcttaagtacatacataaaagaattatacggattgggattggtttcattcgaactgctactgagaattctaaaactatgaccgaataccaaagaattgtaaatggtccagattgacaaaactattcactctagatttattttatcacgacccaagccctagctaggccgtggtagaaatgtaatatccataacatgggtggtcaagggtcactctttgactcttgtaggaaaatagcaaggatcctttaatttatattacaaaatacatatttaaaaataatggattaactcctatatctataaaaaaaaatactaattagtaatttttccctcca

SEQ ID NO: 126359 - DNA, 1219 bp, Cannabis sativa
  modified_base (27)..(56): a, c, t, g, unknown or other
  modified_base (418)..(418): a, c, t, g, unknown or other
atttcttatctatattaataagtaaannnnnnnnnnnnnnnnnnnnnnnnnnnnnnggcataaaacccaacagttataacggttcgacccctctttcttcaaaaaggtttggttgaggaccttttttttttttaaaaaaaaaagttttcaaaatttttttatttttgaagtgatgggtttgcattgtattatgtatttcgagattcattccaattgatcatacatatatgcccctcaagcatttttaaagggtttacgctttataattacttgttgaaagaaatgattattttattcacaactgaagttcaagacattacatcagcgatgtgatttacaatcattaatctcataagaacttccccagttcaattgtttattttattaatcttccagaagcatctggttttgatagaangagttttgatgttcagggtcaatccctaacatactcccataattgttttaatgtccagggttgatccctgacatatcccggggttctaggtgaactaattctggttttagttgtttgtctttaattgttactggttgacgacaaactttaaaaatggcagcttgatatggaaatcctaacgggctggtatttactcatttctcttacgaattgctttacagagttaactgccccttgtcttattttgactcgttccctctcgagatgatcgaggtgtcccttccttctgtcgatgagggttattatccctggtcgcccgagttactgggcagatcgagttgattatgggcattgccctgcccctttatatattattgaaagtgtcctcgtactatgagaccttctatctcatccttcaactgacgacactcttccgtggtatgaccaatatccccatgatattcacaccatttggttgggtcccttttacgtctcacatgtttcataggcttaggctcgctaaaagcgacttcctgtacatgtgcgaggtagatatctttccgagtttcattgagctcgatatattcagcataaagagggatatatttgttgtgtttcttctatttcttatccttgggaagccttttggaatcgtcttttctttttgatcatgaggcttctgacttgaactcttcaataaaatcatattctgattccctcccaggttccttgacttgatttcttctggacttattctccaactcatccattcgcaaatggagtaaatgttggaatttattt

SEQ ID NO: 126360 - DNA, 1268 bp, Cannabis sativa
  modified_base (147)..(147): a, c, t, g, unknown or other
  modified_base (1224)..(1243): a, c, t, g, unknown or other
ttacctaaaatctattttagtacaaattactgttctgactaaaactaaattagtaacagtttgtatctaaatactatattttagttacaagtagcattgtgttgtgactaaaagtcatatttaattataaaaaaattatgttgtgantaaaaaattatcactaaatgtaatagtcttttgtactagcccttagtttcaagtagagttgcacatttttttcatagaaatggcgatcttaatgaggatcatttttgtctttgaatgttacagggatgttttttttccttattatttattttatgtatctttcgagtatattagtagtttttgttgtataattttaagttgtatttctattgtatttgaataatgaataatatgtagtattttaatttacatgtaattttttctatatgtaggaatgaactcctcgctgctaattctttgccccgtgtactttctatttacacatatattttttctaaaaaaaaaatacgcttacaattgactattttaaaatttagtttcggaataataaattattcaaaattttattgtaatatctactgtaaaatttaaatcaatatatataaacaattaattatatttctctaaattttgaaaaattgaaatgtctttaccaataaagataaaaatcacacatctttagctatgtgttaaagagtgtaaagaagacattgaaatttggagcattatgatatgatgtgtttgtttgtctatttttctttttgaatattctcaaatttgttgtagtcataaatgtatgacaaaattcagaaagaagaacagcctttgctcccacaatcatacacattcatgcatgcctttgtccctcaaaatctaaataaataaataattatataaaaaacctttaaaattttctcattccatttttaatttttttccataataataataataatatttcttggtttttatttcacttttcaaatcatggccagcctattttacttggctttactcatatgggtttccacatgtcaccatttttcttctattggctccattatgatagatatttttttttaaagataaaagagggaaatactcatttagtactttgtattttattaaaatacttatttgataccttatattttaataataatttatatgtattatgtttttcactaaaaaaacctacctttagtgataaccttgtgactaaaatatagtatttannnnnnnnnnnnnnnnnnnntagttttagtcacaacaagtattgt

SEQ ID NO: 126361 - DNA, 1309 bp, Cannabis sativa
atataaaccgaattacaattaggcgcccatacacccaatcataaccctatctcgcgtcccacacatactgagtctagaacgttcgtgctacaatactattgaccataatatcagcatatactcagcactctaatcgtacccacgtgataacgtcaatcagtacctatgccaaacatacattcatcgatatccaatataattctatgtatactaatattgcaattccaatgtaatctatcaggaattcataaacatgcacactaacatgtaatcacatatgcatataattatactaatcttaccttgatcttgaatttaggtgtgctggtcaacctgagcggaattgctactcgatgatttacatgcccctaagtcacaatattcataaaactaatgagtgatacgctaaatcactttttgaggacttaaaatcaaaactaaaagtttttctatcgatggataacatggaaataccctaaatatcgctaaaatatgaaaatctagggtgcccaaaattacctcaaccgataaactggatcccaactggaaaaccgattctatggggtctgcctagagcgaaccggtagaccaattctatagtgcaaaactaaactggtctgccgattaagtgtaggaacccccaaaaattccacaaacaactcaattcaatcccaattcgtttccaactctcaagaccgcctatacaagtcattaggaacatatttcatgcaaaagaactgaacaataaccttagaaatacaaatcaccatgaaagatcaaaatttgagctctaaagcttaaactttgttcaaacacaacaacaagcacccaatctaacttaaaatcactaaaaccattatacacaaacttcaaaaatcccaaatacacctagccagtttgtacaacagccctaattcaaaaaataagcaacaaacccaacttaaaacttaagaaaaacaaagagaaaagagtgtgggagcttatcttaagttgattcttaaaaatcctaaagaattcttgctagaatacccaacaattgaacaacaaaaccctactttctgctgggttccaagagaggtcaagagagaaggacttcaagagatagacttttattttactagtaagttgcacgtgctccgcacgtgtttagtatacaaaagtatatattatattaattaaatttattttttttaatattttactggttttatgagaatatttttcacaaaacttaagacctaattaattaaattaatattttttttttcaaaaatataatgtatatgtatttattttttatgggcaaata

SEQ ID NO: 126362 - DNA, 2089 bp, Cannabis sativa
tattccgattcctagttgtataggaaatcaaaattagctttaaaaaagagcatggaaaagatataattatatattttacttgtcatttacctcttcattaggaagctttaaatttaaaagactctcattagctttagaattaggaaaatgaactcaattataaataagtaagttgagaaccaattttttacagttcctcttctcttccacacgtctatagcctttcaaagagtacttcgagatttcacttttatcaagccttcaagccttttccgtccaaggtagaaaaaactcttctatttttctctttttaaggaggcgtcgatttttttttttgttttttttttatttctccttcttatcctcctttgttggtcttactccaaggattcttaaactttcaaaatcccttgaaataatttttctaaaatctctaaaaatccaaagcactctccttgtgccttgtaaaattcttttaagctacttcgactttttccaaccaagtttcactttccttgagttgtaagtagcataaattattgatcttgagatggctagcgtgaagagaagcaaaaggttacttgatgaatatgatccccatattgctcatttcattagagctaagctggcagtgcctaaatctaaggacttagacaaggcaggtggtggaaaggtgattgcaactgagcttctcaaagctgtcattgagagtgatgatctgagagatcgagccattaaacttagacctcttgtgtctagtacctttaccgagcttcaagctgaaacaatttgggatgattactatcttcctgaaactgttgatcggaagcctcgacatggtgcccccaagggttccaagaatacttgttgtagtgtctggtcaagattccacatgtatgtaggtgcttacttacccttgcatccatagtttatatcaatagctaacttctttagtgtatgcccttactagataaacctaaatgactataggattctagccaccttcttcatattttaccaccttaggaattggtctatcccaacccctcatgagatgaactttctctgtgacttaaaaaggagtccaaccagtagagctaaaagtttttaccacttctatcaattttcccattcataggacacataaccaagagtaattgtggcctttaccaccaagagtatatatactcttgttcttccatcgagacacattacttttcaaaaagtcggccctttcaaaagatcggctcattttattgacatgatgaggagagctaaagccatgttgattgatattccatcatgggagagagatggttgaaccctctttagtactaaaaatattcgaaagttgggttgatcatgtcatgcctgagagtgtatgctgatgttggcttccctcgcgaatctttgcccatgccacttgagcaaagtgacgatgatgcttaaactactactgttattctgtctcaaactatgacagaagaattaaattctgttcaaaatgacacaaaatatttagggaaaatatatgtgttcttagatcaggatgatggagaagtacctctgctaggactgcaacagagaaggatggggaatcagcaggtttctgacactctatgttgtgctcttaacttgtcgacttgtttctctttgttgtactaacctcttgtctttactttttgcaaataatatgagattcttggctactatggcatcttgttcgaacttaaagaggaagcttttgacactaaaggaaactgagcctttggtaagggaagtggttcaaggtattcctactgccactgctgctttaaagaagaaggtcagaaagaggggtagaactgttaatgccactcttcctgctcacgactctggtagggagaaatctaacagtgttggtgctaatgagagatgtctggttgacctctcttcatattattcaaaacatgttgttctgaacttgggtttagacttaatggagcaattgcgtgagcaacgctcctacctccttgcaaatagtgaggccttgattggtgctagggctgagaacattccgttgtaacggttggttagcaccaagcctcca

SEQ ID NO: 126363 - DNA, 973 bp, Cannabis sativa
agcaaagaactatccaatcaacccaagttttaataaaaccaataaaatttaatgtaagcccaaataaaagtctaacataggcttcattttcttagcaggaaataggctttcaaaagcactcaaaaaagttacgaaaaaaagaagaagttaattttacctgtctaataaaggaacccgtagaaagagccattaatgatatgctttatttacttttcaataataaattattaatgtgtcatgtgtggtttattatgtttcgagtaacaagttattatttatgacttgtaaatttatttttaatcgttatctatatttttttacatatatatatttttaaaccatttatatatatttggtaaaattgttagtttcaacgtatggaagatcttcccaaattctagataatttcaaatatcaaaatagtagtatattgcacggactaatctttttatttatctcaataaaatgaaacacttcattagacatctgccaaacacaaataaaaaacttacacaaattcaattattctcatcacactcttgctatatgcatgagccattttaacaaagttatgaggaattaaatttgttgagtgattacaaaaaaaaaaaaaaaaaaacttaaagacattgagacaattataaagcaaataattttgcaaaaccgttataaatttcgctaaacaaaactctttgttgttaataaacttaacaaccttcaacatcattagtaacccagccgagaacagagttggagcctatagagaatctttgtagcctctgcaatcggtggagagagagtaccacaagccagggtagtagtaggatccacttatccttattccacccaccacaaggtaacaagagcaggccgtcttaaacattttagaggccctgttccaatcttaaaaatttggcccttaataaaaataatagtataattaaattctaagttcaatttttttttatttatt

SEQ ID NO: 126364 - DNA, 1160 bp, Cannabis sativa
  modified_base (955)..(970): a, c, t, g, unknown or other
tggagggtgggaaacatgtttatgataagaaaatgggatattatattcgtacctaaaggatatataaagacaccttacttttaattatagaagcataaatactcaaagttttaagtttgtaagcgacataaacctaatgtttatttttagtggcataagtacttaatgttcaaaaaactgtaattttcctccagctttgtcagtacagactccgttttaaattttaaaaaaatatttagaaataactgatactacatatttctgtctagacccaatgatctaaaaatttagaccttatatgtggtcagtttaagaaaataatagagtatgtactgatgaaattagagaaaaattacagttttataattaggcatttatgccactaaaaataaatattaagtttatgctaattacaaacttaaaactttaattacttatgccactatttactcaaattaaaaacgtgagtagatatgatttttgccttctgaattatcatcatatctatcccacttaattacttttatgttgttttaaattctctatcaattattacaactttgaaattttgctcctatgtaacttaattgatttgatagtggtaatttgaaggaacacaatttgtcaattcaataataagagtataattttgtaatgttgatactactttgaaatagttgcaagtaattttattttggacactaaagtacgatttgtcaaagggcatttggaataaagtatttaaaataatttaattatatagaatattataaagaagaatataatcgtagagaaatgtgtaaactatatttagtcgtataggataatatataattatattcccattaattgaattacattatttagtatgtttttttgacgtattgtttaatgttaattataataaaaataaaataattatttattaaagaaatatatttattaattagtaaannnnnnnnnnnnnnnnattttttattaattaaaatgaacttttctatatattttatcactatatttttttatttttgttcgcttaatattaaaacttataaaacttaaaatgacatcatcatttagtggtaatagtttaaggggaaattttttatctacttaacaaaaatcaaattaaattatttttagaattttttcttaacact

SEQ ID NO: 126365 - DNA, 751 bp, Cannabis sativa
gttctgacaggttggcacggtatagtcacaatcgggtatttcgggccgaactgggttagggcccgaaatgcaattggattgaattaattggcattttatgtgatatttgataatcataaatttaattgggatttaagtatgcttggaatgacaaaaacacccttgtgagggtgaatatgtgtgctttggccctaggggcattttggtcttttgacctttaagatatactttgattaattgatttttttggggagaaaaaggaaatgattttctgactttttccttcccatacccgaacccctctctctcaaccctctcttgaaatttcaatttgatttttggtggattgcttgatttgaagcttgaatttagaggatttcttttgagtttgggattgaaggaaactctagctttatttgaggtagctttctcagatttttaatcttattttcttactgaatttttatggttgtaaggcatggaaaaggtgattttgatcttgtagttgcatgtttgtgttctttagttgatttgagcatgtttttgcataaactttgtttgtatgatgctttggattttggttaagctttagttgagattttggaagtattttctagcttggaatcatctgttcttatggagtttttgctgttggaaattgtttgatttgttggagatgaagctcttgtttaagagcttgaagctgctaagctaagcttgatttttaggttgttggtgcaatctgattttt

SEQ ID NO: 126366 - DNA, 695 bp, Cannabis sativa
cacttaggtctacacagatgaaatatcgagaagaacatagcacttagtaaagaatacattatagcttcttgactccactgcatgtgcatccattgcatgtacatgatggcctgtaactggttagttctttccatatagttttgagtttggtaaagtacatgcttatggtttaattttcttgattaaggttcataagatcttttcttagattgtatatatgtggactatttttctggtgaaacctaacctttaaatcattccaaatagaagaagcacattcatcataaaggatacttgaagaaatttcttttgacatagagtttaaaatccaggaaataacaatgttattatttctataccaagcattataaagactttgatcagaaatagaaggcttaggaatagaaccgtcaagaaaataaatcttgtttttcacagaaatcgcgagatgcatagctcagcactaagagacataattgtcttgtcctataagtggctgagacaccaatgcatttcctggattatctccatggtgaaggaagtaaggacttgcaggatcctcgagtggatttttaattggagcaacttgaagaccttggttgaattgaccaggaagattcccaagatcagtagtgacaactggaacttcggtttgattatcatctattgccattgcaagaatgcaaaggacaaaa

SEQ ID NO: 126367 - DNA, 1486 bp, Cannabis sativa
  modified_base (1249)..(1253): a, c, t, g, unknown or other
ggaggaaatgatgccccaatatccccttttacttgtcttttaataaatgctcaacactttatcttgtctcgcagaaatgaatttcgaaggtctcgtccacaaaaagggaaaaaagaggttgaccatctcagaggctccagcagatgtcgatgtagagcccccaaaaaggccgaagaagactactgctaacaagaagcaagcctcccagaccgctaatctcgaggtccctaaaactgagacttaggatccaatccctcctccgccccacaagtactgacgagcctattcccatagcgactcaagcttctgcctttacgagccaagccctcaaaactctgcctgtcgaggctgggaaagctagcctaaaatacactactgagtttggtgcggcatgttcgcatcatttcaaggctctccttcaccataaatgagatttaatcaataatggggatttcggggagatgcttacaaggagtgtatctaacaacctctcggtaaattcctttgcccttatccgctcaccctttttttatccttcaaaatactcatgcattttttttttttttttgatttctatacatctttcatttcctttgtttcccaacgacgaggcatggagaaaataaagtatttgaagagcgagatccagaacctaataggctagcgtgagattatgaccaagcaatggaatgatgccaaactggagaatagtcatcttaccaaagaagccgagaaggcgaagaggaaccttgaggccaaacttgaagtgctaagaaggaggcaaaggacaaggccaacacgtgccagaaactccaagaggaacttgatgtagccaaggtaacgctcaatgggaaagaaaccgaaaccatcgaacgatgcaatgttgtgggccttcataccatctaccaggcctggatggaaaatccagagatggatacaagtttcttaggagattctgaggaggaaatccttgccttctacgagaagacgaagaaggaggaagaagatgtcgaggcagcagaagaagtagaatggtccaagtctcctactatgtagacttggtttttatttattttttattttatctaggtaaatggccttaatgctgagacaatggtttgccccttctggcactttttgtaaataaaaatttacaaggttggatgaccaactttgctattgaatgcttcgtacttttatatttgaacttaatacatctgtttgtttgcgtttttattcacaacttaannnnntatattttgatcaaatttaaaataatttagggatttccattgctcatatttttctttgatattatttcaatagttagtgatctactatgtgtgcgagcagttattatctgctatgctttatatttgggagcagttattaatactgcttcacacaaaaagttatagtttattttaagcaaacttgaatatacttttattgattattcactttgtatattttttattgcttatat

SEQ ID NO: 126368 - DNA, 1406 bp, Cannabis sativa
ttttactattttagaaaatatagggtccattttgtcatttaacaaaacacagggttcaatctgtaacttttacaaaacacagggtctaaaatggtatttacccttttatgaatctacatttttttacgttgttgataagggaaagcaatgtagaacaatatattttctgaaataaaaacaagtgaaaaacttttaaaaaaacaaaatctgtaaaaatgtaaaaaggaaaaaaaggaaaaaactccaattttaagtattttgtgtaatttcttaaaaataaaatcatatgttttttacaattttacagattatatttttccgtttcacgattttttttaattatatttatacaaaactttatgaaagcaatttataatagaaatataaaagcaatgagaaaagcgtgaaagtaacataatataatgttgttgtaagaaaaaaggtgacaataatagatcgtatttttgtaaaaacacataaatctgtgaaaatattaaaaaaaaatgtatatctgtgttttttgtaatgtattgtcattggtataaatgaaaaaatcccaaatttaattgataagtgttttttagaaaaaaataataattaattgataaatttgataaacattatatctttttatttcttttcattttatgtgatattttagtgtattattagctgttagatcatttgattgcatcattcgcacttaaatcgtacaatgtcttcttcttcacctttttttttttggcgggagagaaggagaggaagggatgagaagagaactccaaccctactcacaaatgtttatcaatacccgaccggccatgagatttaatggaccataaggaagaaaaaaatttgggcacttattttaaaaaaaatgtaatatttttcaaaatcaataaaaaatttgtaatttgaaaaaggaaaaaaaaattttggcccgaaagttagatggaccctaagcacagacttaacatgttgatgctcctcaaggtcgatcctgcctcgcccatggtatgaatgcatcaaatgaaccccaattgagcattaggtgcataaatacccttgagaaatgaatgtcaaagttggctagactaataatgttctcaaaaacttaagtaagcactttgtcattagaccactcaatcggtaaacatcattaaaatatgatttttttttatttttacactttcaattagtttttttttatatatatttttataaaaattcacatgtaaatccatataataactattcgaacaactaaaattgtaaccaaaatctacataataatttacataaaaactactaaaacaacccaaatcgtaaattaaaaaaaaggttaaaaattagtatatgatctaaaatattacatccaatgccaatatagcataatccaatatcaa

SEQ ID NO: 126369 - DNA, 548 bp, Cannabis sativa
tatgtatatatttatagatagagagatagagactagagagaggaaacaaaaagaaaatataaggatggatataattatatataggtcatagaaataaatattttggggttgaaatcaaggcaaacatgcagaaacattgatggtaattatatataaaaaaaaaaaaaattaataatttcctatatatatatatactactcgagttctttttattgtcttccagaagagctgcaaaagcaataataatttatgcatatatagtcaaacaagcaagtgtagtaaataaaagcttatcaccatcatcattatatatataaccttctgaatatatatatatatgtgtatataagtacgttacctaactctctggctatactactcatgagccatgaggtgctttgctttccctcgtgagtattttcacatgagctagctagggtttccatctcttcttccttttcttactctctcttaattattggtaataattaatgataataatataaaaatgaatttgagttaggaataattaatatgtagattttata

SEQ ID NO: 126370 - DNA, 852 bp, Cannabis sativa
  modified_base (169)..(179): a, c, t, g, unknown or other
gtgttttttaaaaacaatattgactaaaagtgaattggtttttaaaacagaaaacaaaattttgttgttttcaaaattcttattttttttaacttcgttttcttaaaactgttttcaaaaaacaagaccaaacaagccaaattgtttttaaaaaacaattttctgtttnnnnnnnnnnnaaacagttttttagttatgatgtcaaacatgcactaaagctttctttctctaaatttgagtttcgaaagtttagcttctccaaatttcaggtttatatgacaaaatgcaacaaactaatttgaaaacgtggaatacaatctgatttgggacaggtctattatgcctaaacacagtgtgattatatggctgtccctttgagaaagactcccacaagggatattcagttttttaattttgatagaatccaagattctacttatttattgtgtggtttagtgaatgaagggcacaattattcctgctgtagcattcactaaatgaaccttggatgattgtgccctgtttaaaatatatatataaattaattatttataataaagagtttggtccgatttaactgttaagtatttattatgaaccgcaattgaatattacgcggtaaacggtttggattaaccagatcaccaaaaacggttctccaattacaatttatagtggttcagattgtcgcggtccaaatttaaactgtgattttttgattttgatgaactaccctaacgtatataaataaatacggtgtatgtaaatgtccattcaaatctatatatatatatatatatataaatgggtgcactcttaatgggtattacccatgaataggtaaaattagaa

SEQ ID NO: 126371 - DNA, 699 bp, Cannabis sativa
taatatttatttaattagaattaaacaagatattagtgagaattaattaattattatttatttcaaaataaataataaattttatttaacaaaaaaaaaatcaatttttgggcattaaaatatagccacatgtaggtgatatataaacgttgactattttattaaatagataatttaaaataaattaatcatttaattaattaaatattttatagtataagatgtttattaattaaatgattatttaattaaagataatttgaattcagctattcagtaatttatttaaatttaaaatttaaataaataattatttatctttattttataatgttaaaaaaattatatattgtttacatcaaaagtaatcctaatggcgtggacatcaatatttgacacgtggcaagaaggaaaatattcacgaagtgaaggaactcgagtcatagcaatcaccttaggaaagggtccctagccctggacctaggttgacttcgaggctccgaaatgggtaattggatcttgccaaattgtttccaagctaccatcctttagtattcagagtaatgaagacatgaaaaatccaagtccaaggcccaaaaactaaaaatacacgaaattccacctcgagagtcaacctgtgcgcctaggatttcacctagcgccaaggttgacattctaactagggtttcaatttttagg

SEQ ID NO: 126372 - DNA, 622 bp, Cannabis sativa
  modified_base (590)..(596): a, c, t, g, unknown or other
aaaataatttccaacaatagatgcattcattgcaagtattacaaaaataacagtcgcctttcgggcctaattaggcctacgtccacgaactaattatacctaattaattagctttaggtgtgagtctaaaatgctcctaaagatagtgtacctatgcatttacttgtgcataatgcaactgatcgaagaaaatgtacatagatgaatatctcgaagacaattttgtgtgaagaaaacataacattcgaaggagaaaaatgtccaatatgcctcggtcatatgtatcacctagaatgtatgcatgatatattaatcagtagacttaataagtgtcctaattgtagatttatatttatataatcattttatattaattgtaaaataaatgtactttgatttaaattaaatatagtatatagtttttttaatagtataattatttgttatcatatatattcttcaataaataatgtatttagcttaaattcaaacattaattatgtataactttagattgtactaagcagcaatggcactcatttattattttggctaattatgatttttccctctgaactttgacatgtacnnnnnnntgtcccctgaacttttttggccgtta

SEQ ID NO: 126373 - DNA, 981 bp, Cannabis sativa
taattggcaagccacaacagaagtcggaaaaacttttggactgggtgttggtctgaattgcaactatgtcctccaatttcctcttaggtgggcatctgaaacatagcaagtggcccggccatagaaatccagtgagttagaaaaatttgaaagacttcaatgcataccgaccaggctgcaattcaacttttaaacgttccgacacttgagtgatactggaaggattggctctcatccaaaagccaaaaaaggaatagaagaagaagagtgattgattctcttcctgttggattggtattcttttaaagggatttgtagctatagccctataaatttgttattggtaatgctagtatcattctctgtttagaaatgtattatgttaagagaaaaatgggtggaataaagaaggcaccctatacttaggaacattttttctaatatggtgtattgccaatttattatagtataaagagatgattcattgtaacttttttgattggttgtgcagtttttcattctgtattatgttgaaacaaattcttatagtagtttatccattctgtataggattttggtttgtgattttttcatttctaaccatttaattgaataaaaaaattaatttaaaaaaattgtgttattatcggaatgatgacaaccaaatttcaaatacaaaattcatagtttaatagtcaagcaaatactagttatttctgttataaaattattgtagatatactaaaatatagaaaaagtaaagtagatggagagagaaagtgaaaaaaagaatttttctatttaataaataagaataaaattaaaagaataaaaaattaaattaatataataaaataatttttttattaatatacctaataaacactaaataaattatcattattgttaattaattaaggagaattactttatatattattttttaggttaattatgatttttgctccatgaactttgaca

SEQ ID NO: 126374 - DNA, 616 bp, Cannabis sativa
gaatactcgcatttgtcatctctcaaataattctctcttttaccagttaaattgtactttttggtgttgcgaaatatcagtaacaacaatttgctcaacaatatgctttgagaggttccaatagttgtcattttaactccaccaaattctataagtgagagcaacaacggtcatcatataagactattttatgcttttactgaccttacttcgttgaatccacttgattaagtcgcccactatctaattgagtcgaggttctccaatgcagccacaacttcagattttaaggcactctgcacttttatgacattgaaagaataaggtagtgtttggttggaggtaatgaaatggaatggaatgaaaaggaaataatttcattctatttctttgtttggttgcatttgaaagtattggaatggcattccaatagaatgctcttttcactattttagtggaataactattccaatttttttttaaaaaaggaaagacaattataatgtaacaagaaagaataacatattgagattatggaaggcacagtgctttgaccattccaaaagtgttctatcatcttatataatatatgatgatctcactgcctctgttgtct

SEQ ID NO: 126375 - DNA, 951 bp, Cannabis sativa
  modified_base (27)..(29): a, c, t, g, unknown or other
  modified_base (854)..(867): a, c, t, g, unknown or other
actaatcagattgtaaagagttttatnnngggcataaaacccaacattcatgtccattagtggagcaagttttttgaaagggccaaccttttgaaatgtaatatgtcttgatggaaggacatgggtatataatgctctttatggtaaattcaggaattaattttggttatagtttctataaatgggctgaattggtggaagggacaaaatccaaagaaattttctattgatataaaccacgggtgcaagggcaaggaagcacccgcattcatatggaaccttgaccaaacactacaacaagaattttgggagccagtgagacaatcagatcatggctttaggatgacagtttctggaaagagatagttgttatcccatttttcgcactatgacgtggcaacacatattggtgacacatggctgctattttctacatctagttgaagagatattccgaaaagacctcagtcatacatttgtacggacaaagtctgtctgatcaagtagggcaagggcaaatgatccgaacaacaaaggaggtcatttctctgagtaatctatcaagacttagcaacttcaagattgatgtcgtgaagctctcgagcaatccctacaatcatgggatcatatcaaaggggtatggcaagctgtctgaatccctcaatttatgtattctaaatatgtaatttatgttcttaccaattatagatattgtaggcaaaagggaaaccttccatcatgcatttagccctataaatagtgatccatcctcactgtaaaaggggtcgaaataattacttcaaagagatctaagagaaaatactcagagatttcattgtgagagctttgagagnnnnnnnnnnnnnntctttgttctcgagttaatacaatctaagggaagtaggctatactaaaggggtcaaactgttggaagttattttaccaggaact

SEQ ID NO: 126376 - DNA, 664 bp, Cannabis sativa
aaaaaaaaaagaaagaaagcaagcagatgaatggagaagtaatctttcgagctaaaatagaactttgggtactgggtagttaaaagatgacaacacaacataagcagcaaattcagaatggaacaacatcatgaaaacaaatgtagttagtatgagaatgccggaataataaaacaacctaattaaaggaatatagcagattgaaaattaacatcggtcagattcatactttgcagagtgctctgtattctttctgaagtcgcttgacacatgatttatctgccatctcttagattaagctgactacagtccttgccaattgaactcccaattactgctaaattattagctgctttgctcttctgactaacatttaaaagtaaagagattataagagtgagatgactatatctatgaatggaaactaacaccaaatcaaaaggtataaaaaatttaacagaaaattaacccaattctcaaccaatcaaatagccattccaattgtgttatcatacatttttcaaatagtaacacctcaacaacaaaattacaatctatgaaaactgaagggctaagacaaattagggttttatgcttttctggtgaaacccagtcatgccaatctgaacttctgaacccatcagaatatatatatatatacaca

SEQ ID NO: 126377 - DNA, 1711 bp, Cannabis sativa
tacagtttttatattttcttatatacaactgacatttgcaaaaacacggtttttcaactcacaaaatgactactcgagcaaaagttggtatatatatccatcaaaattcccaccagtgtcaaagcaacaatgcaatttgagaaatggagacaggtcatgtcatacttatactctactagtaatgagaaaaatgaatgagtaaaaaataaacaataccaatacaactacaaattcaaaacctcgtgaatacaaaaacaatgtttcctaaattttttagcgcttcctttacacaccctatgttcggtaagaaagaaagaaaatagaagagaaagaaaatatggtagaaatagaaaattaaaagatcatatataaatatatacatatatttctctcataaaggaaaattaatagatcagaaaatcactatatcattcctaaaattattaatataaataccgttttaataaatttaatttaatcttttgacttatatgtgttaatttttttaagtataattaacttaattaattactaacagagggatatcagttgctttgtccttttcagaacagaataaggtgggatcaagaagtatggggaagactcaacataccaaagaacaactttattctgtggttggccgttcagaacaagctaaggacaagggatagattaaagaatttcaagatggtggacaaggatgattgtgttttctgcaatcaacaccaagaaacaaatgatcatctattctttgaatgtaccatctctgcggaatgcttaggtgaaatcaagcaatggctgaattggagagcacaatctatcaacctaactcaactaataaggtggatagaaagatcaaaactatcaaaattcaagaaacaggtcctggcagccgtgattgcaagcctagtgtatcacatttggtttgctcgaaatgacaatctttggaatgaggtgaatacaaatgctatggtgatagtgaggaagacaacacaagcagtaaagacccgaatagctaaagtatgtccaaaaagagttagcagggaggatagtatctggtttagttcattgtgaattgatgcaactaaatttcaatgtacagttttaattgatttaggtccctttgtgggatgctatttgtttgtataaatcagattttgggcaatacaatacacccttgttcatcaaaaaaaaaaaaaaaaaataattactaaaaccaatttaatcacttatatgttgtttgtgtgcatttttctctctaattctctttccaagataaaaaagaggaaaattagtagctcccgccacactacatttttcttcacttttctcttctctccatttttctttcttaccaaacaacttaattttatctactctcacttttctctcatttaatttttttactttccttccacttttttttctctatcaaacattgaattgaccgtttgtgacatcttgccctagaagtgtttattgaatcacattcaatagatttggttttggacccaaccgatctaattaaatcgaattgactcaaccgatgtgcattgaattaaattgaatgcataaactggttgtctgttgaattagattgcatctgtctaatcttttttaatagttaatttaaaactaatttactattattaatttaattccaattaatatttttatggggttagaattataagaagttcattccttaatt

SEQ ID NO: 126378 - DNA, 1609 bp, Cannabis sativa
tgacccaactccccatgaagagatatgcgacctgcgcttctaccaacctcgtgtaccaaatctaggacatgagcgtggcccttactgcagtaagttctcacctttcgaatttcttatgcctcttttctttttttgtacaaggctttaacttttccctgttgtctactagattactgtagaggtcggtcgtctttcaaattctctgatcaaccacgggtttaccatgtccaagtttggtggtacgaaggaggtgatgaagagtctctgggagtcggaggagcagaagcaagcaatccgggacgaagcccaaaggaagggggccctcattgagcaaaaccatcgggaggtgttggcggggcagggacaagatcattgccgcggccgggagggatcttcgagattccaaagaagaagtccaagaactcacttccaagttacgatctttggaggagctgcaccaaaatgacttaaatacgacagctagtttatctgttgaagtgaaggagctccgtgagtttaagaaacaagctcgcaaggaggcatccaaggctaaaagggatgctctcctgaccctcgtcacctgtcaacactactcaaagcgctttgatgatggagtttttatgttctggaaggttaataactttgacctttgtcttcctttctaccccaagcctgaggaagttttggcccgtttttgggagaaaaataagaggcttgatgcggtactggaggagtgcaggggtccttgtcttcctccccgggctgactaagtgatatttattattttttttggataatttctacgacttttgaatttatttagccttttactttcttatattcatcctgttttttgaccatatgctatgccttaatacccctctaagttacgtgaaaataaatttttaggtcacttagctttgaaaattacataggagattgcatatatttgtctggcataggttattttacagaatataaacttttattttaactattgatagtacttgtggaggtggtcggcattccaggccctaggcactgtggatccatccattctttttagcttataggtctcggagcaaattttatcctctagttcgtatggcccttctcaatttggcccaagtactcccactccgggttcctgggtggctagaaagacccttcgtaggactagttcgccaatggtgaattttctgtctttgacattggcgttgaagtatttagccacctttctttgataagcttccatccgtatttgagactcatctcggagctcgtctatttgatccaacactttttgtaaaaaagccttgttcgttgtcggatcatacgttgcccttctgtgagatgggagcaaggtttccaccgttaccatagcttcacattcgtacaccattgagaatggggagtgttcgggcctggttcttggagtggtccggtaggcccataatactcatggcagttcttcaggccagttgtttttgcaggccagcaactttttctttaggatgacctttagtattttgttaacggcctctgcctgtccatttgtttgcagccttgcaaccgcagagaagcttttgacgactccgtgttggttgca

SEQ ID NO: 126379 - DNA, 1494 bp, Cannabis sativa
  modified_base (1282)..(1293): a, c, t, g, unknown or other
ttgtaacccgatctttacattgggctgaataaaatatagcataaaccaatcaaaccgaccaacgtacacccctacatgtcaccatacctcactgtcctgttatttgggtagataatcaaagtgccacaactcttgtagcaaacctaatttttcatgctccctcaaaatacatgaaaattgatatgcactttgttagagatcaaatagttgtcaagttgctctctgtgagatatgtccttattctttatcaagttgtacgtagatgttcttgtaaaaccattgtctactgatcgcttcaactatctcaaatctaaagttcaaatggcttcaatcccttttcgtttgagggggaattttagcctagaaaactaaatctaagtaattattgttagttagttttgtaagaatttgttatttgtatttatctgttatgagttagttagtttaactaactctattatcttaatttcttgtatcatgtagcttataaataaaatactactacaaaagttggaattctcgacggtcctaaaaatacctttttggggggatcgtcactaaaaaaattaattgtttaaaaccgttgggaaaaattagtattctcgacggtttataacagtaatttcaggaataggcgacggttttaaatgaaattcataaaatttatttggcccttataagcgaaagttcaaaatcgtcgggtataagagcccaataaattgttacctacttctcgccacatttctcacgtgcccacctatttcttttctattttccacatgctcatctatttcttctcacctatttcttcttcatttccacaccctaaaacaaaaatcttaactctccaaaatccaatccacgcatctgcaccactgccctcctctctcgccgtcttcctccctctctaaatctccgtttcttctcgtctctctcgtccatcgatctccactcaccccttctctcgtcggtcttcctctcctcttcgtcgcatacgttggaccaccaccacttcctgttagtgtccctctcatctccgtctcatacgtcggaccaccaccacctcccgtttgtctccatctctctctttctctctctgagcttggtataaatacatttatttatttatatactttttttatatattatatatatttattttgttattgtataaatttaatgtgtttttaagttagttgttattgtaataaaattattaggtaaaattatacaactaatgctggaaaaaaatgacagaaaaatctgtattttttttcttttnnnnnnnnnnnnttcccgacggtttaaaaccgtcacctatatagtgtagggcacggtttaaaacagtcgcctataccgtgttataggcaacggttttaaaccgtcatgaagtccacattagcgacggtttttaaccgtcgcctattttgtccgttttacgacggtcgtataggcgactattatagaaattgacgagaatactttaaacgaatg

SEQ ID NO: 126380 - DNA, 1014 bp, Cannabis sativa
cataagaattggggtaccagtggagaaaaaacaagtaggtcagcctaggaagagcaatgcaggtagaagactgacgaagcgtcgaccgtttaatggtcaggtgctagtggaacctcgtcattgttcgctatgtggcggtgcagggcacaatagagctacatgtaaagctcgagtttgaaccgtttctctaatagtttaatagctatcaatattatatgcatatgtgttgtattgctggttgctatttagtaggattgtatcttgaagatttaacaataggcatggatatttttattgtgtttgctatattgtgcgatattttttacgatgtatgtgcgattttatttcatatttcatcaatgctgttttgtttgacaaaattcattttttgtacgatttttatgtgatatgtgtgcgactattgtgcaatttcgttttacaatattatatattttttgttgcatttttttcgatgtctttgcaatattggtgcgacatgttttgcgagttatttgtctttttcaattagtttttttttgaaaaagaataacattattttttgcgatgtttatgcgatttatgtgcgacatttttggcaatttttactggtcacatgtctaatatttaatattgtctaattttcacgatgtctatgtgatttttgtgcgacattttttgcgagttaattgttttttttctgcaaatttttcttacaactgttaaattatttgcgatatatgtgcgacatttgggcgattgaacttttcacaatgtaatatatttaatatattgcaaaagatcatgtgtatatatgaagtacgttacaaaagaactatcatgtaaagttctggtaaaataagtccacacaccacgtatgtctaaaggtgagcatgttatcatctgtaacatgctctagcgaatggtccaacatacagtgctcaatgtattcaatggcaaacattccacaatcgccactacaaattaaaaaattagtaaatattagcaacaattaag

SEQ ID NO: 126381 - DNA, 1778 bp, Cannabis sativa
tcggttgggattggatcggatgactttctacacacccctaaataaagtatcaaatattacaaaaacaattgacttaaataaatttaaatttcctcatgtttgtcgcaatcctttgtaatgcactttgccaatatgaaatctgaacacctctaacggtgaactcccttcaacttttgatgagtatgtgcttacttcattttgaaataagtcttggagaagtctttgacttgttcaacaaaactctttactatattctaagaattgtgaaagaacaataatataaagactaaaacctaacagaatactttaggttttcacacaagaaactatcttaatacaaagataaaaaaaaatgaaattaaaagagttgagaacgtttaattattcttataagtcctatttgcagaacaaagatattttagagatagccacaaacatgttttcaaagctatattcatagcaaaaataaatcaattaagcaaattttccataaacaaaattccttctattttattgaaactaacctaaatgaataaaatgagagccattaatagaaaattaagacaagaaaatcatattgacaaaaaaaaatgtctttgatagattttagttacacacataatatttatttaattaccaaaactctatcttgagattatggcttggtacctataagtgtaatatgaattcctgaaatcactcacaaaatacacacaaataagtaatgtaggacataacacacatgcctattactgttaattttgctctatgagtcatatcttcatttaatgaattttgtccaatttacctattaatattcattttcttttgagagaaaaaatttgagttttttcaaaatcaaaattaaaggttcattaaatgtgttaaacccatatgtacaatgtttttagcatattccaaattcaagattttgataatttctcaattattttacaattaatatgttagttcaatatctttttctattcaattattggatgagaaaaattaaaattgggaaccagtttccagtttggtgaatctctgaattgtttcgcgattggaattggatgaagaaggataagaatggcccagcttatggaatcgatagagaggaacgaccgagcaacaacccatttcagcaacaacccgtcaacccaggctcagccactctttcgatcaacagggccctgtgattattcgtttcgtttcgatcatcaacccagaaatcaagaaaggggtgagatctggatcgtagagaaagagagcgacgcgatctgagatcagagatggtaactcttgagactccctggtcaatatcctttcttgttgttgtgatgacctccattgccattaaaaaccataacagttgtttgaattatgaaaatgccgatgaaagtcaagatcatgaaggccagaaacttagccatggctattttctccgagaaaaaagagaaaagctttgaaaggcagagaaaagcttttttaaaatcaaataaatattaattttttgtaaacgacttgatatgcctattattgttaattttgctctatgagttatatcttcatttaatgaattttgtccaatttacctattaattttcattttcttttgaaagaaaaaaaaaattgagttttttcaaaaccaaaaataaaagttcattaaatgtgttgcattaaatgtgttaaacccataggtacaatgtttttaacatattccaaagggtaaatggcggcaaaacccccaatactttggttttagtttcattaaaccccca

SEQ ID NO: 126382 - DNA, 962 bp, Cannabis sativa
ataaaggggtataaattttgatataggttgtattattagggtcaaaaattgaaatttcccaactaaaaatgctttaagtcaacatcaattatttgtttctccgactttgtgtattcgacttttcataatggcggatcccaatcgattaaaaatttctatttaaaatacatcttaggaaatcgcataactataattaaaaataattagaatcaattcttaaattatgtctcctccaattattagagagctaactatataagaaactgccaagagaatttaaaatagggagtacatataatgtaagccacacttaaaaacaattcttgtttggattttgtattggtattgatgggtatcctttaccaacccactaagcagtttgtgattgattatcaaaagcctactaatcagggctacaaccagaatggtatgccatgctgggatgttggcacttggcaatgccatgtcctatgtggttcattttatcaaagttaagcataactttgatgtgtgtgcgccacttttttttatttgttttgtgaattatataccatataggcattaggcactaggcagggccatatgactgaaactcactgtgtccctcaacttatcataacactatttaccatgatttgatgtatttatttttacaaaaaaattttacttataataaatgaattttatttagagtaatttgcggtataaatacttaaatttattttccagttataatttaatacttaagttaaaattttggcggcataaataccttccgttacactttcagacattttgtaggtacctcgttgttatcttgcactgtacaccaaatggcatgccacatcatcttattaaatagttacctaatattaactattaaagtaaaaatttaatttgatttaaaaaatatatttacatgaaattaatttattgttataaatattaataattatgtggat

SEQ ID NO: 126383 - DNA, 1730 bp, Cannabis sativa
  modified_base (1677)..(1679): a, c, t, g, unknown or other
tgaaccaaatgacatattaaataattaatgaaaataattatgtttctttattgataattgaattgcaaagattacattgaaatagagttttatttagagcacaaagcctaacataagttccatatcgtgagtaggatacctctgttcatactctttcaactatcgagaagcatatgctattacttttccagcttgcattaatacacagcctagactcagtcttgaggcatcacaatatacaacaaacttttccttagtagaagtaaaagtcaacactagagcagtgatcagacgctgctttaactcctagaaactttttctcacattgatcagtccaagtaaactttaaattttccttgtctaaactcatatacttgttgatctggtcataaacatgtgcatcttgtttctggtactacctatgtcaataaggtgcatcttgtttctggtagtccatctcgaaagaactcccttctgcatttgcactcgagggccaatctttgtctagcctgaggaaacctttgcacgcctctgttacttggtcaagtgttcgaatctattatgacatagtcgcggggtgcttaagagacctttttaatcttataaaactttattcttctttatgggttattttcgaaaacatgaaaagagatatttttatgtcagtaatagaagtccaaactcgtatatttgttgatctggtcatttaggggccttagctggtgatctgggctggttccctctcgacaatgaagtttaccccccaccgtctatacaaacaagaacaaatcccaatatatctaaataaaaaattttcatttaatctattactaatatatttttttgttccgtacttttttttcttattttatttctatattattttttaacaacctttatttatagaattcttttagctattaatttagtttataatattctttattatttattagcattttattgtacttttagtttcaattttcttatggagttccaaatttgtattttattaatacacatttttttagtttatgttttttatcatagtaattatattatattctaaccaaatattcatattttaaaattttagttatcttttattttaataataagaatcttattgattatatttcacaaatttttgttaataatcgttttcgaaagttattgtatttaatttgatgttcaattgtgaaaataatttgttatttattagttctctaaagtttttcttttaaatccttttattattgtactttaaaccttttaatctattcattttatggtgtataaaagaagttttaattgattatataattttaatttatatgttgcttacggaatttcgttttgtaccataaacttggtggttttttgttgggtaagttgtgaaattttgttcaatgtaatttgtttggtgctatatatagtagtttgtttatgtgatgttttggatttgtcctaagaatgacgcgaggcaatggcgctactcaatttacttcacaaatatcaaagatataagcttttcttataaattaattttttggtatgttttcaactttaaataaaaaaaatatattttaatttaatattatcgagttaattaaatttttatatatttatcttaaatatgttatgaaataatatgaaataatataaaatagatgagannnaagaagaagaagatgaagagaaaaagagaaagtgaatgagaatttctgagt

SEQ ID NO: 126384 - DNA, 1095 bp, Cannabis sativa
ccattgtttgattgtagaaatggcaagtaataatttaaatgtgaccattttggccacgggagaaaaagtatcaaagaaatcaagtccttcttgttgcgtgtatccttgagcaactaatcgggctttgaatctttctacagagccgtcactgttgagtttgattttatagacccaacgacatccaatggctcgtttatttggagggagtggaaccacaatccaagttttgttgttgcgcaaagccattaattcagaattcattgcatctaaccaatgctgaaattggatagcttgttggtaagtttgtggttccttaagagaggtcactgcaagaatgaaagccttataagattcggttagtttatgataggatatgtatttatcaatagagtgaggagtggtatgtttatcctgcaaaaccgagtggcattcaaaatccctgagataggcagggggttttgtagttctgctggatcgtctaggtgccactgctggtgtattttgtgcagtttctggtgtgttggggacagcagtgggctcaacttcaatgtcagtggcaccagaattttcttcctgcacagggacatcaacactaggaatgggagtgttagtggggggataatcatttactggtgtgtttgaaacatcagcagtaggcaaaataacagtaatgaaaggatcgacattacccgtgtcttcattcagctttgagaatggaaaaatatgttcatgaaataccacatttctagataaaaaaatctgttttgtgtttatatcatacaatctatatcccttcacaccttgaggataaccaagaaagatacaagctttagctcttggagcaaattttgtcctgttggcagtgagagtagtagcaaaagcaaggcaaccaaaagttttaagatgagtgtaatcaggttgtttttgaaacaacaattcataaggagttttattgttcaagttaggagaaggtatacgattaacaagataagctgctgtcattatacattcagaccaatatttgagtggtgtgtgtgcttgaaaacaaagggcacgagcaacatttaataaatgttggtgttttctttccgcaat

SEQ ID NO: 126385 - DNA, 1091 bp, Cannabis sativa
aaaattttagatagtttacaaaaatattggtagcaaaaaaaagtgttgtaccataattatataaaaataaaaataaaaaagaaaccttaataaagtatcataaataaatttatcaatatttctataaacatttactggagttaaacggtaaagtcgtcaccggaatgagacgatggaatagaaattaaaacataaaaatcatctatctgaaacatccaaataaaaaactttttaacaaaaaaacttttaaaaaacttgtagagtaacataatgaaattaagaatgtttaaatcgtattagtccatctgttttttttttttttaacaaaaaacatgagttttttacatgctaattttcgtatagatttctgtgattattttggctaattattagtaataattttttatttacaatcatttaactaatatatatattggagttcgtttttcataccttattagtgcaagttatttatatatacatgctctgtttttgtatttttagcaattcgtctccaccattgagagctttgatcctgtacaacaatggtgaccgaggttgctttttgtgtttatgatcatttagatatgtattgtggctatggtagctaatgcttgagattctgttggttcgacaatggtgttcgcataggttttttaggtctgttttttttttttcttctttttttttgcgcgaatggagttcagtgatgaattggttgataatcgaagtttatgtaggttttataggaaatttacccgattgattttcaaattttgttggatcgattgaatcttacgcgctagttttgcttctttttgttttgttttgtttttgattttatttgtaattccattttctgttacacgtgtattaattgtaaattaagaattaagatcctaccaatttaaaatctatacagttacttttttttttcttctttaaatacttaaattaatatgtctcacaataaaattgatttaatacaatatgtccattttaacatcttgattcttaaattagatgctaactatgtatatcttactattataaaagtgttgtaatgaggtgatagtttgaagaccatttta

SEQ ID NO: 126386 - DNA, 1171 bp, Cannabis sativa
ttaaaatatatatttggttttagttttttttattgtaagattgttttctaagtttgtttaatgattaagatttcggcattaagtttatgtattatttttcaaatctttcatgtttgttcctttaaacatttttgatattgtgaaaaatctgaaatgtctaatcttaagaaaaacaatgggagattgtatataagtatgatcaccatagcccaattcgattgcttttttggagcaactcagtatattactctgtttaagaaataatgggagattgtatttaagtatattactcagtatatggagttagtggtgatggttgagatttttagatctgggcattgtgatgctatgtgttagttttaaatttgggtgtagttggtggttttggattctcttcttaattttcttattttaatattttattagaatataaatctactacaacttaatattttaccattatttacactctaaaattagttcattaattccttcaaaaaaaaaaaaaatagttcattaattactattatttccatacttggttatataaatgggatgttttattactgcaaagtaatatctcaatttctattaatttctctcatttttttttctctttctctataggtttccaatttttgttttttatagattgaaagtatatatgtttttatgtatacacacacatctataatagaaggtaataaaagtaacggcaatcctaaaataatttttctcttttttactctcacgcaatagtattataaattttatgactattatccgtaaagcatactctattggtaatactctcattacaggaacagacatgctttgctgatatatagtcatctatttttttgttagtaacatgctccgtttttttttcttttttcttttgttaataaatttattatgcattgtaattttgttttgtgtagacgtaaaaaacaagaggcaaacaggatcatatatgtaaaaatattgtattagaataattttaattactaaatatttcaattatcgattcatggaaagtcttaactatataaatataaacctaaagtattacgggaattttgattttatatgcttaaataattaaaaaaatttattattataccaaaaatttaaaccataaaaaaactatatttttttttttcaaaacccc

SEQ ID NO: 126387 - DNA, 688 bp, Cannabis sativa
cccatcttctgaatacaatatatttttttttattgaaattttgcacacaatattatgatattatgtgaagtaccaatttaaaaatgttgaatatgaatcgttcctgattttcttgagctgtccccgctttgaagtgggacgactcatgaattggctctgttgcaatggatggcagagggttcgtagtacccaaagcactggagtgatccaatagcaaaggatttcgtagctaagattctagtattttaatttacaatttccagccaaaatttaacctttgaggttgagtgctttcttccattgtcgaagctttttgaattgatcacttgtcaaggacaacccaaaattcccattgattgtccaacaacggaaccttagacaaattggaaaaaaacaacaaatactagactagtagttgagtgctccttattttcagatcttgatggggtccgagcttcccaagctctatgcgttgttggggaactctgcaagggtcttaccaccttcttgggggaagacctatttatagttttttcttctacagtcttttttctctttaaaagtagatcatattgtaggaattttccttggtgaaattccaagtttaacctacaccaactcaagctcacagttaaaaacgacaaggacagaattgtcctttaaatcaattaatataatcaattcacac

SEQ ID NO: 126388 - DNA, 881 bp, Cannabis sativa
  modified_base (789)..(792): a, c, t, g, unknown or other
  modified_base (832)..(832): a, c, t, g, unknown or other
ctctctctctctctctcctccaattctctttgagaaaaagaaaaaagaagactcctcatattctctcataacccgacgccccttatgtctccaacttctaggattttttcttcgtctcgacgatccaagctctccacaatttagcagaattcattagtgggtaagctttcaaatccccttattcatttgttttctagaatttgccattattgtgttcatgcttttttaagctttttaaattttttattctctcattagatcgtaattttttcgcattatgatatgcatgatagctttaggatgtataattcatgatttctaatgaaaaagattcaattttgagcttcattttgattcttgactctttgagtcatgaagaacacgtttgagcctttgaaaaatatatttttgatccatagaacaccctacttggcctatggggtctgtttgtgaccctggctggcacatggtgccatctacggaagttggtcaattctggattaagcctagacccctggacgtttcttgcataggttagggaccctagctagcacatactaatgccttgggaccctagctggcacatatcttcggtcccaaggtaatggccattttttggacctcttttaactgtagcaaggactttattatggccttataagcctattcaacccttgtaaaatacttgattctcttaggaactctgtatggtacttcttagggtcagtctattatagtccagtaatcaacttaagactcaatgttcatcctgttggaaattattttacnnnnatctagatttactactatgtatgtttcattaacatcctantatgaattctaaaataatgaaatacacacataagggttcaagaaaacct

SEQ ID NO: 126389 - DNA, 1884 bp, Cannabis sativa
tctatcttaattacatttcttatcgcttattaattgactcattgtcgttggctaaaggcgtggtcaatattttagtgctttcattgagagcgaaaatccaagtttgctccttgccttaagatttatcagacacacaaaatggtggtgcaaactcgtagaggcgtggttgatcagagtgacccactgttagtagatcctgcattgcagactcctgggaatacaagggtcccactaggtaccaatcttgaacaaccaaacacgcaaccacctactatgggccaaggtgtgacatcccctctggttgggatcacaccaggtgtgcaagagactggaaacaccagttcggcagtcaatcagagtactcccagtactggaatcctatccacaactaatgctcagacgacaataggagatgatactgagattcagaacctccgcaatgctcttggactcatgcaaggtcacactaataccttacatcatgatcaaaactccgtgctgcagtgaaccttgcattcgaagagcaaaggcgtcagttcattgaatggagggatagagagatggaaacgttgaaggcccagcaggcagccatcgacgaccgaacaagacaggccatcgtactgatacagaaagcttatcaagtttctaatcagcaaccagctgctacgtccagtatcctactaggcggcacagaagaaattcctgctgggcatacaacccaaactcataacggtcagccgtccaatccccggtcacagtaaccacctgtgggccaagtggtaggcagccagaccttattcgacaattctttaggtggaattatttcagagagatctaagagaaaatactcagagatttcattatgagagctttgagagagaaaacactatattttctattctcaagttaatacaatctaaggggagtaggctattatcgaactaaagggaccgaacctctttaaaatctagtgttctttattgcttactggtttttgctctatcttaattatattttttatcgctcattaattgactcattgtcgttggctaaaagcgaggtcaacaatttttatcaaattcgctcccgcttttataactctcatatggaccaaaaaaccaacaatttttgtctcatgtggctcgcgataagaattttgcagcctataatttggcaaagcatgcctttcggttagacaatgagctatcttagttcgaggaggttctaccgccgattgtgaatatctgaatcgttaattcatgagtgattttgatcaatacgttaaaaaaatctctatgatagagttttcgttatggatatggaatatatactaaggatatttgcggtaaaacccccttaacatttgtaattgttacacgtatgaccctaataaaaaaaagtagcgacaaaagtaccttatcttataattttgttacagtcatacccttgtttggttgttaaataccaattaagcccgttaagtgccagcttaaaaacatgtggcgacatatttctttagtttatctaatacatagttcaataatatgtcaccacgtatttttgagttcacatttaatggctaaaaacggatacgtctgcaataaaatcgtaaaataaagtacttttgccactacttttttttattagaattatatgtgtaataattataaatattaagaagatttcatcgtaaatatctctaaatactatattttatataatcattattttttttaaagcaaacaaacaaataaaagccccttaaagtttgggcatttaagattggaataattacataaggtaccattttttgtaaaataattacatttttacgtttaaagaatatttttttacattttcatgattttccaaaaaataacacga

SEQ ID NO: 126390 - DNA, 584 bp, Cannabis sativa
  modified_base (512)..(525): a, c, t, g, unknown or other
ttaattataatagaccgttgcttactggtaggtagtcatacttgtaatccttccttttgatactagctagttctacatggattaaaataaacttaattgagaggatgagtaataatacgagttatttaattattttttaattattaaataaacttctcgcgatcagacatgaattagttctcgaaatggagctccatggggataaattctcttcatcgagtttgattgtgctaatgctatcttgacgctttcatcttcgaatagctattatgaatatctcgattggtgtggagagcatcaagaacttaacttcgaataattgttttgctggattttcttttagttttagggagattaataataacttagcttattgtcgagtcaataggatcttgatcaacgagttaatgctatttgaaatagggatattttcactgttgcaacttgcaagtttatatactacaaaaaactgctattattagtgataatattttagtcacaacataaatttnnnnnnnnnnnnnntgacttttagtcacaataaaaaattacttgtgactgtctttagttacaagttgtcacta

SEQ ID NO: 126391 - DNA, 869 bp, Cannabis sativa
attctcattcccattccattttcacttagtaaccaaacgccacctaactgtattctgttatgaatacagctggtccttttctactctactatataaactgtaactttgtattttgttgattaatcaataaaatatttttttctctgtttttctcttccgcaaaaatctataagagtttgaaaaggaaattaaatttattaaaaagttgccgaaagtgtaaatggaacattaagtgtaggatttttttttttctcatattatgtatttttttaataagaactaatatataatacaatattaaaaatggaataattccaatattcttgacaatttaattatcataattttttgactaaattacaaaaataccttaaatattaccataaactatttatatttaactttaataatctatcaatgttcaataataactatattttaaataaaaaactattaaattattcaatattacactatttatttaaaaaagtaaaagtatccatcataatattctttttcttttaaaaaaaaaaatcttattataatattcataacaaaagaatcttattttaatatttaaattttaaaaacaatacaaaaaaaaggaaaaaatacatatatttttttcataatatatgtaacgttcctgttttaaattttcattgggcacttacacgaataatgattcttatacacgacaatttatacatttagtgacacaatttagtgacacgcacaaaaagtgcaggtcactaaatgttgaaatcattttttagtgacacacattgcttgacagtaaaaatttcacatatatgtttcataatgcgggtcactaaacatttgaagtgtcactaaaaacttatttattt

SEQ ID NO: 126392 - DNA, 565 bp, Cannabis sativa
tctatataattgtattgttggggtatgtgacatgacattctatcatttttagtattgtcatttttctattttatggtttttctaagatttatctaattacctagtgtaaaaataacaagctacccgaaactgtattaataaaaaatgaattacagaatgacaaatagacatcagaaaaacaacaaactatacactctaaattatatcaatccaccatttaaaaaaattatatcaatccaaaatacactaccaaataacaaaataagtacaaaaagaagacatcatttttaaaagtatcattccaaaataaaataaataaaacaacaagaaatcataatatatattattatattattattataattgcttctagatttttcattagtttttgtgaaggtgttaataatgattaggcctatttctctaaatccttttgttagtccaatgtttgggaaatttaagttgaaataattacataacgcactattttttataaaataattataattttacattcaaagaattttttttttttttttttaattttttagggtttttttttttt

SEQ ID NO: 126393 - DNA, 1362 bp, Cannabis sativa
aaacttaacaacccccttaattggccagcctctggctagccaaacccttagttgtacacctctggctgagcagtagggtgaactcacatctcgaggcctctacgagagagtaacctagaggccaatcttcaactggctaagttcgagacttgagaagcaagtctagtcacttcaaatacctagatccaccaaactttagcaactggtgtgatctaccccttgtcaatgcacatactacaccaacaaatcatgggagaacaagtggccagaccctacacaacatagggttggattgccatgaacagctgcccataaggggtttggctggacaatgccagaccacctttccagtagtggccgaccagacctggcccattaattaattatgtaaataatagatttattacctagcaggcccaaaaccttcagaccttgaaccggataggtcatcgggatcactattcttagcatatatcaatgccttgctcatacccaagttcaagatgccggtatggaagatgtatacctggcaagaacacccactagctcacattaagtacttcaagatgcaactcgatctttaaaagatcactagtgatgtgcgatgtcaaattttcctggcaaccttgttagaaatagctcaacaatggtactttaagctagctccaagaagattcaattcttggaatgaattttcttgagaattctacacacagttctaatccgtacggctaataccattgcagctggaagaccttgttaaggtcaaaaagcaacaaggagaagatttcaaggattatatccaaaggttcatgagaacgccagtatacgacaatattgggtgtatccttccactaagtgacttttggaaagatatccaaaagatctcaactaacaatataaaagagttccttgacagagctgacaacattatcaagatggaggaggctgtttgacaagcccagttagggcaagtcagtaataggcaatctcagggtgccctgtgccccacgacttgccaaatgtgcatgcaggcgctaacacttttgaacagacctctagtggcaagaatactaggggcaagcgcaacaacaataactctagaagaaatagtggtaaaaaagggaagtacaacacttccccatgccacaaaactaaaaagataaggaggagaagatcacttgcttccccctccgaatggggaagcctgaggccatctacatgtccacttagggaactatcccatacaagaagtgttgggttttgtgccctaactaaaactcatttcaatataatcagatttactaattaagaaagatcagaaatcgttttatgttgcatggttgacatgatttatttcat

SEQ ID NO: 126394 - DNA, 835 bp, Cannabis sativa
caaccagtacaacaccaaaaatatataatacttttgaattaaaaaaatatcaataatgaaaaaattaatatgtttttttatatataaataaattaacttaatctgatatatgaacaaaacacacttgttaatatagaatatatatctgacaagagaaaggtgatactagctagacaaatgaacagattctcttgaaatggtttctatatttaagtgtttttggcttactattatgtggacggttacctctcaaacatgtgtatttggcatttttgaagccttttttatttctaattttttttttagtatattttaattcatgtgcttttggtactttacattatcatgaataatcccgccccccacatggaaaaaatggtgaaaaaaagggatgtgatcagaagcaaatggaaataggaaatgattaaaaaaaaaaaattaattttgggacatcattataagaaaagacaacttttctggtattaatcctacctaaaccaaccaactttacaaataaattatggtataaataattaataatattatgaaagcatctaattctaaagcagtagttattggtaatctctctttggatcctcttcgtttgtctcaccattctgtcgtctctacaagaaaagaaaagaaaagaaaagaaagaaagagtgaaaccacgctgtacagcctcctttctctttttctttctcaatcaatattcattcaataatataccatatattatatatatatatatatcccaaacaaccaaaaccttgttgttggcttctcatcttacaaattttttgaggttttcaatgatttaatttgcttggtaata

SEQ ID NO: 126395 - DNA, 1379 bp, Cannabis sativa
tcatctactttatattattttataacaccacttaccttttccaacgattttcataattgaccttcttctaaaccgtgggaataatccattttgtagtagtgacatatttacatcactatgcacagttgcacacagtggcaacataattggcatttaacattaagatttaactggcacttcaaaaatatttctgaagttaaggagtattgctgcaaaagtaaaataaaattacagagttaaattaaaatataatgagattttgacgccaattatctaaacaaatattataaatatagatgatagttatataaaaataaaataatatcatatgaacactttgaaccaaaaaaaatacaaaactactaatatgattataatttaaaataaataaaaatatcatcacaaataaataaaaataatcagaagagtatcatcctctcatctccactcacactctcttcctgcttgtttaatattcaaggatgaaaaattactcttgacctctccatgtttcatttttaggcaggataccatgcctcaattaaggctgagcaaaaagttaaagaaatcgaaaaaattaagtacaccgactgtctgtctgaatactgaaaaattaacaccgaaaaaattaaaaatgaaaaatctacctccgactaaaactgtctttgcacggtcaattttagtgtcaatggcaaactaaccgattaaattgagaactaaccaaacatatatgttatataatatatactacacatgtataatataatagtttcttacatatttaatattcaattttattaaactagtcttactttttatctttttcattcaaagtctcacttctccattgctttattttattataatttgatgtatttatgtattatatacacacattcataaagtaatacgagtttcttaatataacttattatcatactaatagcacaaataatttaaacaaattttttttttaaaaaattattttatgggaatgcaacccaagtcccacattggctaggaatgggaagaattatgggtacataaggatggacactactccattagtatgaggtcttttggaaaggtgtccaaaaataaaatcgtgagggtttaggcccaaaacggacaatatcatactaatgtgggagtcaaggtgaggtagcggcccgacaaggtgaaagaacgaggcccaacaagtggtatcaaagccaaaggttcaagcgctgggagagtgggctgcatttgcgatgtgaagaaaccctcaatgtgataatctcgcgattgaagatctatatggtgtcttgtatcgaatgtcttgtatcgaaagtctatctgatattgaggtagtcaggtggcgtgtcccgttgatgattacg

SEQ ID NO: 126396 - DNA, 1315 bp, Cannabis sativa
catggaaaagatgttcctgtggattttgacattgaagtttatcgtactcaacttgaagccctttttttctcatacgggcaaaggaaaagttattactatccatggaaatggttcgattattttttcttagttatattttaaaattcctttcttaaacatatcataataggttaatcactagtgtcttccaaataatgatggactaaaattttaaaatcctcccactaatatatggtattgtgattctatgtccaaatggactttactgacatctatttaattgctattacgatagtaacatggttattggaaaacttacaggatcaagaataagttctattagtttactagttagtttattatattatatccatgtccaatcaaaatatgtgtgatatagagatttcgtggtattatgaatataatctggagtttaatgtaaaagatgtttgaatatatatcaataacttcttctaccccgatgtgttatagagattctgtggagttatgaatatatatagttcaatgtaaaagatatttgaattgcatagttcaataacttcttccacccctatcagatcaaaacattttttttattaaattaaatcttaataattgcttaagaaatgacaattattcctaaatattaaatttaaattctaattatttatgtggtattatcttttgcagagattagtatgccatagattttgtatcaataataaatacaaaacacacaaaatcatgataaacatataaatataatacgttattggcatacaagttatggaatataaagctcaatttcataaaagcaattcataatgaaatccttttaaagagaaaaaatataatattaatactctcaaaaatatcactatgaattgtctgcaataatataaaattgggaataaaattaccatactaataattgaaaataaattgttcgataactaaaacaactaattcaaaaaaattaaagaagattacaagtttcatcttcgacttggacaatcttcacccttctgtccaactattcgtctcaactcgctaggatcacaatccaggtttaagtaattggaactgaaataagaagaacataaacatagttagtagatcaagaattaataatccaaggggataataattctgtaaaacacatgatttcgtaacaaagttagatataccttatttcttttgttaggaatatattttaccagaaccaagatttactaacaagtatgtttattaagatcttaaatatgaatttctaaaacaataaaatttaaacacatataaagtttgagtaacctta

SEQ ID NO: 126397 - DNA, 1777 bp, Cannabis sativa
aaaaataccgcctagcagtatttttataagaaagtggcaaaagtcagtatacgatgtaaattttcctataaaatatcatctttcttgtatggagacatattagaaagtatagaatggaaaaataccatattttgcattttgtattaattttaggttttgagttgtgtttgctggagattttttaacagtatatattattattattattattattattattatataggaatgagaatttttatatctatattctatctatatttcatatatatttataagaaagaaatgtaaggcgatgacatgacactttaaattctcttcaagtacttattctcttcttaattcttttaatttttttttatctcttttattagatttaactaagtaatataactgttcttcatgtggttaatttaatattttttagtacgataataaaaatataatttcaatatataataatagtaaaattatattatctaatttcatattattaattattattatttttattaagaagtttaaaatttataccattaatgtatatatatgcgctctaaatttcctccaaatatatatatatatatatatttttctctttaattctcttattctttaaattttttattagatttaactaagcaatataaatgttctttgtctagttaatttaacttttttagtacgataataaaaatataactttaatatataataatagtaaaattatattatctaaatccatattatagagaaaaattagagtgttctctataatgagttgtttttatatctgatcctttaaagttattgtcattattgaatatcactccttcattgttaccatcatcttatctcacattttgtctcattgcatctcaccaattattataaccataactcacttgtagtcatcacttatagctcaccgtatcgatctcacttgtacaaaggtaacaggtaacgattgttctcctcgataagttcactgtatacataaactataaattaaacaattcattaactataaatttttatacataattatttgaattattccattataaatatagattttaaaaaaaaaaaataaaaaatttataataaaactcactatataatttcaaacctagaaatcaaagactgtcatacattatagttatacttgtacttagtttatttttactattgattctctcaatgaaaaattaattaactgaattaattggagagaagacatatgtaattttactttttataatataatgagaattacaaaaatgaggattgcatattattatgttgcgcgactattgtaataattgtaatacattgtaataattttaaaatgattttagagcattttatcactacttcatgcatcatctttaaggttatagatatattattttggagcaatttaatctatagaagaatttttcattactgtgtagtattttcttcaataataaataattacaaattattattttggtgcaacttagaaagaaatttttcaaagtaatatatacaatataattacatctcagggtgataacaagtatttgggtgaatcacactattcacaaaattatcaataatgtaaaatttgaaattttgttttacttttaattttcttattaattatcgattatcgaggacaacaaaatagttaaggtaaatagtggcataagtacctaatgtaaagaccgcttagtttaatttggaaattagcagttaatcatgtttaattatgaaaaattatttatagctattt

SEQ ID NO: 126398 - DNA, 1875 bp, Cannabis sativa
gtgaccatccacattgattacctccggatgcttcttcttcagcttcctgaggggttactttctggagatagtggatgcgagtaatgtaatcctagctttcctcattggatgggactgggactttttcccacaaagagtacttcagaaccttgtagtcacaagtgaactggtccgagcaaaggaggtttacaatcctcatactggactcgttcaacaagaaatctgctgatcgcaatccttaaggaagacccagcaggattttgtggcgctcaaccatctcggggggatgaaataagtaagcaatcttagatttattaatctaaaaactcaaaaccaagcttttgagagagaagtcacttacgtataatgcaaaacgcgattgtgttgattggagaaagacccgtagtctagaagaagtcatctttgaactcggtttttgttgggtaacctcacaatgatcctgtgatcatttgtgtgagtaccgaggtaatagaaacctcatgaacctcgcttccttgcgggaacagctttgacagagtataaataaactatcttgaggggagtgggacactcctagcctaaaatatggtacaaaactcttagggggagaaatgctccagccatgatgtgctcgaggcttgagcgcctattccagacgagccactagtactggagccaccacattcctcgtgaataactcattctggagaaaagcaactaaattctccaggagcaacggatctaatgcggcatcctcaccctttcttgacaccacaagtctttaatacaccaccgacataatcgccaatggcccttactttgaactcgatgagctcggcttcaaaagtgacattagggtcttgtggggtctttgatttacgaggcttggtgaacataatttcaaaatcaaggtcacctgacgaaaaagcaatagtgagtcggggtaaaaacaagggtcttgctaaaggaatagaagataaagtttggggttcaagccaagttgcatctcgtagataacgacgtttacccttagttatttcttgtaaaaattgcctatagtgactagaaacttcatcgtgattggtttttattaaatggtccctaattttagcatcatttatcttaaatttggattgaagtttttggatttggggtttgaatggaagagctaattccttaggacattatatttctaggaaatctggagttgaaatttcaaaaccagattgggccatttttacaaaaaagaataatcccaatttttggaagaaatttattcaaaccagaagcctatgaatgtaataaacctaagtttttctcttttaaaccctagaaattatccaaaaattgaattgaaagtaacttaaaccaaacaaagtgagcaatgatgcaattaatataagagtaccaactcaggaaaaagaaataccaaaaagaaaggtataaatcacttactgttcatatgtggatttttgcacaagaaagagttcaataactgggattgagatgagtgaattagcgtactctgagaaatcctgaggttgaagattaaatccgaaaaaactcgcaaaaaataagtcaatgatagagagggcattcatggtattgagaagtcgaggatgatttttgcataaaagcttgatggtttgaaaggaagaaatggtgaagtagttgttttctcttgagttttatactttaagagcaatcatcgttagattaggaggaaaaagatctaacagatgagaacacggaagaattggaaaagatgggcaattaatgctaatgatgtgtctcgaaatcatgactgctaaaattcaaagtatgcaatttttcaaaattggattaagacaaaaatacccttataatcatttaaaa

SEQ ID NO: 126399 - DNA, 1875 bp, Cannabis sativa
  modified_base (1496)..(1500): a, c, t, g, unknown or other
  modified_base (1582)..(1586): a, c, t, g, unknown or other
attttggaaaatacagtgtctattttgtcagttaacaaaataaagaatccaattggtaacttttagaaaatacaggtccaaaataatatttacctttaatataatagtaatacttatatacaaatatatatatatatatatatgataaggaatagtagtacaaatttttaagaaatcactaatatataatgtatatagtatttacagataattgtgtcttaaaaaaaaaaggaaaattatgtcaagatttaaataaataatatttatttttattgtggtttaaaaaaaggcctaattttaaattctcccctaggcctccgaataccttgagacggcctgtaaatatattagatggtttattggtgtatttatatttaaataatataattataataattatagaaaaagttattactttttcagaagaaaaaaaaaagatttaagttgtattaatttttgttttgcatagtttcttaaaaaaaaagcttataatatttatataaatattaattattactttgttttattttaaaatatatgtatatgttttttttatttttatttttaatgtggttaattctcttataaacaaaagattagtagaataattatattagaaatagtaatgatacaattgtaataacattagaatattataactaattattaagtaaaaataactcttgttgaaaatatgatatttgtcattacattaaagagagagtgtaatccatttaaaaaaaaaaaaaagagagagtgcaaaagaaagtaggatagagaattcccttagcactcctatatatatttttatatgtagattttattttgaaaccaatatttttcacgtttacattaaaaaaaaatattataatcactttcaaaaaattgattcaaattatatagacatttgactattattaaaaaaaaatatatttgtgtgaccttttactattttagtatatgattatcaaataaaaataaacatatttaattttttatgtgaattttcttttttaaatacatgattggatccgtccttgacgatgacatttgcattcaaggacaaacggacgtacatctaactctaagagggccttctcctcattttctttaaacaaacatatacacaatatatactacttgcaaaatatatatattttcattaactaagggctcctttggaacgacgtattaggtagtattgtattatattgaattagattatatatcatatttttacataatactacattaaattttaatttatactaaaatattatatatttaagtgtctataaaagttagtaccacatatagttttatataaaaatattgcataaaatacaatctatatatatgtataaaggagaagtttgaggcggtgacctgacggtctaaaatctctctaatactatttttctttttttttttctttaattctcttaatttttaaatattttattagagcataaatttacaaattaatattttactannnnnttaataaattttctataaaaatatttatcttaaattaattatttttttaaaaactaaattaataatattaaattaaataatnnnnnaattatttatatatatgtattcataactatatatgtgtaaagttttgccgaaatatttttataaaaaaaattattatgaattaataataattttttttagggtgtttagataaaaatataaaaaaaaagtattttttttattttaaaagttttttttagaagaagttaagatttgaaggttcttctaaaaggacttttaagaattattttaaaaagggtaaataccattttggaccttgtattttgcaaaagttatagattggatcctgtattttgttaaatgacaaaa

SEQ ID NO: 126400 - DNA, 612 bp, Cannabis sativa
agttagggtgttacaatatgtatcactatgagattgtctttcaaattttttcttatcaagctcattaagtagtcccccttatttaaataaaatataattataacatataactaatataatatttgaaattaaacaatacaataatttatttacttgcaaaatcttgtgcagtagcgccgttgacaaaattatttgataaattttttatatgagccaccctccatccatcaaccatattctcttatagtggacctgttggtttttatggtccatatatatcaaagttataaaagtgaaagcgaatttgatgaaaataatttttatccaatatgaatcataagctcaagaatctcaacatagtgtatatagattaaatctaaattactgaaagaaagaatatacctcttgaagcctatcagagtatccttatttattttcgtgtaattattgataatccaatctaagaattttgttaaaaaaatctacatcttgatcttataagccagcctcaacacaacactcaggaatagagtgggctattaaatcttattagatgaataaatttaggtattacagtgtgtactcaactcatgagacactgcaattgagtta

SEQ ID NO: 126401 - DNA, 2243 bp, Cannabis sativa
  modified_base (1788)..(1790): a, c, t, g, unknown or other
  modified_base (1858)..(1861): a, c, t, g, unknown or other
aataaattattatttttctttttcaaaaattacaatacttattctatatctttttctctcatttatatttttttttactaattcatactatttttttaattaatcacattttataaaagaattttaattaagaataattaacaattttaccctaaaccttcaacaatactaattttgacccttaaaatatacgacttgttaagaatgccccctgaattattacatttacagaaatttagtccttctattaagtcccgtccaattattccgtttaaatgatgacatgtctttgtcaattagcaactttgccccctaaaatttgacaattattaaattccagtcattacccttttgaaacccatgttcaaaacccacgaaaactacctctcagtcataactttcgccatcttcttctaccaactgcctcctctatcagttttttttttttatatatatatatatatatcatcttttgcttctccatctttattgccaaaaaaaatttcaaaaatggatcataaatcagttgttaacaaggttaaagggaaacgcccaatcatcgacgatgatgactctgattttgctccccccgtggctaaaggtggtcgtcgtccagtaaaatagaagtcaaaggtgtctttacctgaaaataatttcaactttgacgattagaagagaaagaagttaacttcaaggcaactgtgataaaactgtaatgacacagttgtatctattgtgagccaactaacataaaaccacaaaacaactaataattccacatatttaatacaaacaaatattataacaatcgtgttttatctgctcaggttgcgtatttggcaattccaagccctgtttttataatactataatattgtagtagcaaaactattatttaactaacgtgcaatttatttgcaactaaaaatattaaatgtgaatgtgtatctataagaaactatttgttattattttttttatcactgatcgataattacttataccttaatagtaatatgtggagaaacaactgttagcaaaatgtttatgcaactgttacgaaatattaaaaatcagaacactgtttcgacgtacataactctatctacatgtctcttcgtgatttaatatgaacaaattcaccattaaaaatttagaaaacagcaaaaatgcaccaggataaatattttactttagtattgatgtaaatttttttagattatacctgagttggattgtttgggaactccagtttatctttttgagatctgcatttcattgatctgaaaattgaagtcaggacattattttatgcgaattaaactggatttctggttgaattttagtttcatagtaatttttctgcactttttttatgaattcgaaacaacccttatttttattgattcatgtcgtcttctcaggtaaagtttctggaattaatagtggttctctttctagttgggtttcgtttcggttgtgttgggttgctgggttggtcgtagggctgagcatcgattggtttggtcattgttttatataaaaaaccaaaattcgattttcggtctgcattggtgcaatcgaaaactgacctaccaatctagattctatcttaaaactgactgttttgaacctcgtactggtcgatttaaactgcccaaatcgaactttttttttctttaaaatatgatctaatttattctacaaatacattattctacattttacaactacaagcatacaattaattgttcagaaactaattattttattcttttaactttaatnnnaataaaataataatatattattatatattattaataactacagtacataaagcaaaaaaaaaaaaaannnncttaataaattaatatatatgtattacggttggtttcggtttttttggtcggcttatctccaaaaaaaacaactgaccgtttaatagcgattttaaccgttagtagtttttttagtttttggttctatcggtatcagttccaacgatgttcggtaggtcagtttgaacggttttttggttttttggattttatgctcagccccagttggccgattgaaggttaaatcacatgaaggtttcaattccaagaagcatagatcatgagttgaaggtgtgtgtaaaaaatatttgcataattttttttatttgagttgtatatttatttatttgtccggataagtttttttttttttgtaatattattacttttttttagttaaaa

SEQ ID NO: 126402 - DNA, 569 bp, Cannabis sativa
taataaattaatttgtatatatatattacacaccaaccaaccatataatttcttcaaattaattaacagaaattaatattgttaattatataagccgttccctatcaaatgctcaacgagtctaaattatgctacatttttaaacaaaatgaacgtttaacaagtttaacctaatcgatattcgattgatgtactaacctatagcttcccatacaaattggaaaataataaacttattatttcattagaaagcaaaattgataatgtgtgaccagttaatggtttgggcaacccactacaagaaatgtcacttttgctagtatattttcgtactggtaaaagtttgatattgcgctggtaaaatgaaatttacttttgaaaatgagttggcaaatcaacgttggtattaaaactttaccagcacaaaatgaaaaacgctgtcaaaaatgacttttttcccagtgcgtaaatttactggtaaaagttagattttagctactgtaaatgtgcattggtaaaactttgacatttttgccagcgcgcaatttgcaaaatgcgctggtaaaaat

SEQ ID NO: 126403 - DNA, 571 bp, Cannabis sativa
aatggaatgaaaattgtttcttttccattccattccatttcattacctctaaccaaacgccataagttttggacaagttaattaagacatatcattattgatgtaatttattaatagcaaatttaattcacatattcatttaaatttaaattcacacctataccaaattgttaaaatcttgtctttgatatgaacgatttctattatatcatcatatcatgttcaattttaaaaaaagttttcttataaccggtttgaatttccatcaagcataaaagatcattacattagtaaaattattggccaataatttctaagcttcatatatagttcatttgtttcataaaaacattaagaaaaaatcatacttaaatcattggaatcaaaattatgagtacataagtcaataacaatcttccccattacactttgtacttcattgtattattaaaatataaaattttaatttcttaatattactaacattttagcataatatgttggtgctaattatatgtatggaactattcttaatgggtaatacccattgatgggaactaaaaaaaaaaaa

SEQ ID NO: 126404 - DNA, 1599 bp, Cannabis sativa
ttatcagaaaatcaattatttatttatttccttaaatagaaaatttatttccataattaaaatattcttatattgtccagataagcaacaacaagaattacaaagtataatacctacaagtggcctttggcctctaacaacctactgtgtcagaaccagtagtaagttgcaaagtttgttaaaactgttgcaactaactctcagctatctcaatctaccctaaggctatataaacatatatacttaacttcaaacacagatcagaaagaaattggagaggaagagacttacagtggttaagtcttggactctaggcttagggctcggagatccaacccaagaaggagatatacacagagaaaggaagaagaaggagttagtaaatattcagagagagagagaaataaatactgaaataaaaatagattaccaatcgtacctgtgatttggaatcttgctttgtaaatctttgatcttgaagatcttatagtggaatgggctattttttaaggcgagctcgaagaggatgtacccagcaatatttggaacctttataaaatcctagtgcaatctctctatttttctttgctcttacaattttatctctgtttgtgtatagatctaggggttatttttgatctgggaagggatttattggatttctgggttgagaagcagtcttcgagttttgtttgtgagttctgagcatgtgtttggttctagaggattcgaagggttaatttggggtggagttcaaacgacttggcgttttggtttgcttctgtcgtttaactcataaatcaaaggagtcaactgagctttgactcagtggtgaaaggtcgattttgaccttggagaaaacttgatttgtttctattgtgtgtaggttaaaagagtaaatttcctacaagtgtaattatgtgctctgacaaatactcaaaattgtattattaccttcaattacacttaattctacttccctcttggcattccgaacgcgatcttagaaaaactttaaaaatacttctaagaatttttcaaatctcataagcttagctaaatgtctaaggatgaccataacctcgcaaaccgcaaggtttctatgtttcaatgttgtaactagtgtgtttcaaattaattagtcacacacaaatagataatcatgccctctatttatagagtttttactcttatttttgaacatgaatgaccacaataaaattttttactgttactaatattaaattgagcgtttatgaacttaatggttgatttagaagtgatgagagttgttagagccgagcaaaacgttcacaaaatattcaaaagtgtatgttgaaagttagtcaaatgacatgtcgcctgtagtaaaaaaatacttaaaattagtaactagcaaccagttcttctatttttcagcattttgcaaaataactcaaaacaattcaaaaaatttcacattgactttatatcatttatacagcttattataaattggtaaaaatagggaataattacataaggcactattttttataaaatatttacatttttacgttcaaagaatgtttttttatatttttacggtttttcaaaaaa

SEQ ID NO: 126405 - DNA, 649 bp, Cannabis sativa
ccaaagaatcttgaatctacctcaacgcatcacaagaccaaagagcatggtgaattgtctcggcgcctttagcaaaaagaggacaaagggtgttcacctgaatacctctatttgctaaattggagaaagtaggaagccaattatggtctttttttcaccgaaaatatttcactttaacaggcaacatcaattctagagcttggaccacactgagaaaccccaaaagagcctacgaaccgtataacaaccaaactgctcatggtgccaaataagcctatcctttgaagggcaatgagttctagaagtaggcaaaatagaatcagcctcctcctttatgaaggaattcagaataaaatcctccttcctgttaccatcaggatcaatcaagaaattaacagtagtgccaaaggaagaaaacacacaaatgatgatctattcaaagcaaatctctacctcacaaaatagatctacaaatcaaagaagatttctaagatttggcagcctagagaggtatgagggtaataaatttctttcaagaacttttgttacgaaaattgcaaaacaatacgcaagtgcacgcaatcaagtagtaaactcacgcaagtgaggtcgaaccacaggtaattggattaattaccactaaattata

SEQ ID NO: 126406 - DNA, 533 bp, Cannabis sativa
  modified_base (27)..(44): a, c, t, g, unknown or other
aatttcgtaaaaataccaaaaaaaaannnnnnnnnnnnnnnnnnagtgtaaaaataaaaaagtcccaaaaattaataaggtattaatgaaagaaaaaaattagtgggggctggcttaattaattatatatgaaatagtaacaaaaatattcaattagatatctaattggattttttctctactcactaaaaaatctaattagagttcaattttcataatctaatccaagtataattggatgattatcatccaaatccaaaaagttatataatatataatttgtaatatttttgacattgtattttgattaattaataatttgaattttacattttttaaaattttattttacatctagtagtttatagagattacaattaagttctatggtctaaatatttttcaatataaccaaaatattcttatttataattatagagcaagactatagtaggacctagcaaaagttccctacaggtaaggaactttttttgaccattgatgtggttattattatgatgtaaggtgtatac

SEQ ID NO: 126407 - DNA, 1002 bp, Cannabis sativa
  modified_base (44)..(47): a, c, t, g, unknown or other
caacataaaagcaatttctaatcttatattaattagtaaatctnnnnatattgaaataggttttatttagagcataaaatccaacagttttagcattttcaagagcttcataatgatgatagtctatacgagatgagttttgaagcatagaaacatgttcatgagatttttttgatctttttcttcatgtttccaaattttgaatgatgctaaagctgtagcttgttagcacaatttgagatgttggtgatcacttggttgacaactgaagaatttgattgaagccaggaccagagaatgatatcagaacattcttgctcttccaaccagattttctcaaagtgaaatatcgatttgaaaacaggagcagcaacaacattatcatgaatttgaatggtaactttcaatgctcgatggtttgaatggtaaaagtctaaatgttgccatgtaggcacaaggaaggttatagcccaccagtcattggtaaagcaagaatcaagtctttctttaacattaccagcacccttacttttatttgtcaagtggctaactctccatcaaaaggtatccaagttaagatacaagcatcaatagtagattggaaatctctaatctgatttggacatcttggcggtcccccaattttgtcatcattccataatatctcattaaaatctcccataaccaaccaaggtgattgtggagcgacatcgtgttgggattttatgccctaaataaaactcattttagtataatcttatacgttatcaatagaagaataaaattcatttatatttacatgtagtttttgttgggatttatttgaccaggatctagatttactaacatgtatgtttaattaacaccctaaatgtgaattctctagtacaatcaaattaaacccataagagtttaaaaaatcttacattgatggcagcggaataatatgactccttccactcatatctctaacccttgttccttttctagatcggaagagcg

SEQ ID NO: 126408 - DNA, 970 bp, Cannabis sativa
aaataaattattttatctttttattttttttcattcttagcctcactcttctcttctctcttcccttcatcttcatccttctacgcttgaacctccatagccactagctccagtcatcatttttgccttacccactcactgtcctatctcgcttgaaccccaatctgaacaaccccatcgcatcaccccaaaatccaggccaccatcctcagcttctccctttctcttcaacccagcgtcgccctcccttcgagcttcgctttttctcagatccgtttgagccagactactccaagatcacaccgtcatcccctatgcttccctttcactcctcatcgttcttgctgcccaaaaaccacccccaccaaaaatccaccacccactccaatttgggagcccaaaatctcaaccaagttaaacctaaaaaaatactgatgctgagttgtaacaaccaagttatcagacatacaaccccaatcaactacagagaaaagttaaatgtaaaagtccatccaaaaatactattaacaaataaaacttttctattaaatgggtagacaatcttcatctgagattctaattcaacatgaatatttggtcccttaaattctgaaacacgcctacaatagcccttaaatggatccttgcaaatttttactggagtaccagttgcaccatcatatgcttgttggaaaacatattttatcatgatcttacttttactactcaagtatgttagattaatctaatctaataccctaacattggttcttaagaaaacataaaagatttgagaaatccttacagtgtgtaatgaccacatacttaggatatagattagtaggataattagcattaatcatttacattttatggttatatgttaatatcttgtgttgtgggttctatttttaagaaataagcattaggattataattttctcaattccggagattttattaaactcta

SEQ ID NO: 126409 - DNA, 2146 bp, Cannabis sativa
  modified_base (44)..(46): a, c, t, g, unknown or other
  modified_base (1740)..(1755): a, c, t, g, unknown or other
ttatatcattttacttatcagaaatttataaatagtattttaannntttaaataacctagatatttttatagaaatttgatcatgtccttaggggttgatctcgatcatatccttctatgaccaagcaaaaatatcttgatttctcctgaggcaagccatgagcatcttactcaagacctccatcaggtttgttccaatctcgacaaccttggtcaggttcgctgtgttgaggggaagttctttgagttcttcagttgaactaactcttgagttgatttccccaaaacatgggtcaatgtcatgcccttttggtccaccttcaagtggctttaggtgccatctctgtcttttccatagtttggactctgaaggtctttatcgtctctccaactttttcggcagaggtcttgctcatccccccttgttccatagcaatggaggaggtcttgttcatcccctttgaagccatcaaaagaggtcttcttggcgagtgataatgaagcattataacactcgtggccagttccttgattgccaaggagacaactgataccagctgccgttgggaaattgatggagaaatggtatagtgaagagatggctcaaaggtcgtagagggcaggccttccgagcatcacgttgtacggagacttcatatctaccacatgaatgtggccatgatggtggttcgctttgggcagtgctgacagtgagtggcagtttgatcttaccacatggagcaatgtccgctctgctgaaaccatccatcagctactcgcatggctccaggtcttctaagggtatgcctattctaattagggcttgcttaaacatgatgtttaaggacgctctatcgtcaatcatcaccctgggcactatcatattaattatttgcacatcgacaactaaagggttattgtgagggtagctgacatgataggagtttgattctccaaaggtgataggttcacattcgtagcattgagactttggacggcactctgccacctctaggacttcagctcttggctcatgttaaagtgatcttgcataactttctaaggccttccttgaatttctagctaggtgagggcctccaatcatgatctctagcatgcttgcaactgatgcaggctagagaggtgcattgcccctagctggagcttcaggtcatacataccgcggaagagcacgaccataatttctcatcagcatttttttttctaatgagaaattctatctcgtcccacaactgattacacttattagtgtcatgaccataattattgtggtagcgacagaatttcttcatgtccctcttccctgaatctttgaagggaagaggtttgtgatacgacactattgattgtgtagccatatagatctcctatcttggggctaagaagatagagtaggtggtgaagcgaggctcatactctcgtaagggcttgcccttagtcttgaacttctttccaccgatggagtaacttggattaccacccgttgttggctctctttcctctgtttgatcctcttttcttcccattgccctactccttagtagcaagggcttcggagtccggtgacttcttcttgccacctttcaagcccttggcccaggtgacaacttcttctagtttgattgtaaagattgcttagctttaatttggaaattagcagataattatggcttaattatgaaaattatttattagtattgaattatttatttatgatgnnnnnnnnnnnnnnnnaatgcatttttatgtcatatatagaaatttcataatttttgcatgttttgtgcccggcaacattagaacgcggtgtttggctattagaatcacatcctagtatttttagtatagcgggacaatatagttagacattgggaatgtcaggaatagtcgggattttagaatttcccaaaatacccctaagtgccattttatgacttttagtgtgggaagggcaaaatagtctttttgccaattttatttttttcctttagtggacttggttttaattaataatctgattgttatatggaatataggctaatattactttttaataaaacaattccttttactcattattcaaaataagaaaaaaatcaaggaaaagcatttctcttttctctca

SEQ ID NO: 126410 - DNA, 1255 bp, Cannabis sativa
  modified_base (168)..(170): a, c, t, g, unknown or other
atcgtttcacttctatgcccagatagaagctatagattctaaatctatgattagcgctcccactcaattgaactgccatgtcttttatctatatgttacgagaagaaccattggtcgactttaacgaacagaatgaagaacacaaataatacaattgaactagaaccnnnccatctcaggattaagatcatttgctctaagatcaactaggtgatattgaattgaatggatattacagtaagtttattatatatctgatccaagttcaatatcggtccctttcaatgcatactccatacatctaactcaagcttactttaaccaatgccctggaaaggacatggcacttattcaaggtgcaagtaaactacattgtagattatcccatcagttaaaccatgtgtattgataaatcataggaatacattttatcacacaatcttgattacttacaactatgctgacaacacaataaccaagaatactaatgcgataagggtttggataaatttataattaaaataaacaaataaatgatgacatgaaccaaataacacattaaataagtaatgaaaacaaatttatttctttattgataattgaatagaaaagattacattgaaatagagtttaatttagggcacaaagtccaactgttctgcaggttgaggtctggtcggccatgctcatgctaagacctggcaggtcatgtgcctaccaagatcatgcaggtcattgtagctctaccaagataaggccatctttagaatgtggaagctagcctttggcaagtggaagataactttgtacactgtttccttgtagaggtcagtttcccttagtcgaacgaaagctcccttagtctgaaagtcaccttttcgctggccagcttgtgcccagatcctagcctgccatacaacctcactcttgacggcctataggcttctcttggctagccagacatgttggtacagccctttgatggctcgcttcactcttttcaattactgctttatagttttgccatgtcttgtatggatgccatgtcttgcctttggcaaggttgtactccacctgtactttgtcatggcttatgtggacatgaggagaataggtatgccttacccacatgtctgctataaatacctccattttttatgtagagggggtgaacaatttttacttacaaaagctctgctgaaatgttgaaaatattttaccaggatctaggtttactaccaagtatgtttcatta

SEQ ID NO: 126411 - DNA, 1473 bp, Cannabis sativa
agaaataatataatatcgaagggtacttttacaatgcgcctatgagtgacaaaacaggttttgatatggcacacaaatgcgacacgaattttacaggttatgatcagaaaaattagatgtgagttgaaaacgaatcaacacgaatggataaaaaataaaaataggttaaacacgatacgacccgttaaacacgaatttgacatagttttttttttaaagaaaataacttaaaaaaattaattataatagtataactatgtaaagatatatatttagtgattggatgttgagttaaatttttttaatatacttctttaaaaagaaattaaaaatattttaaaatattattttttattatatataaataaaagtatataagtttccaatggaactttaaaaatacacagactattttaaactgtcagaaatactccactatagctgacaatttaaaacagtcacgtaactttattagggacggtcctaaaaaaaactaacttgaggaccgacggtataagccttttgtacttgtggttgacggtttaaaaccgtccgataaagtatacccaatggtttcaaactgtcggggattccatagcttttaataaacccccaattcagatctaagttcaaatcattaagtctctctcaaaaatttgcatatcccagatatctctctctctctaaaccatgcaacctcactctcctttctcgactctctcgttcggacggcaagcaacacccacaaccacctcatccaccgaacctccatctctcgctccacctcactctctctcgctcctcctcgtctcttctcgttctcggtcccaatcgcaccaccactgccacccaccttcgagttgatgacccaatcgtaccaccaccgccacccaataccacctcgctcagtcttgctcctcctcgtctctttcgattcacggtgatatagatgagagtttgatatatcttttcacttttcattagtgttttctttgtagaaatcccattaatctcttgaaaatcaatgacagaataatgatatggttgagtactttgaagaacaattatcataatttgccttcaccgttaatggatgagcaaaagttatgatatttgtaatgaatatatatatataattactgtattgaatcaaagtgtggtcagatctggttttggtggtgtaaatctggttccatggtgagatatggttctaaatgtataaacagttgcatatgctgctcaatatccccattggttttctctagtcgggaaatagttttcccaacggtttttcataccatcatttataattttactaagttttttggacgttcgaataaacgtcagtcttagaaactaacgaaaatactttagccggatgtttttttttttttttgagataaaaactgttgtattgatataaaatcattatacataacagaattgaggaaggaaatatactccaaccaaatt

SEQ ID NO: 126412 - DNA, 1086 bp, Cannabis sativa
  modified_base (74)..(79): a, c, t, g, unknown or other
atgcaaaattatgaaatttcatgacataaaaatgcattcagaattcaattataacaacataaataattatttannnnnntataaataattttcataattaaatgttaattatgtgctaatttctaaatttaaactaagcggtctttacacctatgttcaggacttaataaaatttatacattaaatataatcataaaataaatcatttgaagcatgcaacataaaatgtgatttctaatctttattagtaaatctgattgtattgaaatgggttttatttagggcacaaaacccaacaacatacacatgatcactatctaataagatagtcgatgactataaaacttgtcatgccaagcagtacattatacttttcttacctcaagttttggttcaggtatgttggtcgacctgcttggagtacgatcaatacccgggccctgtgtcataacaataataaactaataagtgtttacccgaaaacactacttaataaatataaaggaacacctagggtgtcctaccaaaccccgaggtaaaaaaaaattatattttggctctaaaacatataccatatggtaaagctcgtcccaaactaaaaaatagtatatagaacgtcccaaacagacactttagtgaaaagttatagtgaaactatgattctagagttcaaagtgtgcccagaaccggttaaccgcttctaccaaaagctgttgactggtttcgaaccagttgactagttggtcaggagcaaaaagtgtgaatttccaagtttacgcactcaccaaaacgctaccgagacctatccaaaccaccccaaacattatagggcacatatataccatacatactactatacttacgtaatagaattaaaaattgagaccataactggcaaatgccactagtgtttaaccttaagctataaaaagtctcaacctcaatttctaactcaaaataaccttaaattcaacaagaaaacatcagaattagtctcatgactaataatccaataaggtcagaaccttcataaccattgtaattcataaaatctatatacaaaactaattgtttttaacttaaaac

SEQ ID NO: 126413 - DNA, 859 bp, Cannabis sativa
ttttgtaaataatttatattttaagtatattatcgaaaaaattccttttatttaagccaatataaagtgcagcttacaaaagttcaagaacacttcacattctattcttctttttatgttcagatttaattctatagaatcctatatgattggcataataaagcctgtaatgttcccgcaatttcaagaacacttctttatacttgcatttccaaagacaaataattaattcttatttaaatactgagtaaaaaactgattagttactgaatagaatagttagtcagtatttgaataagaattgttcactgaataacaatttccaaatttcacataataatcaattcttattcaaatactgagtaactaatttattcagtgaacaattacattattacttagttactcagttatttatttatgatgtaattgttcactgaataacagtttccaaatttcacataatcatgtcgcttgtaagctacaagaaagctcatctggactaaataaactcataaacacatatttacatataaagacacatttacaacaaagcagtcaattgaaaacctcacccaatccaaatatcatttatccaaataaatcagagacagtaaaccctaacaaacttatcaagaataagaaacgaagcaggccattaaaatcgaagttcagagaacataagagagaagaaaaacctctagggagatgatccgacggcgctaaataaacccgttcggtcctattaaaggagcggttaagactgtaatggtagaccttttatttgggcttacattaaattttattggttttattaaaacttgggttgattggatagttctttgctgtgttagctcat

SEQ ID NO: 126414 - DNA, 510 bp, Cannabis sativa
  modified_base (37)..(55): a, c, t, g, unknown or other
ttttaaaaataatttttttaaaaacaaaaattttacnnnnnnnnnnnnnnnnnnnaattaaaaaacaaaaatattaccaaacggcaccataatttttttttagtgaaatttaaaactacccaaataattcgccaactacatccttctcattttatttctcttttaaattataataattctttcaaagtttaatatttatattcaaaccctatatacttttcaaaaaaaaaaccctatatggcaacaaattaaaaaagtcatccccataataaataaatgtatattttttccatttacaaaaaaaaaaacccctatatggcaacaaattaaaaaaaaaaaaccctatggaggccgaatacgaaaatattaatacaaaaaatcttttgtatgccaaagttatcagatcaatctggttgtttttaggggaattaccacatatactattttttaacttttttttctttttcaaatttatggtttgcgttttttctaaagtggttgcagtgctag

SEQ ID NO: 126415 - DNA, 781 bp, Cannabis sativa
  modified_base (119)..(123): a, c, t, g, unknown or other
tttctgatctatattaataaataaatctgattatattgaagtgagttttatttagggcataaaacccaacagaataagtgttatgtcttttcttgggcattgacaaagtttaccagtannnnntgtatggagtatacattgaaaggggctgatattgatcttggataagatatcacataaattaacttacgattatatccctctctaagtcaatatcaacggtcgatcttaggtctatggatcttaatcctgatatggttaggttcaacttagttgtgttacttatgttcttcaagttgtttgtggaagctaacaaatggttcatactccaatatgacaaaatttagacatgtttggtgtcttaaaataaagtgtaacttagacatatttggtgtctaaagttaagtgttcaatttagacacatttagtgtctacattagagtttgattttgatatgtttagtttcaaaattatcaaaattggtgagaaattgagttgtgtaagaactaattttttatgattaaattttcaaagctttactacttaaggagaaaattggtcaccttaaaagtggacacaatatttggctagcatgattcgcttggaatcaaaagtgtgaggttaattaatcgcttagtctacatacaagattaaagcatgaatcttttagggatatcacctaaacttctttagtgttttagtcattgatgataacctatcttaacaatagtaaaaatctagtcttatgttcaatagataataacaagttaatagagtgaat

SEQ ID NO: 126416 - DNA, 1670 bp, Cannabis sativa
tatacgtgtttatttcatcgttttcgaaagttcatatttagggtgttaataaacatacttgtgtgtatatctaagatcctggtaaaataatttccatcatatacaccttccctctctaatcgagaaggatgttgagggtgccttggaggtagcccacttgtcctgggttggttcttggggtttctcttgttgccacgagggattccctgatccctaggttgaggctgtctcgcatcctatttcctacgagaagcttctggtacatcgttttgttcattcccatggttcataaatcccaaggatccttgaggaacgtcttgacgttgctcttaattgttttgttgttcatccactagaacatcccttgtacccccaggttgttcttcctgggtgttttggggatttccctggtttgcttcctgtctcctggttcttgaaccttgaggtctgcctcatggactccttaccctaggatcaggttgagtctgaggatttattccttgtgttgccctagccgctgcagtctctctttccaactctgcattttgtcggttagattcagctaaatgttgctggagttgtctattttccgattccactaatggtacatacctagttggatcataagcatcctcacttctaggcacatatcctgcagaattattggtatcttcattccttctttctgggttttgattatcaccatcatagcttctcgttgaacgtgatgttctagtagtatggggtctttgagaacccattggctctttcctagggcgatgtgaagtttcctcaaggcgatttctatcattttgattgttatcagccattgaatatggatagatttctatttttaaggagggatttttctaagtattatcactaaggctctcaatgaaagcaccaaactgttaacacaaatttttgttaaaccaaaattaattagcctttcagtaataaatactttacaaaaattaataagcaataataaataattaatactctagatattttttatgtggttttgtagttaaaatctacatacttcacgagtccttcttattagggatatttattgagtacataatacaatagaatttgaataatagtattttctctcataatttttctgtccccttttttccatagaatttgcccctatttacaggagtataggttcgcaattattctttttgggattaattcaaatataactattcatgaaacgtgaacaatcctcatgtttcatttattcatgtgggataatatctaataactacccaactactctttattgttatcctttagatggttattattaacttggaaagttgtgtctcgcttgatattagttaccctccttgtccatcctaataaggaaaaaatgctaagtattgccaatttgttcacctcgtcacatccctcatttgatttagtattgtgaggtgactgtctcgttatgtaacaccctaactaattaggcatgttaacgtgatttaaacgtactgtgttgctcgttgctaatcaacaagattaatgaaaaatgtgattaattaaaactttcttttttaaaagaaaacttaaagtattacatatatacaatctcaggatctcgtttacaaaatatatttttaaaagtttgcaatacacataaacaaaagtttgtcgcc

SEQ ID NO: 126417 - DNA, 931 bp, Cannabis sativa
aaaacctctccttttaactgctgctctcataatatagtcatctccaccactaacctcactctctggctgtcacaaaaatctttctgttgagacaaatttgatgtatttatggtcgtttacttaaatttagagttgtacatgaatttttgtaaacccttcaattagaacaatccactcaaaccaaaccaaaaaaatctaataaatatagattgggtaggttgaaaataaagtcaacccacctaatgtacttgaccaggggtgtacatagatcagtttgatcgagttgtaatatatttttaccaattcaatataaatgtcgagttacaaatatttaattgtgacccgcccaattattaaaaaaaattaaattttaacacaccaaatatgatttcgtcaatttagttgggttaacccgtccaaactgatatttattattattgtttaccggccgagattttcgaaaaatgtttataaaataaatgagctgaagaaagaaataattaaaagaagaagaagaccttgattttacgtgattcaagtgttattgagttttagtccacgattcaatattattgagctaaaaaagtttcaacatatctcttacaagtgtttttgccttggaagatgggccctaattatcaggacttgatctcaatttttttttccaaacctttgtatgaaggggtaatgttctatttataggtgagatccgagtatgggcaaactcggacccaacaaggtttaaaagtgttaactaggcccactaatggggcaaaatataatgtatattgactttgggccaattgagtgaggcccaattcacgaggcatgatcatccatacgagaggggaccgttcaatgatgccaagtgtccactacaaaaaacagggtctataacgagaacaaatgtcctcgttagaacttcacatgt

SEQ ID NO: 126418 - DNA, 801 bp, Cannabis sativa
tttagggccatttgctatatttttttgaaatgaggacataaactaacatactcctatgatttggagccatttactataatttccctattatgaatctatcgtatcagcatatgaaagttccaataatagtatccaaactcttaagtggaatgagaattgttcagtagtttttccaagaagtgttcaagaagaatattaccatataatacttatggttgatgcagcagtgttgagtactacaagtttagttggcttatgaactattatcctattagaagataataagattaagtcaacattatgtaagcttctcgaaagtaagacattgggttacttttaaggcaatcttaatttgattttaggacaagtatttaatttttttttgttttgttttgataacattaagtttgatcagtattagattttgattttttgaagtgttgatgggtgctaatttattagaaagttaagttagctattggcgattcaggtcttgattgctattgtattagattttaaagtttgatgccttgagttgtattttattctttgaggaaagtgtttgtcttgagttttgttggtttgttactagacaaaggtaacacatttggctaaattttctatattttattttgagacgtgactttggttggattttgtttaactaagttgtgtttacttgtgtttatataatcaagtgtttcatgagaggtcatgggttcgaacctaggaccttgaagctattaagctattaaatgattgtaaaataccattacactatactcaaaaaaaaaaaaaaag

SEQ ID NO: 126419 - DNA, 1148 bp, Cannabis sativa
  modified_base (192)..(203): a, c, t, g, unknown or other
acttttagtcacaataattttagtcacaataaaatgttagtcgtgactaaaacatagtatttagttacaagttgtcactaatttaattttggtcacaacaaataatgtgactaaaagtacatttaatcacaataaaatgtaatttttgtgactaatacctttagtcacacggatcttttagtcacaacatannnnnnnnnnnntataattagtcacaatattttttacttttagtcacaacaaaaaattacaaaattttcattcaaatttcttaaaaatttataaaattttcatttttcatcagataaaattttagataatctataatttctgatgtgtttaatcatattcagaatatgtttcgaggattatatactcatattatgttggctgtctccttattcatttgtaatttataaatttgattaaaatgatgcaaaaaaacactacattcactaagtatttcttcttcatcttaaaagtaccaattaatttgcttatagtacttttaagtaatattgtttttttattaagaaaaattatattaaataaaacccaccatttagataatatagaaacttaattttgttcattaaaatatttaagaaataaataataaaaaatataaatagatagatatttcaaaagttttcgattgctgcgtaaatagtagccttccgtaaattaaagtcaaacaactctttttttctttcaaatccaacaaacaacaacaacaacaaaatttctaaaattttattcaaacaaagcctcaaagaaaattatcatattttagtttatacactaattaatacaagttttcggaacatccttcctaggctaattaatagcgaccctaatgaaatgtattttaattattattatcatttttaaagttgatgtatttgagtaagctagggagaaaatattatatatatttatatactttttcatccaaatatcgtttatatatgtatataatctttaatcttaattaatttgatacattttcatttgtaaatataatcttatccaaccttataattatattaatttaatttttaccatttaatccaatctaagcaataaaatatgtattaggatttgttagttttagctactgttggggttggttattttccttttcctgc

SEQ ID NO: 126420 - DNA, 717 bp, Cannabis sativa
tagtacaaaaatcacataaaaaataaagaaaaaatgcaaaagaaaaaaattacttactaattattaggtatcacatcagtatacattgagtacctttagtgccaatagcaagtacgaaaaataattttaaaaaataatatataaaaaataggtttttttttttattttagtttttacacttcaaaacaatttttatttttatttttgcagaatttcacgcagtaacccttatagtaactaacagagcaacttaaatcggaaccaaaatccgtatagcaactaaaaaaccactggagcaacctaaattttaaatttgaaaataaaaattttaaaaaatatatatatgaagtaatttcccaaaaataaaaccacacaaaagtacttgtcaattgcattttggctaactaccaaaaaaaatgcattcttaatatagtagagatatatttatatttatatgagaatggaaaattttctgatggctaaagtaccgtgttcatttttaatttgcgtattaatatttgttgtaccattgaatagtaatctcgtatgatcgaaaatgatgtcacttaaaattcaaactactttagtattgtgtgaagcttaagaagttatagatcaataagtactggatcaaactaaagttaattaatttgttaaaaatatttaaaaaaattgtacaatgtattccaattcgttttggtatttgaaatgattttt

SEQ ID NO: 126421 - DNA, 1069 bp, Cannabis sativa
  modified_base (1038)..(1038): a, c, t, g, unknown or other
atctctacacttactaaatgttatatgctcaaattattcccatcttaaataatttttgattgttcattatgggctggttcttatcaaaacattaagtagctgagatcttatttatattttgataataaaatttttaatgacaatacaattatgcagactttacaaagtctgcgtatgttgaatttgtataaattctaaaatttataatacaagtaaaaaaaattaataaataattgcaattttctcactatcaataacaatgtgttattttaaaattgacgcaagacccccaaaaacttttgagtgtcgattataaagcaacacgaaaaaaaacataatctaaaatgacgccaaaggtaataacatatatgtacactaaaaatgtcagtttagaactgacaccaaaggtaaaaacatatatgtacactttatgtgtcgattgtaaaacatccccaaaactcattagtgtcagtttacaacagacacaaacactatgatattttgtcttaatggaataggtgtgggttctatgaacaaacattattggtataagattcaatttaaatctaacaccaaaagtacaatttttagtagtgatattatatttatttagatcctcccaccaactttcatatgaaattaccaattttcagttgttaaaacaaatttctattactacgacttatttaaataattcctaaaaatagaaaatattatacaaatttatcttgtaatttttttgcacaagagtatgaatggcgtaaacttgttaattctacatggtgttattctttacctcccaaatattatgtatagccatatagatttctcttcaaaatttataattgctcttcttgatcttgtttatacaagactctaacttcatttgatggatttggcacagttgaacaaatgaggttagatagaagtactgtacttgcacctaaataaagttataagcctctacaaatactattacaatgttagcctttagaggttgttttttcacccctatttataaaaagggaagctaaaggntgtgaaaatacccgctttgttcgaaattgac

SEQ ID NO: 126422 - DNA, 737 bp, Cannabis sativa
tacccataacataattggtcacttaattttgtatcacactttataatagcatatacattatacatatgtgcccacttaggatttttaatccaacattatgactaaaaataaacaaaaaattataactaattataaataattattattatattgtgactaaaaggttcctatattattatatatatatagtgtctaaagttttgggaaagattccgaattagtttgggttgcctaactaacatatatactgaatatatagagggttggtgtatgcaaaaggctatattatgtagctacctagctttgctctgcatgggaccaatctaataagtaataatgaagatcgatcctagctattgaaggagctacagaagttatttcaatcttaatttctcttgcctttaattaattgaattttagaagactgttacgtctattatttctatatcattattggataggtttaataaagttgcacacggttttcttgaaccaattaagtttgaaaaataatgaaatttttatacgaaaatgacctaagacaatttggaaaaaacaacgcaaggcaatttggagttttgtactaattaatatataagggtttacttaattcaaggacccaatggaggcttgaagcgcgaggacgttataattagacttgtgtctagggtttacttaattcaagagtcaaaaaaaaaaaaaaaaagaaaatcccctattaataaaattacacattt

SEQ ID NO: 126423 - DNA, 1776 bp, Cannabis sativa
gagagagagagagagagagaccagcaggcaaagaagatcatagggaggttttgaaagcccacttcggcaaagaatatgatgtacagagagaagataagagtgtgattttttttattctgatttttcaatattggacttgtaaatatagtctctattgcttctagtgtttgaggttgtgcaaaagattgttagtttattttaatcattttttttttattttagtgttgttttatgattgtttgccatcatttttatttaacatcgattttactgttcttgctgcatctcgtcggaattaataattttttctgtgcgttctcgtattgctgtgatggttctgtctgtgggtgtggaagatgggggctataaatacatttcttcttcgttctctttcgctatttttgtattttttttttattctggttctcctgtaagtatattgacgagctcactgacaaaaaagttttgaggtgtgtggttcttttatgtttttctaagcggttatatatgcttcattgttttacatttttttttttgtgtggtgttagtagtttttttattatgattttttaggactggacttgcaaatatagttgttattgcatttattggtgttaaggttgtgcaaatgattgtttgtttttttaatcttttttttttcttttgtcttgtttgatttgttttagtgttgttttgccataattatttatttgacgttgatttcattacttttgctcaatctcgtcgaaattaatggttgttttctggctgttctggtgttgtcgtggtggttctgtctgtgggtgtgcaagatggacagtataaatgtaatttctgtgtggcagtaaaattgaaaagtattatccaaatataatttatttgtaaaaaccactttcttaattataatttccctattattaaagaatttttaattgtaatactgtaattaattattttttaaaaacatttaatttattaatattaattattaataatattttaccatttatactaatggaaaatgcttaggtagagtcacaaaaaatgtttgtacatatagtcattttttttcattacgtgtcactcccatattcaataataagatttaattatttctttttatattattttttaatatttttatgatatcaatataattaggaaagttacttgtttttttttttttttaaaaaaaaaagttattaattacatatataataaaccggcccctaattccaaactctaggatttaaaagaaaaacaaaatactaataattgccaaaaaaagaaagttaggagaaatattataaatatcttttttgagagatgttggtgtaaaaattttcataaaaaaaaatacttcttcttattaagctaacttttttttaatatttttttagtaattattagtattttattttattttttatttttaaatcctttttaaagtttggaattaggggccagtttattacatatgtaattactaattttcttttttttttttaatgaaaaaaatatttgcatgtacaaacgttttttgtgactctacctaaacattatcatatactaatttatatcttacaatcaaggccgattttaagagtaaaccaggtaggctcgtgcttataagcccccactttattgagtacctaacaaaaaaatcaatttatttctatttattaatataattaatattaactatagtaatttcattagatgataacaacacaatgacaaacaggggcggacccacattgtagcgaggggggggag

SEQ ID NO: 126424 - DNA, 1663 bp, Cannabis sativa
ctctctctctctctctcaaccagccaagtctctaaaaacaacacgaatcgacacaatggattgctcggaaaacctgtcccaaaactggttaaccgattttacaggacctggcaaaccggtcaaccagtttgcaccaggtttcccaagcaatccaaaacctacccaaaacgtgtccaaacctcaccaaactttccagaatacctactacaacatccaacaacaaattctaaccaatataacccagaaattcacacaaaatcaaaaagttccatggatgaaccaagcttaagttttcaaactcaaacttgtgcatccaccacaccacaaccctaaaccaactgcaagaacttaattctaacttaaattgaacttacaaactaaatcataaacaaatctaatcttaagagccccaaattcacaaatttgcatattcaaaccaaaatcaaagcttcaataactcaaggtttagaattctagggttaccttcgcttaaaaccacttgaatttagctaacactacttcaattaacaccaaaaaaatctcaggtcttggctggttcttgtaatggtcgagcaaggaagaaagagaaagggcaattctttattctttttctttattttttctgaaatgaataaagtttaactcaatattcagaaaaggaataacacgggcaactgtcaaactccaaaacagcgacctatacccacattccaaatgatcaaaatacccttgatgcttaaacttaagcaaatacaagcctaggggtaaaatagtcaaaaatcataaccccgttcaaactcggtattctactcatctccgatgtttatcctactaaaaaaaaagcttctagacttacccatgtaactcaaatggctatctatcacatttttcgtcgtcgctgatcaaaaatcataaaaaaatacataattcacatacaacacaaataatacctctagagtttaataaaatctccagatgtgagaaattataactctaatgcccacttttaacaatgggacccacaattaaataaattcatgaataactataaaaatattaataattaatgctaattgcctttactaatccatattctataaactcagtcattacaattatccctccgttaaaaggattttgtccttgaaatttaacctaaatagctctggatattaagtcctcatgtcagactctaattcccaggtggcttcctctttcttgatgtttctctagagcacattgaccaaagctatggtcttgtttcaaagaatcttttccttcctattaaggatctgaactgattgttcctcataggacaagtctgactgtagttcaagggcgtcgtaactcaagacatgagtcgggtctgaaacatatttcttcaacattgaaatatgaaatacattatggacagtcaataacactggtggtaaggctagctgatatgctacctgcccgaccttctccagtatctgaaatggcccaatgaacctagggcttaacttgcccctcttttaaaagcgtctaatacccttcactggagaaatccgcaggaaaacatgttctcctgcctaaaatttaatgtctttgcatttcggatcaacataacttttctgcctactttgcgaagcaagcatccaagccttgatcttgtctatagctt

SEQ ID NO: 126425 - DNA, 1093 bp, Cannabis sativa
  modified_base (43)..(53): a, c, t, g, unknown or other
tgaaatagacggtttaaacattgatttctatattgtaaattannnnnnnnnnnttaaaattttgtaggatgttttaaataataactatgatgtacacgattatgaaaaaattttaaactaaaaattcttataaatactgaaacaattaagagttccattagtttacccattttaatagggtgtattatagaagtaccctaaaatatattacctcctcatatgatgtagagacatcatcttgggaatgggtaatttttttttcttatgatacttgataatttaaagtgtccttctttaataatttttttttttttttttgaaatagaatatttttctttctaaattgggtaaattacgaatcccataattattataattattacggtacattatacaatagggattgtaattattttgtgaatatagtacggttaagtgttaaattattattattgctgtctatttataatttgtatatgttatcaactactatagagacccaaaagagaaacctacttttgagagagtcaacgaaaaaggaactaacattattgtgttaatttatcaaattgagacggttaggtttacactttacacacgttaggatttttacttttattatgccatgttaataaatatattatgtattatgtatatatattcacaaactgtggctgtgtgattaaatccttggcttctcattcatagttgatatggtgttattttttctctttctattttgttgaattaatgaatgtatctctcaattggtttcaaatttggtaggtaagattgtttggttttgagattttgatcaatcccgaaaccttcttttgttcattcccgaactaatggaaaacccgtaatatcaaatttggtaatgatatttcctttcaacaaatcctacatttataaaagtgatcaattcttcaaatcactgttattattaatcattgttattatgaatatacattgggaaatttgaatttttgcccttaataaaacccccaatatcaaaatttagaccctccactaatttgtacaaaacaattccactattcctcatttttacccaaaatacccctcaaattta

SEQ ID NO: 126426 - DNA, 744 bp, Cannabis sativa
aagagaattgtaacattaggtatttttgcctccaataataaaccttaggtatttaagtgtataaaatcttaaacattaggtattaatgccgcaatttaccctttatttaaaaagaatgaaaattaatggtatgatatcgattttcttacaattatttactaaatttagaaatagaaaaaataatgatatccacacaaaattagaaaaaaaaaataaaagaaaaaattcccccaatttttataggaaatatatttttctttcctaattattttaattttaataattaattaaaaataaatcagatcataaataaaccttttaaaagtctatgaataaaaaataattacatgatttgatcatgataattttctcaattaaattatcatgataattttctcaattaaattatcatgattactttttctaattatgtaaataaaataatatgattctaattttctttctggataatttaatatgtaaatagtataataaaatattttttaagttattttttatttaagcctattcatttctcccactgattaatctaattccagttatagtaataaaagcgcaaatacttaatgtatatgtatacgatatacattaatgtatttttattatttttcaagaatattaatctcgctaaaataatagttttaattaggcctgcacatgggttgggttgggcggtttggcggtttttttatttggcggttttttaaaatcacaacccatacc

SEQ ID NO: 126427 - DNA, 652 bp, Cannabis sativa
  modified_base (587)..(596): a, c, t, g, unknown or other
gggaatcatccactgcaaatctgaccacattaatattcaaactattaataatttcattgagagtattgctactacattttacaattgacactttatgatttgttggcgatatattttgaaattgtatgagatcttatacttaattacactaactgcaataggacaccgagaaagatgttaagtaccaatgatatcttttagcaattctctttcattaactactaagcatttttttcacattttttttttttttttgagaaattatatttccactctactaagtacatcccaatatttaaaagaaaggtttgcaaaatatgctatttatattttgttaagaaaataatctgcaaaagatgttaaaaaaactgtaaattagtatttttgtaaattttttattattttaaaaatatatttatgaaatagttcttaatgaaaaagcatataatgagtttggttcgaaatttaagtttttcaggtgtgggtctggacggaatatctttttcaacgtgtgaaaatattataatttatgttatataatgatttgcattataattttaactaataatgttaattccatttttggnnnnnnnnnntgacaaaaatattttattatttaatgtatatttcggctggcatatattgatatggt

SEQ ID NO: 126428 - DNA, 971 bp, Cannabis sativa
aaataactaataataattattatcaaaataattactattaatagaaatacgaaaattttattgaattctatgtgtgctaaatgcgttatatataaaatttgatgttttcatgtttttatgttctttatgttcaacaacagtaaaaattcgacggattaaccaatagtgtcgcaatagtacgatttagtattttagaattatcaaggaagatttatagaccgttggattttgagattatgtggggtagttggttatgaccattttacccctaataccttagtagtggcatgttttggtataggaaaaaatggactgtttgccattagttttattatttgttatccagttttttacacattgacgtggcgataggaccgagcgacacgtgtcatatatctctgatacctaggcagagggaagtatctctagcagcctgcacataatttgtcaacatctataattgtcgattacccgagcagagctatagaaaagacatccgaccaggtagaagactgttatgccaagcaacttacaagggatgacaactttagaataatcttgttatgtccagacatgaagacaatccctatgatcgtgggattgagtcaaagaaatatggcaacctgttcttatttcctatttcatatatcgtaattatgtaatcattgtaatttcctattttatgcattgtaagcaaaagagaaaccatccctcacgcattaagctcctattaatagtgacctaacctcactatgaaagggatcgaaagaattgcttcagagagagagagagattctagagaaaaaatagtgatataagagaatttctcagagatcagttgtaagagctttcaaagggggagaacattttgttcctcctcttaagtcaatacaatacaagaggagtaggctattagcacacccacgaggccgaacctctttaaaatttagtgttcactttattttactatt

SEQ ID NO: 126429 - DNA, 1169 bp, Cannabis sativa
  modified_base (1099)..(1126): a, c, t, g, unknown or other
tttttttttttttttttttttgtaagggattctatatccaattttattttaacaaagtggcatggtattaccaaagtagctaattaaaaattttgctttttaaattttgatatgtatcaaatcgtgtcttttaaaatttttagaccattaaattttttgtttaactattgagattgttagattcaaaaatttattatgtttgatttcgttcaattatactaatgtgataattgtccatataccaaattgtatccattgaattttgatatatatatatatatatataatatcaaattgtgtctttctattggagagagaatattgtcatatattaaaatgtaaaaatattaagctacataatcaccattttaagatggaacctcttaatttgcattaggccaaagtgcataagatacaatttaatataattgtcccccaaaaataacaacatactctccccgtcaagaaaaaaacgtattgaaattgtgaatttgtcaacacgggaacagagtcaaattaaaaataatatgaaaattctggtatgtattgtatataataatggactattggtaatattaattgataggtaataaagtttattttgtcattttattatgagaaagagaaaagcaatagcctatggtttcgattctaatcagctttcttttggaacctcaacccatgcacgtcgtcacccaaagtctaaggttcttattatttagaggtttcgtgtacaaaacaatgggaattgattctgtttattttgatggactattattaccatcaaagtacatacaaaatttcaaaataatactctttttcttttttatcataatttaagtttatatatttcccaaatgtaattaaacacatcttaagcgtttacatcttaaacaaaacaaaacaaaaattattatgacacttggaagaattatatacgttgagcttatagttgatcgagccctattgagctaaaatgtaattttttttttttttatatataaaaatcattattttagttaaaattaaaactcccatcgaggtgggcatcaagcacatgaactaaattaaggtgccgtttggtaatacttttattttnnnnnnnnnnnnnnnnnnnnnnnnnnnnaaatttttgtttttaaaatttttgtttttgaaataaaaatgcg

SEQ ID NO: 126430 - DNA, 620 bp, Cannabis sativa
tggtgtctcgatcgttcaacaacgtcgatagaaaaggtcctatcatttaacaggtttgtcgtcaaggagaagaagatcatgaagttggagaagacaagttggttccttttcatatattgttttaattattagttttattatatttttgtttaatttttttataaaataaaataaatgtactgctatttgctacttggggttgagttgattatgattttttttctttatataaataaaatatatcaaaattattaatcctatgtctcattgtaactaaataaattaataccacaagattgagaaataatgactataaaattacactcacttgtgagagcaaaactaatcgtctcacatagaagtattctataaatattaattttaattatgttcttatagaaaaatatgtgccatttattattattaatttttactttaatattaattatatatttataattttttaaatatctattctatataaaatgtggctatgtaatagaatttttagtttaacgatgttttttaagtttttacgttaactttaacagaatattctatattcattttataatattaatatatatttaaaaataaaaattatatgaatattttatata

SEQ ID NO: 126431 - DNA, 2326 bp, Cannabis sativa
tcacttttgtaagtggaatgttattatcctccacttaagtctagcaaataatttaaattaacataaggagtataatgacgactggtataatggggacatcccgagtacatcttaaagaaaatagaaatgaaggtaaaaattaaaaaaagtaaagtaaagttggtatataatgaaattttctctattttgactataataaaggcttcgataggccttaggaaaatatatattttggaccctgaattgggtgggttgtaaggcgaaactcgttttagcttaggccctacatctttgttttaaaaaaatagtatcacatcgtattgtggatgttgttccatataaaataaatggtagagtattaagctacatataagaacaagaacatggattactccatttattaccaattacacatcgctttgtaatttttgaatgtatattttgagtgaaatatattattactatttataaaatggtatattttttagttagcttacctctgtggtggagaaaatacaaggttgaacaagctttatatcataagctggtacaacaatagtggttagggtttggctgagagtgagatcaccaagtagactagaagggaatgaagatactttccatcatacttaggacgcattaaccacctcatccaacttgctctccatccaaacaaagaaataccactgtcacaaaaaagttatattttccttttttaaaattatgcatatgttttttttagtaaattttaaaaataccacatatactataaaaattaggtacctttgggggaagatcttaggcgtatgttgtaagtaaaaatggttgatatctttagcagcgaacatgggtcgattgtgtttgttgggagcagcaagcatggtggtgattaagccaccagtgcttgttcctgagattacatcgaaataatctgcaatccttacatgtgctccatccaattcctgaagttttgattcaagaaaagccagaatagtgcctgggataatgcctctaatcccacctccatcaatacttagaactgtgaacacttttttcacactactagtacgccccattatataattaaactcaaaacaaatcgaaatatgaaactcaatgaagcatctatgttatgttacttgtctttatatatatatagctagggagctagctagagagagtaatgatgagtaataagtcagaaattaggtacctttgtactaatgttaatttatatcctaagtacgacgccatggttcattcattattgattctgtcaaaagtaataatatttcatacacatacacaacgggcctacacgctttatatatatatatatattcaatgaatgtgtgagcagtacaaagtgtcaataaatttgttcattgtttttggggtcccaacaaaccaacctctagtgtgtcctgtatttgttgataacaatattaattataaatattatacatatatttatcgtctcatatatgcagctacttaaaaattaactgttaatgcaaattattaatattattcaaatttgtatgctccaactgaggttttgcctagctcgtgtgtgttttttcttaatctcccttcgtgtttctttgggtggttaatttctattgtctgttccttttacgtacctttgctaaaggaaggtatccaaagtattaatttctttctaattttctgagtggttggttactatctcatcacgtgttctcgatcgagttaagagtactcatggaaggggacaaggggccggtagtaggtgaggatggaagtatccatattcaatgtcaaatttagagaatggcattgatggtgacttagagaatagttaagcagatgatgaactggctctcactacaacaaaaatcatttatctcttcttaaaataaataattaaaaacgtgaattttaaaacaactattgcacaatttaagtcttgtgtacgtcttttgatatgttgtgacaagtcttttggtttgttggtttgtcgtgttgttgtttttgtttgatttatggggtcaagtagtcaacatacagatactatatattgatgagagttatatctcaaattcatttggatgaggaggaagaaggaatcctaattgcaggagaatcagagggtgatgtgaactggtatttgatgatcggtggtgtttggttgggaagtttttaacggggagactgatcgatttcgatgcaaaaatcataaaatacgtttgtaaaaatattacttatatctccatttactatatacacactattctactcatgtttattgttttaatgagtgtttatgattgtttttttttttttt

SEQ ID NO: 126432 - DNA, 511 bp, Cannabis sativa
ttagggcacaaaacccaacatagccccgtggactagtagtatttgaaagaacacagataccacatacaattctcttatatatgtcaagttttaaattctgcacaatttatttttgtttctgttctgtttctacaagtcattacaatcacattttatttacagttttttaaagaagtatattagtatttgcaaaaatacaatttttttaatttctatttacaataaactttaagttaatatataccccactataaaagtaactatttttagtgacaaatttttagtaataacataaattttttgtaactaagtatgatttttagtcacaacaacaaattatttgtgactaaaatatagtattaaaattatgctgagaatataaagttacaattattgtagtgactgtagtcttcaagataatgttgatatatagcaccttcattttctataatatattgccataataatcaatatctatatataatataaaggaaagcacaaaataagttta

SEQ ID NO: 126433 - DNA, 803 bp, Cannabis sativa
taagtaaagcatattcaacaattgcttatagaagattggaatattgttaatctgtcaataaagaatacttagtgaacttagatggatcagattcccaatttctttctaaaaagtttgtaaatatgtctgaatacttgttcttgactcttgccctttattcctccaatcaataaaatgtaaaaagttttcatcttgagcttaagtcaggcacaagtttcacatgagatattgaaggagccatggattaaaattcaaaccaccatactaaaaataaatggaaaaaatattacatttttcatggttttcttctaggacaaattttgaaatttacgaagctagctagctagtgacataatattttttagtcttgcttatgtgcttttgttaatgtttatattttcatgtgtttattttccccacatatatataatgtgtttgtttaatatcataatctttgattctttacatattttaatcatctatctttttatttgatatttatttaattgtagaaagtattaattttcataaatggtttggccattgtccatacatttaggtggttctatcttggtttcttactctactacaatattttcgttggactttatagactgtatgagacttatatgtcaaaatcaatttgcatcagtttagctttgaagaactcacagaagccacaaattgattcaatgaagagttacactacaaaagttgctgcttttagtgacaattttttagccacaacataattttttttgtgactaaatgtgatttttacacaacaaaatgttacttgtgac

SEQ ID NO: 126434 - DNA, 1700 bp, Cannabis sativa
acaaatggcatttacgccttggacatccctctttacggattactaaatccttgaataaaattcttcattttgatgattctgactcatctttatctccttgtcatgtaagtcatttagctaagcaaaaaaaagctacattttaattcagctaataacatggctcctactgcttttgacctaattcatttggatatttggagtccttttcgcaaaaccagcatagaaggttatcgatattttcatactattattgatgatcacactagatttacttgggtttgtatgcttaaaaataaatttgatgtcaacattattatacctcaattttatgcttatatactcaatcaattttccatttctattaaaggcatacgatgtgataatgcaaaagaactaaacttgtcatcttttcacaactaaaggcattcttccttatcattcttgtgtagaaagaccacaacaaaattctgttgttgaacgcaagcatcaacatatactgaatgttgctcgctctcttgcttttcaatctcgtttatattttaggtattggagttactttattaatattgttgtttacttactaaatcgcacaccatctgttttacttaaccttaaatcttcttttgagttgttgtataacaggttgccctcttatgatcatttccgcacctttagttgtcttgcatatgcttccactttggatagctcaaggcacaaattttctccaagatctcgggcttgtacattcattggatacccagttggtatgaaagcttatactccacttgaccttgaaacacatcaaatatttcactctagagatgtcattttttatgaacatatttttcctcttaaaaatacatgttctaatgataatattgatgcgtattttccaacactaatggttcacatagtggtctttcacatgctcctttaaaggttgcggtccttgggcttatacaccctccaccgtcgctcgaacatgtggccactcctaccactttcctactgaaatactgcctccaccaacagctattccagcccatacaagtgactccaacgtcactacaacatttggccggacgatcattcatgctgctattttaagtgcttatttggtctctgaaccaacatcttattcccaagcttctaaatttcccatatgggtaaaagctatggatacagaaaccgttgcacttgtagccaataaaatttagactgttgtctctcttcctgttgtccatcatttcattggctacaaatgtgtatatagaataaaatataatgcccaaggtaaaattaaaaggtttaaagctcgcttagtatttaaagggtacttccaataatttgggatagattaccttgaaacttttgctcccgtagcaaagtttaataccatcaaagtcctccttgctcttgctgccattaataattggcaactctatcaaatagacattaataatgccttcctccatggtgatctcaatgaggaagtttatatggcacttccccccggttacaaacaccaaggagaccttcctcccaatgctatatgcaaattacataaaagcatctatggtctcaaacaagcctctcaacaatggtatgtcaaacttagttctactttggtaagtgaaggattcaaacaatcctcttcagatcactctctttttattagatcttctaacaacatttttctt

SEQ ID NO: 126435 - DNA, 1161 bp, Cannabis sativa
tacaatcacgttataaactgactaaaattctagatgtagtttgtaaaggcaattagttatatgacagttaatgttactaatggctattagaagagtttgatacaggtgtatagttgtattgttttcagttacaagttataactctctttgagcttgtatataagttgtacatagttcattgattcattgattcagtaataaaatatttcttcctgtattaatcttttcagtcttaatgagttcattttattttgtgttcaagaagaagaaaagctgaagtaaaagaagactgaaagttaacacgatatgcgatcttttccctttctgacatggttgttagttagttatttccgttactgttagttattatctggttgttagttagttttgtatcagtggcattttagtcttttctcattcatgtttgtaagctcagttgagctatatatatatatgtttctcctgtttgtacacttaattaatcaatacaattcattcttcattttctctaaatttgttttcgtaatatggtatcaaagcggggaaaagaagtttcccctcgatcttgatctgttcttcgtcctctttgctgtgttttctttccagcaaagactctcttctcttccctgaagttctattctgaacttcttctttctttctcttcgatcagcgcttctctacctgatcattcttcttttcacccatggagaccgataaccaagttgaaagtcaagaaacggacgacaatggaggacatgccactgttgaggaaggaattacttccatggtgcagaacagtcgtactttgcagaggaatcctcttgaagacccttcaaatccctactacctgcatcatggagacaatccaggtaatattcttgtttcacaacctttaattggacaagaacattacatgtcttggagctgtgccatgcaattggccaaatctgtcaaaaacaaaatcggattcctttatggaaccattcctaaaccccttccctctaatcttgtcatgtataatgcttggtatagaaacaacaacattgtcatctcttggatcttaaactctgtttctaaagatatctcctctagtcttttatatgatgagtcggctgctgccatttgggatgatctaaaggttagatttcatcagaaaaatgg

SEQ ID NO: 126436 - DNA, 2540 bp, Cannabis sativa
  modified_base (1252)..(1254): a, c, t, g, unknown or other
caccttaaaacaaatgaaaaaaaaataaaaaataaagatcaatttaaacgggttaaccggaccaaaccgataaaaattattgggcgggttacattttttttatttttttattagacaggttacaattagatatttgcaacctgatatttatattgggttggtaaaaatacactataacccgataaaattgaccgatatacacccctacaaagaagcatagccgccaatttagaatgaaaatttggaaaattttatatcttttaagctaactaggatttttttcccaaaagcttttgcatggatgcccattaattttttacgttgttaaaaattctttccaattgagattgttatatttaggaatttctgtcccattttgtttaaatttattaatgggtgcttaatgtaatgattatccatgtactaaatcatgccgaccaaattttaatatctactaaattgtgtctctaaattttaatatgtacaaaatcatgccccaaaacttttgtccatgtcaggtgcccgttaataaatttaaacaaaattagacggaagttcttgaatctaacagtattaatagtttaggaaaaaaaatttaacagcttgaaaaatgcaggatcataatttggtacatgtcaaaattttagggggaaatcctcatttgacagtttttggaaaagctaaaagttatttttttaaaagttgtaataaaaaggtatttggtaagtagttaaaaaatagtttattggagaatttatggagaagctaaagctagtacaacccaacttttagaaaaaagttgttttgattagggaaatttaatttattatgaatttattgggccaaaattttaaccctaaacctaagtgtaacaaaatttgtagaatatgttaatttttcattaaacccaaaactacccctcccaattctcaacacccgcctctctcttcctctcttgtctttatcgctctcgaacagacccaggaccccacgacaacccaccaccgcagccacgacccacgccacccaccactgcggccacaacccacgacccacaacaacccaccacgacttctccgacccatgacaacccaccactgcagccacgacccatgcatgacaacccaccatgacaatctcaaaggtaagattttattccctccctttttcatttatattcattgtatttttgcatgatttagggttaaaatgtataagatgttagaacttattttaccaggatctaaatttnnnaacatgtatgtttgattataaattataatctaccatcctaaatatgaatttcttaaaataatgaaataaacacatatacaattatagaaaatcttacattcgtggcagcaaaatataatgtctccttctattcaaatctctaacccttgatcctttctatcgtagagtatgatcaagatctgaacctcgatcttcttcagttggcatatttctacacaatctttcacactatcttgagtactgacttgaattgtgtgggcaactcctcaattcactatagagttcgaaaataatagaggaagaagaagaggaagatttcaaaaatagaatggaggctctctctttattttctaattgtttgataaagtagtcttctgataatcaattgaaaataaaatccatcttattctatttataggatagcttctagggttaggtttagaattaaaatagaattgaaagagataaaataatggttttaatttaaccttgttggtcgaaccctactgggtcctacaaggtttcaattttgtcattgttatctcaatttttgcccacctatcgtggcatgtctacgtggcagatatcaacatcacatggcagtatagctcaccaacaagaaggtcaagtcatctacccaactgtaatatcctaataagcctaatggtagataattagggtttatatttatattatgggttaataaggtaataagtggaatcataatcctactaatctatttatgtataaaatttaaatttttacaataagtgagtaaataagcgtaatttataaattatggagatttatatagcatgtgtgaatgtgatatgagctatatatggaatgaaaatatttttaggttcgacgaccttgaagcctcgataagtggataaataagtgtaatttgttcatcacggagatttatttgaaatacttagatataatatgagttatttgtgaaataaaaatattttcatgttcggtaaccctaaagacccgattggaggacaaaaatatcacaataattttagttagaaatattgatgggattattagaataagttgattttagaaataccagggtatttcagggtactcaaaattggccaaataccctagaaataaagattttttagtgactaagaaataataagataactattaataataaatttttttattattattattattattattaatatattattatcataatattaaattatgtatataaagttatcgttaatatatattataagttacagtaaataacgaagaac

SEQ ID NO: 126437 - DNA, 901 bp, Cannabis sativa
agttggaatgtccaaggaattgggaacccttggacattacgtgccttacagtcccatgttcgggaatttaacccgagtattatttttctgatggaaagtaagttagtgagaagtcaagcggagaggttgtgtgctgttttacaattttctaagttttgggtggttgatcgggtggggttgagtggcggattgttgctcatgtggaaggatgagttggaaattcgagttgattttagttccccaggacacattgcgggtgtggttactgggactgactttgatacatggaacttaacttgcttttatgggaatccggataaacaattaaggaagttttcatgggaattattacaaaatattggaagagagacgggtggaccgtggctatgcattggggattttaatgagattgttagtttggcggaaaaggttggtggtagaatgaagagtgcgtgagcaatggaggagttcagggcggtaattgatatgtgccagttaattgatttttgtacttgtaagactgagctcacttggtgtaatgggcatagagataggggggtgatggagagattagatagggggctgtgtaatgaagagtggttgaaattatttgaaggggcggatgtgaaggttcttgattggtgggaatcggatcatagagctttggtggtgactttaccaattcggggtcaaatggggactagttcgaaagggggtcttaggagtcgatttcattttgaggaagcttggtgtgaggaagatgaatgcaaggagattattcagagtaattgggatagaggggggtcagttgattcagctattggttttagaaggaaatcgaaatcttgtgggcactactacaaaaaggagtattcacgacggttctaaaaacgcttttttt

SEQ ID NO: 126438 - DNA, 744 bp, Cannabis sativa
tattatccaaacccatatttcatagggctgaacatttagacccgtaaacccagaaaacccgaccacccgccccgacccgccgaccaaaaaactgaaaacctgaaaacccgtatggtcgggtcgggttcaacccaaaaatacccccacgggtttcaggttcgggtatagtgaattattttttttattcgggttgtaacccgtaacccgagcagcatttaaaaattatttttttttattagctgatagtgaagtcgtcattttccctctctcgctcattgctccctctttcgcggttctctctctctctctctctgttcgacatcatgagaggttgaggcatgcaaggggaccgcgtggtttgtgtggatttcagatctaccctccgtgtggatttttgtatcgggtttgtgtggatattaaacccatgtcatatttaaggaagagaaagggaacatgtcccaacccagagcttcataataatgataataatgatagttcagagagagagaaatatcacgtaacccgaggcagcatttaaaaattaatttctttttattttattaaaaatttaatattatttacttttagttttcagactttattattaaaaaaaattgcctattcaaagaaatttgattttctatacttagaaaatcttaaaattttttccctaaatacatacttaataatattggtcatatatgactacattcctaataccccacaaataccccttccatttga

SEQ ID NO: 126439 - DNA, 1453 bp, Cannabis sativa
cccaatccccgccccgtgtgcatccctaaccacttctctccctatttttggtccaggtaaggagagtggtcattctaccattaagcaaaggaagagaacttttctagctaccggaagttcaggtcaaagtaagaagttttgtggaaatcaggaaaaaggaggacgtcgaacttactcctaccctgagtatccgtgctgcaagaagcatcaccctggggtgtgtaatcgaagtgcttgttttcagtgtggatcagttggacacctcaagaaagattgtcctcaattgaagaagggggaacctaagctagaagccaagcctactccagcacgggtctttactatcacccaagttgacgtcgcaaccagtcctttggtagttacaggtcagcttcttctcaatggcttcacttatactgttttatttgattttggagctacatgctcttatgttgcatcaagggtacttagtaagttgggtaggcctagtgatgtctttgaaatggggtttggaaccctgctacctaatgttgagttgattatctctagaaaatgggttagatatgtgctaatcagaattgagggcagagaactaagtgctgacttagcagagttacctttggccgagtttgatactatactggaatggattttctgtctaaatactctgctaggattgattgcaaatggaaaatggtaactttcaactggaaaatgaggaaccatttgtcggatcagttcaacatttgcctagaatttcaactctgaaggctagggatttactacatagtgggtgtgtaggatttctagcggttgtgattgattctaatagacccgtgatactcaaatcgaagaagttcaaagtggttaaggagttccgtgatgtgtttcccgaggaatgatcagggttaccaccacagtgggaaatagattttattattgaccttgtacctgggacaaaacctgtttcaaaggcaccctattgtatggctctgaaggaactaaaagagctgaagatacaacttcaggggatgttggatctagggtttacctggcctagtgtatcaccctggggagctccaattttatttgtaaagaagaaagatgggactcttcgaatgtgtattgactcggtagcagtgaaacgcgatgttgggcctttagagagtcatgtcttcatatggtttaagattttattagtagtggggcaacatgattagacgttggtagtgtcgggaaattgttagggtttggaaatgaccaaattactcttagatagcatgcatgttttgatgtgtgtgatgggcaaaattgtcttttttccttaaaattcttttgtccttttgtggtttatttaagagtaataatctaattttcttttaataaaagatttaagttttgataattagaaatttacccttttcatgtaaaatctagaaactctctctctctctct

SEQ ID NO: 126440 - DNA, 795 bp, Cannabis sativa
ttcaaaatgttgtggaacttagctatgataacaatttagagtagatttaactattactatatgctataagtaatctagaatgagtattgaatcagctaaatcttttttttgatgctgatacttaatattttgaaggtggtgatgcctaatatttttagggcgttgaatgttgctgttaatattttgagtatgatgaacaactaacatggggttgttaatattttgtgggttgtagacttctatggactgttgatattttaagtgatgaatactttgactattaatatattagtttgtgaactttggaatttcacatttgtcataatttgtttatgttgtggcagattattgatttagaatgtgaaactgtaatgaaattatataatgtgataaattttttatgtatgatattaagtgtatatatataattatatatgaattggatagtaaataaggcaagtatgaattgaataaaataattttttctcctttatgtaaggatgaatttgtataaataaattggataaatacgaattaaaagaacaatcataaaattttgaatgttttagaaaagatcgtgtcaatcgtgtcgtgtcgtgtcgacacaaaaatgtagtgtgtcatgttcgtgtcaatgtattctcaacccaccgtgtcacgagtcgtgttcgggtcagatatttttcttcaaatgtagtacttcaacacgacacgaatatgacacgctgacacgttttgccacccttactataagtgttattctcacacaaccagtcaaaagccttatcactatca

SEQ ID NO: 126441 - DNA, 1479 bp, Cannabis sativa
  modified_base (123)..(123): a, c, t, g, unknown or other
  modified_base (218)..(220): a, c, t, g, unknown or other
aaggtgtaagtaaactttatcgttggttatcatgtcagtgtaaatccaatatactgacaaattatgagacttaactttaaaaaatataatcatgattatattctactgtgttgacaacactanaatcatgaataactatatgttctcaataactactgtgttgacaaattatggtcttttattaattaatagatctaattatattgaaatgaattttnnntagggcataaaatcccaacataagcatgtttggtacaataatcagttggaaagcaaactttcaaaaggtggtggtcctctcgacaactaaagctgagtatatggccttgatggaagcgatgaatgaggcactttggttgactaggttgatggaagagttaaaactcaacgagaaggttattattatacattgtgacaatcaaagtgcaatttaattaaccatgaattatgtgtatcatgaacacaataaacacatagatataaagattcatttcataagagaagtcgttattctctaatgatgaatgtttgtaagttgtaagtattttattaaaaaaatcaataaaattaataaaaaaaataattacttgcaacaattaaagtgtgggagaaaaaaataagtgattgagaaatacaaataaaaaattatttgagagaatgtgtagatgtatgttatggtgtgatttgagcttaaatgaactttcttatctacctttcgccctagccttacataataagcctataaagtcctcttgatctttggattgtgtgtaattacattagtgaaaaatagtttgataattaagcttatggggtgaattttcgtagaaatacacatttctttgagatgagcattgattgctggcatgtatgaattgatatgaatgttagtaatatgatgagttgattgaacatacacacacaaaaattgagtttgaaaataattatcttgagttgaaattctaatgattgaagagtttagattatcttggaattataagtggatgtacatttatttttcataaagaccaatctctttaagctttattcattttatcataacttactcaaggacacacaagagtcactgttagagaaataaagggtttagttatagtagttgtgaattatttttggtatatcaactttttagtttcaatgtttaagtttatttttttggaaatttctgtagtagacatcctaaagggttgttttggtagactctttatctgtttcaactttcagcatttataatttttttcaatctaatttctttttatgattgagtacattgtagctatttagtactacttgtaaatttttagaaaattctaaatagtttacaatgttgaaaataaagtttaaacagttattaaccacgagtataagaaaaaataataaaatatagaataattaggatttttgcccctgaactttgacatgtaccaaatcatgtccctgaacttttaagatcgttaa

SEQ ID NO: 126442 - DNA, 835 bp, Cannabis sativa
  modified_base (423)..(423): a, c, t, g, unknown or other
acggtaatgatcgcaacttataattgtgtgattgtttttaatcacttcttataggtatttttaatatttttagttaattgataagttataattctattttttttttcatcttattacatgatcgtgtataatatagttacatgatacaatttttcaaaaaattcaagtaatttagaatgttgaaatcacaatttaaacaacttattgcatttacataaacaacgtgttcaataataaactatttaaattttgatttcgaatctcaaacctaattaaaagtactactacacatattgtcttttaactttgctcatcatggtatatatttagggttaggcttaggctaagacaagttaactaagtccgtgcctagggctcactcaatttaattaggggcctaatgattttttttttttaaaaaanatatatatatatatattattgtaataacttttaatatcatttttcttaatgtctaatacaattcaaagtcagccctgtataaattaatattatacacatataaatattttttttaggatgaactgaaaagaggcgatgtttctaaatcagtccaatgcaaaatgcatgaagatggcgtgtctgaagaagaagctcgtcaacatattaagttattaataagtgaaacatggaagcttcttaataaagattacataaatttggatgatgatgatgatggtgatgactactctccaatattgttctataagtctaataatattaataaggctttcattgaaatgtgtttaaaccttggtagaatggcacattgcatttatcaatatggagatggacatggaattcaagatcgcca

SEQ ID NO: 126443 - DNA, 1098 bp, Cannabis sativa
  modified_base (43)..(55): a, c, t, g, unknown or other
tcatttaacaaaacacaaggtctaatctgtaacttttgcaaannnnnnnnnnnnnaatggtatttacccttttattttcattctattctattttatgtgcttttttttttatttaagcgtttatatattatatcagcataatctgggattcgaacccaagacctccaatacacacgtatcctctaatctctatggccacttgagctggcctcaagtgtcacttaaaagtgtttatagtttctaattaattcatttaaaatttctatctaccataagcatgggtccattatgggccaaaacactataacccaaagaattaacaaattaaattaaggtctcttcatgatgagaaatatattaaaaaaataataggcaaaggtaagtgttaactaatattattataagttttttttttcgttattttgaaacaaaagaatattagttttatgaaacaagagtttaataatttaaataaaactaatataccgttataacttcattttgaaatgtatgggtaggtggggtgacaattcatatacatgtatagtgttcgtgagcattaatttcaagcccaacaattattatacaattaatttgtatacatgttaaatttaagagaaatgctagtgtctagtactctcttatgtgtcaatatcgttattggtccaattaaatattgggtctcatataatttaatataatagtttttggggagtatcgctagccaatcacaatgcgacatgccgcaaaagtactagacaccactagtacctaatagcaatgctctgaatttaaacctaacttatttattaatcgtgaaaaattaacactcaaaccaactcatttataaataagttgatcttacccgattataaagagtttcatatttttgttaacttatacatctagtaatatatttataactagtttaacatgtttatgaaaattttatgatctatttagcattattttcatgtcttatttaactaacttaatataataaaatattggcgacaggcagtggcggacctaagatttaagttaagggggtgacattttttttttataagtgagggggtgcgtctttttttttttttt

SEQ ID NO: 126444 - DNA, 2162 bp, Cannabis sativa
agagacactcttcattatgcatttgatttcattgttgcataatcccattagaaaacatcttttaaaaaaaaaaattacataacttatttatcaaatctttgatgagagagttaggtttaaactggtaaaatacccttgagaaaaaaaaatattattgtgaatattttattgtcttataatatattatttgtcgccgattccagagattgataatctcatcaagtaatatgtgagggctctacctattggggtacctcctatggtttctggtcacttgccaggccaagctcactcttctgctagaggtaatgcccaaagcacaagatcaggctagaagaggttcccttctagttcacgaaagggtcaacaccatttttagaggatgaccagaacaaatacgtgcaagccctaaaccacaaagatgagatgagaacatttggttgaatttggcacaaatgccccacctcacaagccttcacggatgagaatgctcagatgatacatttctcacaccatgatcttttggtaatagaaactcaaatagctatcaaggttgcaaggattttggtaaacaatgatagctttgcaaacatcttgttcaataaaagcctttgacaaggtcgggtcggtggttagcaaatttctttcctgcactttcacactatttggcttctctggagatatctatatcccaccgggaaagattaagcttttggtaatgttgggagattcttcgacaacctttaaatactactttcatagtagtggattgtctgatgacctacaatgtcatattttaaaggttagtttttgtggagtttggagtggtcacatccataagacacttgtgaattgtaatgtgtaagtatacacaatcgttaaacaaggaataaagtgaaaaattaagtatcttattgtcatattttaaagctaattgtcaaacaagtatcgtctctacaaggattgaaaattagaaattaatttataaaaataattactaataaagtgatttcaataaaaataagttacaactaaaataaagtgatgagaatatataaaatttataaaacaaaaactaagagagcaaaagcaaaacaagctaaaattattaaattgtcttaaaatagaaatttaatacaatggtgcaaaaaaatgttgtagcaaaccgattttggttttggtaaaaaaaattgatagaatggtgcaaaacgttgtcaactaagaattccaaacaagttcataagctttttccaaagtcttatggttttggttctttaattaatttaaaatatttgtgcgaaatttaactttgatacataggaattaacttctgtaatttcaggtataagatcacacttctaagttcaatgtcaacttagtcataccccagtttgaaagcattgccaccaatctttattgataatgagaattaaagatatcaatctcaagagctacaaggaataatcacagtaagtcatctatggtgtaatctttcaacactcattaactcaccaacccgagccaacataatcgacaatgttgctcaatacaatttcccaatcccaactctctctccctctcaaatttctctctcaatttctcactctaacttttctctctactgtgttgtgtctctctgatattccccttattcttctttctattccctttgtgaaatgagatgagtagtcctccttatatagacaaagggacccaatatgcaagttgtcctttttgacaattaagttagttaaagactaactaactaaccgaatgaaagttgggggtttaaggaataataccacaaattccaccttatttcttcaagaaagctaagcatatctgtccaatggaggtgtagtgctttcatgtgtagctactaagaaactaaggttgagtaagtccaagctatgcttgaacttactaatgttgagttttgtgccctaaataaaatcccttttaatataatcagatttactaattaataaaagataagaaattattctatgttgcatggttcacatgatttattttattattatgtttaatgtataaattctattaactgcagaacatatataaatatatatttgttcataattatagtgtcgtctatcagtggaatataatcatgattatatgttcaaaagtttaattcccat

SEQ ID NO: 126445 - DNA, 511 bp, Cannabis sativa
  modified_base (472)..(475): a, c, t, g, unknown or other
catgtgttcttcaatgggattgtttatgtactggttaacattgtccgagaaaccaatgtcaggtcttgtatgagataaatagatcaagcgtccaactagcctttgatatctccccctgtccactagtatacaatctatttctgaaccaattttcttgttggaatccattggagttgaggttggtttgcatcctaacattcttgtttcttttagtaagttcgaaacatacttacgttgcgagacaaaaatgccatgttttaattgagcgatttcccaagatcattaatctcgaattctctatataagaagttttcaatctttccatttcctccttataacccgtcaatatgatgtcatccacatagacgattaggatagatatcctttaatctgttgagaatctaacgaataaagtatgatcggatcccataagaactccgcagttaagcgtgcttgggcgagagtagtactnnnntgggtgacctcctgggaagtcttcgtgttgcacccc

SEQ ID NO: 126446 - DNA, 1098 bp, Cannabis sativa
atatacttgattatatagaatataatattttatttaattttataatttaattatttttttttttgctgtgaatcattcattttttatttgtttattattatatattttgaatttaatttaatattatatatatttattttaatttaagattttttttctaaaaagaaataaataaaatactctagtctattcttaaacaaaacacaagattactttcaacataatccaatcttatcctgtctagtctaatcatttttagttcaatccagtccaatcatgcgtaccaaatgggcccttagggtattacatatattgtagacaaatataatttagtacatacacgattataataaaagaaattaagagtacacaaaatattcagcaaaatattataaaattatatttgtatgtactaatttagtacatatattgtagacaaatattataaaattatatattgtagacaaatataatttagtacatacacgattatgaaatattcaatcttaaaaacttaaaaaaagacataaactaaaaacaaaaaataattcagttagaaaaatcatgcagactcaaactcgctgctatagtgataaaataaaacagtcaaacgatcacgatgcacttcaacatcaaaatcgtcagaagggataggcttactatcaataaaatactctgcaaaagctgctagaaaagctccacagtcactgcaaaaatgaaccagaaaataacataaaaatcaaacaaaaatgaacaatcaacaataaaaaaaaaagaaaagaaaagaaaactaaaataaagcattaagaacttacactatattctgctcaggcaatccagaaacatgaacagtctcaaaagactccattgtagaaaaccttgattcatttctaagagatttgaaatctagaatagaaaaataataaggcaaaataatagaaaaaagtttacaagcctcctttgcagctttcacaaacctaccagtcttgagtagggctgtacatcggtcggtttagtcggtttatactacatattttctaacccaacgtaaagatcggtttgtaaaattctgcatacaacctacccaattaaaaaaaa

SEQ ID NO: 126447 - DNA, 1024 bp, Cannabis sativa
aagatgaagatgaagatgaagagaccgagagagggaaagaggatagagagatagtggttgtttgaaaatttggaagatattttgggaaaaagaaaaatgtagacctatttggttaatatttatatataggtttagtagattaatttgaggataatatgcatgaaaatcaaatttcttttttttcttttttttttttaaaaaaataaatccttcgattatgaaatcaggatacaaaaaatgaccaatcacacttttagaaattattcattaaataataaattatagaaattaacatttaaatatttaattttaaaatcagaaaagttatttgagaaagaacaaattattattattattttatttaatggagaagattagttttttttgatgatttatttccttgttttttcaataacatatctgtatggctagatttttatttttgcttattgctaaaagtttaaggtaaaagaactactactaatatgtaaattataactcataactcaatttttttttttttttaaattattcatccattatgatgatggctaagagatttagctaagctacactaaatgaaaatccttcttcacatttagctacacaatattcaacatttaaatatatttaactattttgttctttttcttttattctttttcttccctctatttttaattaattaaataaataatattaaaaatatattatttaaatgttgtaagagaaaaatataaagaacatgtacaggtgtgaggtaaaataaaataaaaagtaatgttttgataaggtgtttcaaataataaagtaaaagatttagtgtgagtgagtggtgtgaaatagttttgatttattttaactatctattttgataactattacataaaacatttgtagtatttggatattattgaaaataatattttgtaaataaattaccaagtaaattattttaattttaaaaataatttttcaaaaatttttgtaaattctaaaatctcccaaaatgatttctgaaata

SEQ ID NO: 126448 - DNA, 1098 bp, Cannabis sativa
cctagatctttgagtttaaaatgagaatcaagtgtggaagtgaagtgttgtaattcttccagactattgattgcaacgatcatgtcatcgacatatattaataaggcaaggaagatccctattttgtatctgataaacagagaatggtcattctttgattgaacgaatttttgttggagtaaggtgctactgagtttggcataccattgtctagaggcctgtttgagaccataaaaacttttgttaagtttgcaaacgacattttttggaataatacctttgggagtataaccttgtggtaatttcatgtatacatcttcatggaggtcaccatgaaggaacacattattaatgtccatatgatggagatgccaatttttgagagtagcaagtgaaaatagtagtttgagtgtattaaacgtagctacaggtgcataagtttcaaagtaatcaactccatgttgctgagtgtaaccttttgctaggagtcgagctttaaggcattcaacagagccctctagtttatatttgatgcgatatacccatttattactgattacatgttgacttggaggaagagggactacaatccaggtattgttggcttctaaggcatcaatttcagtgtccattgccttgttctatatcttttctttgcaagcttgtgtgtatgattttggttcagtgagatgagctgcaaggatggctgcttggaattgtttagagaacttcttataagatatgtagttagcaatgggataagaagtagaaggtgcttttgtttgagtataacatatgtagtcttgtaagtgggcaggtggaatcgatgttcagcctttttttgtttgaagatttgatttttgtacaacgggttgtgttgtgtgtttatctgttgggatatcagcagtagcaggagaatcattggggagatcagtttgattgggatcatagttatatgatggatttatatgagaaaaaaatctgtctatttgatggtttctgttgtgatttccttgattgagaggaaagatagtttcatagtgttgggttttatgccctaaataaaactctttactatctgattagttatcaatataa

SEQ ID NO: 126449 - DNA, 1675 bp, Cannabis sativa
  modified_base (1408)..(1410): a, c, t, g, unknown or other
tcatgctttaattattttcaataaattagtttattgtttttattataaatagttttaaacggactagcgagtgtgacgtctcgggaaatcgggacgttacaacatgggttcaacatcaatgttgggcgcccaagttaacattcggtacgccgttcgacatcaattttggttcctatcaactttttatgggcaatctacttagccattgtcctgagatacatgagagacatgccccagccaagtttcagactttggagatgagtttacatgaaatgacagccgtgcaccaggaagccctaatgggtgctaaggttgacatatagtcaatctaggcataacatggctagggtttaggtttttggagacatacttggacccgggttcctcaaatccatcaaaggaatgatgcaaggacatgatatttcatcgaaaatatcccaaatgagcccatctacaactatgggcgccaaggttaacattccaacatgggcaccgattttatttcactgggtaacccccatgagaatttgacgaaattaaaatctatggagcagttttcaccaaaaaaagaagattgagcatcaacgaaactaatttcgaagatgtcgcccccacctatgtgccagtgcatgcctcgaggccacaatggacgcaggttgatgtatctcaacctagggcattttaagacctttttccagagaagttctatgggcatttcccttatttttgtccacggggaagatacacatgattttgggaatcaaacaaagccatctaggccctagatgaaaagctgggcacacaaggtgataacaccccagtcattgggtgcccaggttgactaccccgttggtggttctatcgatctgattgtgatttcatctcaagaattcttcttgttttgctctaaaaataagatatgagacttggaagcaggaaaaaatatcgtttgtgtattgagttagccccatgcatcagcaggcactagtgtgcaagcacactgagcgcccaagttggcattggcctagggttcaatgttctgtccttcaaataacaattatactctgagcattagtcttatattgcccccaaaataggatttggatgctttcgtaagtcaatatctcatgtacgtgtgtcacgcgaaagtccattgaaacccatgcgcacgagtgatcacccgggtgtcacctagtcatcacccgggtgtcacctagtcatcactagctagtggatcactgggaatcacccgagcatatatatcaagtaaaatttccaaaagaacttccccaaggtcaaaaaataaactaagtgttggggtttatgccgtgaaacacctataaggatatttttgtaattaataaagagtcttgaacattttgttatatgcttgaatattaaattattnnnatttattattgaataatttatataaatatcgaaaaattccttattcatatatgagattgtgccttgtagctgtacaaaaaactaagaccacttaacaatgaataaaataaccagcaatatattaaagttatgaaatctttaatcaatggttgctagcatagttcactgatgcctgttcttcggtgcaagtaatcttggttcagattacagatgtagtatgacataaaagtaaatgtgttgtatataatagagataatatatgaca

SEQ ID NO: 126450 - DNA, 1469 bp, Cannabis sativa
  modified_base (194)..(209): a, c, t, g, unknown or other
taattattaaataaatactttgggaatttataggattgaaattgctaaaagtggtatttgtgaaaaatatataaatggttgggaaaaattgcaaaaatctaactagtgattggctcactaatggccggccactattccctatttttgctattattttatctttttttattccaaataattcaatcctaaccctnnnnnnnnnnnnnnnnaaagaaaagaatggtctcataatctaactaatgactcttgacctagttttcttcttgtaagaccgctatagtattcttcacaaaataaatttagcctttagtgactgagtgcatgcccacccatagcaagttagtccacaatcatagtgtgtaagactgtgaagaatccaaacaactgaaggagtttcgggctcatatcttgattatactctgcgacagaaatgatacaagggttagagaggtgagcggaatgagtcatttaattctgctggaaccaacgtaaggtttctcataccttttatgtatttattttcatcgttttagcaattcatatttaggatggtaaaaacatacttgttagtaaatctaggtcctcgtaaaatatattccaataataatttcaaacttaatttaaattttttaggttcaaaaagactatctaaaataaaatttaggtttgatgactgtgctggttttttgtacaattttttttatggttctaatgtattttatggcgtttgtgctaatttttattgctagtcccactactaaaaaactctgaattcccgtcagttttacaccgtcaggtaaaaaattttcgacaattcataaaactatcgcctatacgagtgtcacgaatactgacttgaataggcgacgattaaaaatagtccgaaaaatagtataggccacggtttaaaacggtggcctataatgaacactatacacgacggtttaagaccgtggcctataatatatgccacagtttaaaaccgttgcctatacgataggccacggttttaaaccatcgtctatagtggtataggcacagttttaatctgtcacctatagtaaagttttttgtttaattataaattgtgtatttttcaacggcagttttgtccagtcattttgttgcaaaaaacaggaaaaataaaaatttattgatattttttccttgcattaatcaatttttactaatttctataatgtcaataattagttaaagtagagtataaacataaattaaaaaaaacagacattataatatatgcatgttaggatttataaaacactcaagaaatatatatatcacagatctaataatattcctaaaagtgttttaatatagaaaaccctaaatcataaatcaatataacctttgctaaattaaagaagtagaagatgagaaaggatgagcggaagcactaacctgaagccattgttggagattgcagagaaggttttgatcttccaaga

SEQ ID NO: 126451 - DNA, 1381 bp, Cannabis sativa
  modified_base (1208)..(1212): a, c, t, g, unknown or other
  modified_base (1307)..(1317): a, c, t, g, unknown or other
aagttatttaattattaactaaaaattgaaataattatatttatcaaaaaaaaaaaaatagttgtcgattaaaaaatgttaaaggacaccaatcaatgaacccaacaccataccaccttaatatgttacatataatttaggtcttacaaatttaaatttagtaactaatataaaataaataaggtgtattaccgatattaattttttattataatttcttaatcaactatcgtacttaaaaatatatatataatattttttttttattttttttcataatagtggtcgttataattataattttatccttgtattttttttaaacaatttcaaataatttatagtgtcaaaaacaactacattttaagtttttttgaacacatatagtaaattggagtattaaaaactttatttattatgttgtaaactattaaaaattttaaaaaaaattaaaaaaaatactgtaattaaaaaaaataaatttataaaaaaatatttaaacatataattttagacgtagatgttgtaattagtactcttttaaaaaagattactatcaacttgtatatggttattttacaatatagtattgaatattaatagttaatagtaatacttatcatgttaaaaattattaattgaattatatattaataggttaccgtacaaaaaagccaaaaactacataatacgttttgtcacgttttgcctccttctacacatacattttggtgaaatgttttatcttttctaattgtctctcccttcttttttattttttaaaagaaaaaattacataacacaccaaaaatttgaaaaaaaaaattataaaatactgcaatataaaagaaatctttttttatttttgaatttttttatttataaaatacatcgtttgaaaaaataatagacaatttttttattgttattttataattgtattatattattttttgaattattttaaaatttattaaaaattgatttatagttattgtgaatattgatttctcgttattgttcagttatttttttgtaaatttttgtttgaataaaatatatttttataattttaaaattttacaaataaatttttgtaattaaaaattttaaaatgtcaaattataaataaaatacaaaagaagtgtatttttggaaattatcttttttataatctaatttttgaattttattattattattattannnnnattattattattattattaaaccatagactatacgtcagctcggaatgaggattcctgggatataattagcacttttaataataataataataannnnnnnnnnnataataataataataatatttgtaaggcacaaagcactactaaacatagtggacctttacattt

SEQ ID NO: 126452 - DNA, 1137 bp, Cannabis sativa
aaacattacctatataatgggaaatgggagagcaggtatttatattaatgagaaaaggtgtcttctttgtttaaatgaatttagaaagagggtatgcttgcaaaaaaaagtattattgagactaaaagttagtctataattaccaaaaggaatatcaagtttggcaagaaaggcctgtgacttgaaaattaaaatcatataatacttttttggggtataaataatattattctttcatattttttagacaatctagtgaggaagacaaatattgtattaaagtttgtgatatatgttcgatctcttttatttttgttcaacgagagtgtggttttgctttttcttttgtaagctagccaagggagacctatgtaatggcctctaattaattagctgattctattataatgcatatatataattcaaacaaaagaaaatattccatataagtagtatggtatcattcctttttctttttctcaaaaaaaaaaaaaacataaataaataaattgttctaaaatattatataatacatatatatggatcactataattatggagaatcaattagttacccaaaaataattattatcataatgtttcattgtattttctaaatttttttattatattgatttaattttttattcttttaactatatttttgtataaatagagtttcacccattaaaataaattcctgaaaaattctcattcggtttctctttctcgtttcatcttcttcttcttcttttcttatttattttatattattcatattaattttataacaagttatcagcacgagtcccaaggtaaatttttttgttaaagtttttaaattatttcaaagtcatgatacactaaatatatatttatatatatatactcatctaataacttaaacaatttcaagaatccttctactttaattttctcttttttctttgttattaatatattatatatgttctcattctcatatatttattcttaattttatatatattatatgctcttaatatttatctataatatcataaagaatatatataaattatgtatatatcactactacaaaaacaccctttagaggcggtttttaagccctttcagcgtcggttttcgcgaaattcg

SEQ ID NO: 126453 - DNA, 1505 bp, Cannabis sativa
agactctcatcattcttataggtgggcttccataattttggttcatgttgtgtgcctggaatctttttctctttatctacttgtgttggttatggttacaaattttgttattcgtgaagctagttgctactctggaaaaatgttatgggaagcttggtgtctgttcggaaagctttgttcagaaagttgtggccagtccggatgatcttttcaaatagcttgtcttctgtatggaaagtctttctggatagcttgtcatcagtccggagacatgcttccacatagcttgttgtcagtcttgaacgcccatccagagtgcttgtatttatccaaatagtctcgtacggattgacttttcaggagtgtccatactgaaagcgtgttattgaagttgacgtgaaatatgttgttggaactaacttggagactttaaagcgacattaattagccatgatagaatcggagctaattttggcaactttacaaacctatatatagctatcacctttgtaatccatagagaatcagaccattaacaacttgagtgaaaattgtgattctctaagattagagtgagagagtccatactagagagagaaagttcgtcttgtaatcactgtaacagtgtgaaaggattcttgtaatcttgtaaacaatattaataaagatatggaagttgttgtttcaactgagatgtagaacattgcacatagcttgaactcgttaatccatggtgttatcttctccttaatttactgctttaattcgttatctagtttcttgtgattctttgatagtgttgttcttgattatgtttttgttgacccagtatacttgcatcgtaagccattgattgattcacaacaaattggtatgagagcaaggtttgcaatcatggttgccgctaaatatgatgtggaaaagtttactggttcaaatgactttggattgtggagaatgaagatgaaggccttgttggttcaccaaggattgtatgaagctctgcttggagaaaaatctcttcctaattctatgtttgagaaacacaagaaagagattgcaaaggctcatagtgcgatcatattgaatcttggagatacggttctgaggaagataccaaagaagccactattgggatttggttgaagcttgaaagtctgtatatgactaaatcgttagtgaatagattatatctgaaacatgccatgtactcgttcaagatgatggattacaaatctgtaggagaacagattgatgagtttaacaagttgatccttgatcttaagaacattggggttaccattgaagacgaaaaacaagcattattgttacttagttctttaccgaagtcatttgggcattccaaagatacaatgttatatggaagagagtcaattacactcgatgatgttagccttaaattcaaaagagttgaatcaaatgagtgaattaaagaactttagaaatggctagggctgttcaaaaaaatttacaaaccgcccaac

SEQ ID NO: 126454 - DNA, 1181 bp, Cannabis sativa
attctagactttgtcatgttaataaacgtatcattaagaatatgagtaatattggcttaatcccgaaaatgtcagaaaaggattttgaaaaatgtatcttttgtagtcaagcaaaaataactaagacaccacataaatcagttactaaagaaactgaacctttagatttgatacattctgatatatgtgaacttgatggaacgctaaccagaaatggtaaacgttattttattactttcatagatgattgttctgactttacttatgtgtacttgatgaaaaataaaaatgatgcacttgacatgtttaaattattcgtagctgaaattgagaatcaatataataagaaaataaaaatgcttcgtagtgatagaggaactgaatatgaatcaaactcgtttattgaattttataattcacatggtatgatacacgaaaggactgcaccatattcacctgaaatgaacggtaaagctgaaagaaaaaatagagcatttactgaattagttgtggctattttgttgaattctggtgctgcatctcactggtggggtgaaattttattgactgtttgttatgttctgaatagagttcctaaaactaagagtaaattttcaccttatgagatcttgaaaaataggcaaccaaatgtgtcttattttagaacctggggttgtttagcttatgttaggattcctgatcctaagagaataaaactagctagtagagcctatgaatgtgtatttattggatatgcggtgaatagcaaagcatatagattctatgatctgaatgcacatgttatagtggaatctaatgatgctgatttttatgaacatagatttccctttaaattaagaaatagtaggggtacatctactagaaatgttcctactattagggataatgagcacactgaaagtagtgaaatacaacctagaagaagcaagagagctagagtagaaaaaaaacttggttcagatttttgtgctcacaccttaaaggaggatcttgccaacctcctatgagccttgtcttccatagatgctgacctgtggaaagaggccgttgatgatgaaatgagactcacttattaagaacaaaacctggcattatacaaacttaccacctgggtgcaaaactataggttgtaagtggattttgaaaaagaaattgaaacc

SEQ ID NO: 126455 - DNA, 894 bp, Cannabis sativa
tccataaaaataaaaaatatatatggtttattttattttttcaaggggtacttacttttatagaagagagaggtcacacaaacactcacttgaacacgcgctgctgttcgagccaagttggtgtggtgtgcaccttattttttgaaaaaaaaattatttataaaattattatttttatttaattatttaaaacagcttttaaacatgtttaattaaatattaaacatatacattttcccgtcctgatattcaacatcgttctcatgatcccatattgatcaaaaacgtatttctttccgttacaatcttctgtgcattccttatataatgcatcaaaatcaacatgagaaatacatcttttttatagaaaaaattatatagaattatattacaatatgtatttcgagcagtagctttgttgggtgtggtatttcgattgttctctattgtgcaatagagctccaatacagtgattcaactgggttgttttatcttagggatgatgagactaatagtctgcttgcacaattttggacaatgtcgcaaacgttttaaagagagtgacataatttgcgacttaactcagattttaattcagtaaatttgttcttttttattttctgctaaaactatttcaacaatacattttaataagaaagtggattttatagtaataagagcaaataaattagataatagaagaaacataattttttatttgacataagaagaaacatacttttattttatgactgaaataatattcaaataatatatatatgtttgtattgattggaaaaaatagaacatgttgaccgaggttttcggcaaccaataaaataataatatataagaaagctgtaagaagttaatgcacgagatttttacgtggtt

SEQ ID NO: 126456 - DNA, 1386 bp, Cannabis sativa
aaatatttttgggatcccgagacatgtaacttttgttggtttgtaaagttaaaattattacaagtttattttcattccttttgcatttaaagttaaattttcgcacttattttattagtaatcccgtctaggggattaaggtttcttaattatcttgggtagcgtgcctactagttagggtgttacaagctcgatctctcagatcatcactttcaatggcaaccttaagaagctcagttgccatcaccttctcatcgcgcaccttgtctaagtttttagacttaggcacaattagcttagctttgatgaactgagccacatgggtgtcatactcttcaggataccttctacttctcttcatcctagccatgacagctcaacaatacaagtttctgacagcccaaggaaagtctaattgggttgtagaaaaaattcaagcaattttaaggaaattcttaattcactagaaaagtgttttggaatttggaggtcttagaaaaaataattcaagagtttttgggagtctaaaaatccttggagtaagatcaacaaaggacaagaagaagaaatttctccaaaaaaaaatggtgccgaaaataggaaaaagaaaaaaaaaatgtttattctgccttgagatgaagaacatttgaggcttgatgaagatgaaatttcaagagacttgggcgtgtgggataggaatgagaagtgtgggaaatttgattgacaactctcttatttataagtgagttcaatctcctaatcctaaagctaatgggagtcttttaaatttaaagctttaaaggaagaggtaacggacaagtaaaagatataattatatctttttccttttcttttaaaactaaattcaaaattcctataacaaaaatggctaccaaattaataattcccacttacaccgacataatctcaattaactaaattccaaacaccacacctcagtattttacccactgtgactttctactaaaccgcttgaacaattctatattttttgtaattaataaatatatcacataataatgtgatatcaaaagcacacataattaattaaataaataattaatcacacataattaattatcaaatactcaactatattataatatagtcttaaaataattccccatacttaataaaatatgtcgttactttatattccttatattaaaattttcaggatattacatatgggtactaagattgcgactcttaataagttcaatatgtgcatgaacttattagggatcgacactaaaggatgagaaggggcatattcaagttaagacccccagagaactaaagctatcaatactttttttttgttggggtaactgataaaggttaaaataacaagggtaacaaaag

SEQ ID NO: 126457 - DNA, 633 bp, Cannabis sativa
  modified_base (572)..(572): a, c, t, g, unknown or other
tatatacaactgacatttgcaaaaacacggtttttcaattttatacattgtaaaagtatttttttgttagctgagactttgtttaagacatgtccaacaccatgagtattagttttatagtactaaattaggtacgcagcgaaagagtttcgtattgctgattatcatggtatcatatctcaagggatctctagatgtgtgtacattaaatcaaaataataaaatataagtttaaaaatatacctcttcaagtctatcagggtatcttcaagatttcttgtaagttgtatctcttaatccacttgatgaggaaattgcaattggactcacaccagtgtcttccaaattgatacaccacagacaaggaatagtgtggtgtggtctgttaagataaagtgtataagctttgttcttgttaagttctcaacacataagcaagaacaatttagagaaaaattaatttcctaggtatttcaaaaaatagcaatattctgggagtgagaagtgtgctctgatttctcaaatgaggctattatttatagtagttaaattcctttaattaaatcatattnaattatttaaataaataaatatctataaccaaatttaattactgatatttatgagggaatc

SEQ ID NO: 126458 - DNA, 727 bp, Cannabis sativa
atatactacactatattataaaataattaaccaatataaatattattattatacctataataaaaaaataaaataaaagaaattttattgtcactaaaaaataataataaataaataaataaaatatctcacactccactaaactcaaaaatattcgaaataacaaattatctccattggcagacaaaataaactaaaagtctaaaaaaaattaattacccttcaagaaagcagatattacatgagatacatagtggtccctaaaggggcaagcttttgctttcaagctacaaatcgcaggtgcaggaggtgatcttgtgcctcgtacccttgtttggtgtcagtggcccgggattgtaggggtagtggttgcagtgtacctgtggtcggatcttcagaccttacaggtgtgttgcttccactactcgaacctcccggctttcaaagcttgcaaaaggcatggtcgtatgttcctcccatgcacaccttgtgcttgtgaccgtgaattgctccttacctaggaaaattttactaagttttatcggtccatggtggagtgaccttagaaatgtcattgttaagtgacattgagaatgtaatggccgagtgaccttgagggtgtcatggcagagtgatgtttggaaatgtcatggccgagtgacattaacaatatcatggccgagtgacattgacaatgtcatggccgagtgacatttggaaatatcat

SEQ ID NO: 126459 - DNA, 782 bp, Cannabis sativa
tctctctctctctctctcctcatacatgccgcctacataatacaaaacactaagtctatctctcatctcacccattcgagatctgcctagcattgttctcactattgtactattcatagagagccactctagaaattacaaggtaaaacctgtaatctgagtggtattatatctcgaatcaatacaataaaaatgggagtaggtcactgcccattaaccaggaggccgaacctctataaaattactttgtctatttatttactttaattatttacatgtggtgattttgatcataaataagctcatctgttagttgaccaaatctgaggtcaacatgcctaaaataaagaattgggctgcaatctaacactaaggtcgaattcaatgatgggctttagagttagatttttaccactttatttcaactaataaaactaaagtgtcttttctaattttctcatctaattatttaaatatcaatcttattttaataattgtaaaataaaatacaattaaatatatttattaattatacccacaaaagtattaattaataaataaacccctatttctcttttcttcttaaaattgtctaaatttggtaaaaattctcaaatgagacagtctatttttgaattctaattgacttattaaatcaattggttgagtctacaagatgatattatttcagataatgtgggggatcatgtgttggaaatattttatcaggatctagatttactaccatgtatgtttcattaacatcgtaatatgaattctaa

SEQ ID NO: 126460 - DNA, 798 bp, Cannabis sativa
  modified_base (692)..(693): a, c, t, g, unknown or other
atcgatagaaagttttttctaatgtggacatgtcgttgttataaggctgtaccgaggacatttaaacttgtaatgataaaatatcctcgttatagacccaattttttgtagtgatttttccctaacagatagaaaaactatgttatgagaaatgaaagataattttgtgctcatcatcgttagaaggtttctgggttgtaaagtcttctgagaaaaaactacaaatatattgaataattatagtgggagatgtgatgatgaagcaaaactaacacacagaataaaccaataaatctagattaataccacaactactaaccaaaatttatcgtaagcaaaattattgtcagcactatataatatattaaaatcttcaactagaattgaataataaagtgggatttatataaaatgtaaaagacttgctcctaagctaggaagtctttattaattggatatacaaatgtgttggttcgaaagtcaaaagaataaccacacttaagaaatatatatatatatatatataataaactctatagcttataactaatattttacgttacttttttattgccacaaacgatataaaatactataatgtaatagtaggtggtgatgtaataaatatataaaagagagtaatagtatttaggctaattagtaattattccctccgaactttgacatgtacnnaatcgtgccccctgaatttttttggccgttaaaaattcccttcgaactactgagattgttaaatttaaggacttttgtctcattttagtaaaaaaattctaacat

SEQ ID NO: 126461 - DNA, 706 bp, Cannabis sativa
ataaatcaatataaataatttttataatgtatataaatgtaattgaattggattagtttttaattaaattttactaatctaatccatttaaaatcttacttttatcatctaatacaatttaattgtaattgaagatttgatttttttaaaatagattggataagatcagtttagttcgattcggcaaaagtaatataaatattaaaatatttttactgtcatttttttattagagtaacaaatttagttgtaaatatctcaatttaatataatttttgaattagtttttttaacgtaaataaatttttgttcaaagaaaaaaaaaataataaatgatcaaaagtgtaagtgggtgggtggccacatggctgacaagtaacaacctttttgggtccaaaccaaacttgtcaatggacaaacctatccaacccaaaatataaacaataataataaataataaaatgacaagtctaattattttcgtggcaattttcaattgagtaatttagaatgactttgacaatttgacacgagtgccaggttaataaattattactttaaattaaaatgaaaaaaaagggctaatttttttactcccgaactttaacatgtactaaattatgctcttgaatttttaaagtcgttaaaaattttccctaaactattgtctaattctaacatggatgaaagttcaggaggcatgatt

SEQ ID NO: 126462 - DNA, 627 bp, Cannabis sativa
gagatctatagacaagctccacaaatttcatgtgattgatgactctacttgtttgttctactctcagcatgaagaaacaattgatcatctattttttacatgttcattctcattgaattgtctttaggaggttaaaacttggctgcaatggggagcatgaacaatagagttgttaaggttgttgaggtggattgaaagagcaagtttgagtaagttcgggaaaaaaaagttcttgctcctgtaacagtagggcttgtgtatttcgtatggtatgcaaggaatgacaaattatggaacaattgagaacaagtagatctagttgtactattaattggtgaaaacattaagcataggataactatattttggccaaaaaaatcaatatagtggataaagaatagtttcatacattgtaaaacatacaaaaaaaaaaaaaaactgtatagatatacttaatttgaggttttcagttgaagatgctcttaggttataaattgtttttttttagagtaatgatattttttgattggatgtgtgtcaaatttaaggtggcgtttggtaacacttttttaatcagttttctgcttttaaaattgaaaaagtaaaaatgttttataaaactgtttt

SEQ ID NO: 126463 - DNA, 1159 bp, Cannabis sativa
ggaatatggttatgagtgtggacttcattacataggattgtttttttggctcggctgaaaaaagtgtaatcaatgtattggaagtctaaaaattctgaaatagtgttcaggaaaaaaaaaaaaaaaaactctgaaaagtaaaaatattggtatttaaattaagctctatgacaagtaaaatctactcgcctcccattttggaaaagggaaacaaggatggacgcatcttccaactagctatggcatctattttaattcgaatgcatatatttctaagatatttaatattatatacaccttgtcttcattcatatatagctctacattaatgtgtattagtttgagagtgttatgtgattttggttcaactatcttttatatatagattagtagtgatagtactgtagaaaaatgccaaaaactaatatcaagattagaactatgtcgctggtttgagggctataaggatgagatcaagggagaggatgagtcaaaaaaaaaaaaaaaagaaaaacaaaacaaaaaagaggaagaagactagcgatgatggtgatgatgatgatgaaaaaggggaattgaaaaaatagattatatggaatgatgatgattaaaaattggtgtttttttaaaaaaaaaaaaaattaatttagttggttgttattttttttaatttaatgtcagatttttttttttttttttaaaaaaataaatttaataaactacaaacaaatacatgttacaccattttcactttcaaaagtcatatagatgagtgattaaaaaagtgtatgtatagcataggaacaaaaatgtagtcaccacggtagaattattctaaatatatatttaattgatcaactttatataaatatctaaaaattaatattttttctatacatttgattatttttttttccatttacttataatatttataattttattatttcataattactttgaatatacatcttaattgagtttaaaaaatatggcactagaaaggaaaagagacaaaaatattcatcaattaaaataataatattagtctaaattaaaaaaatcgatacaaacaattaatattaataaaaaagataacaaatcatgattcattaatttaatgaattgttgcaagaaaaaattaaaaaataatatttta

SEQ ID NO: 126464 - DNA, 677 bp, Cannabis sativa
acataaattcttagtattatttaagattttttgtcctacgttatagtttttgaattatactgttgtgtctactgatttataaatcgcatctttgtacagttgtgtcgttgtggtgttggacactatttctcaatattattggttagactaaaattgagaaatagttattttgattatattgattgaaaatgaaaactaataataatggtcatgtaaaacatggtagtacacttatagggacattgaaattgaaaagcatagataatgaccacaatttttgactttatttgctacacacaacttatcttctgatcatatattcaacaacaacagctaaattacccataattgagaggaggacccatcttcaaattcttgcctgccacaatctcaattctctcaaatcaccaaaacttaaaaagccttcaaatttttaatttgaaaaataaatttaaaaaaaaaaaacaaacaacaataaataataaaaactttatgatgaatattactagacctcacagaccaagatttgctttgagaaaaaaaaaatgtttaaatagaaaattttgacaaagttaaaaatggatttatcaatccatttcttatctattttggcatttagaagaaatttttagtttaatttttctttatggttgtctacattggagttatttaaaaaa

SEQ ID NO: 126465 - DNA, 1001 bp, Cannabis sativa
gatggagtgtaatattggagaaaacctatgacataagcatgcataggtatttgtgtaattatcaaactttttaaaatataatattgaaaaataattttttgaaaaatgtttaaataattaaataaagataaaaatgtaaaaaaatggcaaaaaaagataccaagtgtaaaaatcccaagataataacatcatgatattcttattattactattattttcttaactgatattcttatttacttatttatttcttttagaaaagaaaaatgaaataacacaacattcttatcgtggggagacttatctattaatttgtttgctccataaaaattaaaatttataatatatctctaccaaaagaaaagaaaaaatcccactaacttgttatacctagtaaatattaaacacgtatatgatctatgcttaggccaagttacccaaaaatgcaagttattaattcgaggtgataaatcaaaagatattggaggagtcatatcacatgtttctcagtgccttggttcgcatgaaacatgaattggttgccaacttcgttacaacttgttgcacatggacaaatatcgtttgtctttttttttcagtatacatccactattaaaaaatttattgaaaaattaaagtcgtgaaagaatgaaaatatataagaatagaaataaaaatatgcatacaacaaattaataagaaaattattaaactttttctcttattatattagaatagtcttttcttctttttttaagatgaaatagtcattccaccaaaatagtagaaagaacatcccatcggaatatcattccactactttaaaatgtaaccaagcaaaggaatggaataaaaattacttcctttctattccattccatttcattatctccaaccaaacgccacctaagggacatcaaacactactacaaaaagggctattcccaacggtttataactgtcttttatataattttccaacggttcctaaaaccgttggc

SEQ ID NO: 126466 - DNA, 993 bp, Cannabis sativa
  modified_base (935)..(955): a, c, t, g, unknown or other
tattttggtagaagagccaactccaagttctcattgtactcgctaggcttgtatgcacctttattgttatcttgtaacttggtgtggaccttttcagcttgattcaaacatgcttgttataggactttttgttaacaaggaatgttctttagagtactaagtctcttatgaagaactccttctctctgacttgtttgttgaagcacctggcaactttttgctggcagacttgccgctttaagttggcttgatgcttcttctttccctttcattaagagattctgctagcaaggtgtggtttacttctggtcatagcatatcaaaagtacgagagcagactgttggcagatcaggccagccagggtatagaccaggtggccaaccgtgttgagggaacattgcttgaccaattggatgaggttatggtcgaccagcctatggaggtagtggccggccatgttattgattttatggctagccagtctactgaggccatggccaaccctttttaggccaggttaatgctgtagttgatcctatctacactcggttggctttacccctagcatgattggcgtagagcctttatgcactctattcaatagttattcaacttcttttttggtaacacttcttagaagtggtagtgggataccatatctatgtgttatgctgtccagtattagacacccaataactatcctccttacccctactttttggaaaggtctttgttaggaggtatgatgttgtaggtgtatccatgttggttgtccagcacgtctatttctttttgaaataaggatgctaagttctttaaagaactgagcgagtaccaagtttgccttggctgtcaaggcgcaattggctagtcaagcgagtgcatcagctgttgcattgtatttggggacttgcctgttgggttttatgccctnnnnnnnnnnnnnnnnnnnnnaatcagatttacttattaatacagataagaaataacat

SEQ ID NO: 126467 - DNA, 600 bp, Cannabis sativa
aaaattaaaaaaacagtatatgaaataattccccaattttaattaatatcatgtttttaatacataaataacatttaaattaaatatttttaaataaaaaataactttaattattaaataacattcacactaacaaaaactaaatatacaattatacatacataatactaacttaatatatatacatatatatttattttattaaataataattgagtaataaaaatttattgaattttaacttatttattttaataattatgctttaataatataaataattatttaacttaaaaatagaaggattaagtgaatagattaaggattaagcttagatactcttgataagctaagattcacgacaataaggagcctacaattttgcaaattctactctagcaatgcacttttagaagattgaacaaatattctaattattattaatttatttatcttatctttgagctaattaaaaagagctagaaataaaaatttagtattacctttttatatattttaaagtaaggaggaggttctaatggttacatttttattgtaaccacatgattatattttttttagccattggatcactattaa

SEQ ID NO: 126468 - DNA, 727 bp, Cannabis sativa
agcattgctattaatgatgtaaacggggagagatggggattgctccccaccccttactcgcttcttaaatttgtttttatactcgccttaatatctgtttacaacataacatcttgaatatttggaaaaatagtcgtaatatttggctagtttttattaaatgacattctagaattccttgatagtatctctttaaaagatatcgatcgacatttttctacatgtataacattcataattagccactacggcttaacttttgacttatatgttatctatggatattttgtttaactaattaattcataattctgtcataaaaaaaaaagtagttataaaatatgtacaacggtaagaaaccattggtgcttatgtggttttaaactattgcctatagtagggtatatggtttaaaatgcctataccctcttatgaccgaaggttttaaattgtcgggaagttcacattagcgacgacttttaaccattgcctattttacccgttttgcgacggtcttataagcgacagttatagaaaccaacatgatcgaatactttaaacgactgtttaaaaacgtagggaaaaaccatttttatagaagttttagattttgaagtattaatgacactacaaaaaactgctacttttagtgacaacataatttttttgtgactaaatgtgacttttagtcacagtaaaaagatacttatgactaaaacataatatt

SEQ ID NO: 126469 - DNA, 1258 bp, Cannabis sativa
acgattcaagatgttctagaaagccaagaatgagatctacaactttcatgttgagctccaagtctagttctgcttcaaggtcttaaaaaatcacatttatttttagctttgtcaaattaagctcgtcgacttatactattttccaccaaaatgtgctaaaatctcttcaaaagactccaaaagcatgactagtctttaaaatagactaaaaaattatagtcacactaatcaataatttgaagaatcaatttaataaaattaatacataaattggtcatatttagaagaaaaaatatcaacttatcatctttatgtttagaaaatacatttcagaaccaacacatgtcttgagctatgaaaacttggaactctaaccagatttgtcatatgaagagaagtgagtacggatccttgataggaaagataaagtcttttggaataagaccatagctttggtcaagatactctgcaaaaataattaagttcgaggaagccacctgagaattggaattcgacatgaagtctcaatatctaaagttgtttaagttatatttcaaggatgaaattcttttaacgggggataattgtaatggttgtttagctttattttaagaactagcagataattagggtttattttcacaaatagacttcttattattgtttttatgattatggtaatatatttgaattttaggtgtattaattatgatatagatgaaattttatgttttatttttatgtctggtaatagtggaacgtggcgtatggcttttttagtcacttagatttgggtaagtaccttggaaataatggggcaatataattagccatttggaatgtgggaatgttcggggttatagttttagactattttaatttacaatcatcaatgacttatttaaagtttttcaacactatccatcgatagggaaactcccagttttaattttaagtccctaaaaagtgatttagcatatcacttatcaattttactaatattgtgacttaggggcttgtaaatcatcgagcaacagtttccactcaagttaactgatacacatgaatttggaatcaaggtaagattagtataataatacgcatatatgattacatgtttagcgtgcatgtttgtgaatgtcacttagataacatattgtagaaaatagtgaatcgaattgtgtatatatttcatagaatagtacatatttatatacaaagctaggagactaggaaataggaaactaccaacaaaata

SEQ ID NO: 126470 - DNA, 2039 bp, Cannabis sativa
  modified_base (146)..(151): a, c, t, g, unknown or other
  modified_base (1859)..(1875): a, c, t, g, unknown or other
tgaatcaagagacaatgagagaggtaatgaacatcaaaataaagagagaaaggaataggaataataacatttcatgaatacttacccttgaagcttgttgattgctaccaaaaatttatcgtagttttctctctctctctctctcnnnnnntctctctctctctctctcagtcttagattttttccaaagtgtcgatccctttttctgttctcaactacccctatttataaagtctatttttaatttaattttttatttttcttttatcaacctcaccacccatgtaacgtaatgggtgagagaaaataggaaagtgggcagttaaagagtagagagagtctcctgatttgactctcttaatttgactgattattattttttttattattattattttaaaaccaattattcctttttttttaaagaaataatgaaataataatttttttttcgttcaacagaattgattgaagacaagaagaggaaactggaaattaaagccgagccacatagtgccatcctcttcagttttggtgatgaggtttcgagagaagtttcagatgacaaaggttgtatctcaagaataagttgtatacacttcgaatgtatgagtcaaaggaattgagcaagctagcatctagataattataacagaatcattcttgatctgaataaccttgcggtgaagattgatgatgaagacgaagctataatcctggtgagttcacttctaaagatgtatgagtactttgttgatacaatcttgtatggcaaataaactctgaccatggcagaggttaaggaaagaagatgaggaagaagagaacaatggggaaggattactcactgttaagggaaatttccctaagagagaatacaagggaaatgagaaatcaaatggttacaaatgtaaccattcaagatccagatctagaaattccataagaggaccaagctctaatggagttgcaggaaagcaatgctattactgcaagaaggagggccactttagagatgattgtttggctttaaaagcaaaattgaagagataaaatcatcccaagtccaaaaggtatgtacttgctgatgttgcagatggctatgagtcatctgatgcacttatagtgtcatctgatgcacttgtgatgtctagatcaaattcaggtggagattggcttctagattcaaggtgttcatttcatatgacaccaaacaaagaactttttaggtccctcttagagagtcataggcgcacagttcttcttaggaacaacaaagcgtgtgagatctaaggtgtgtgaacaatcttatgaaaaaattatgatggagtcatgaagacattgtagcaggtcaagtatgttccaaatctaaaaagaaatcttctctctattggtatgtttgataaagtggggtatgttgtcaaagttgaggaaagcgtaataaaaattgaacaaggcactgaaactgtgtttagaggaaggttgagtgatggaatgtatttcttggatggaaagataataacaagtagtgtaatgcttgttattaatcaactaaaaatagtcaaacaaggccatggcgaacctcagattggggcatgtaagtcacatgggacttgaggaaaagaataggcaagtactgttcaaagagaagctaacataaagacttcaattctacgataaatatgctttggggaaggcttgcagattggagttcaacaaggccgaacacaccactacagaaaggttagattatgaccactctgacctttggggtgttggattttctgctcaaaataaaactcacttcaatataatcatatttactaattatttaataaaagatcataaatcattttatnnnnnnnnnnnnnnnnnatttatttcatgattatatgttcaatgtataaattctattaagtccagaacatatatatctatttattcatgattataatgttttcaacacagtggaaaataatcatgattatatgctcaaaagtttaagtctcatgatatgtcagtacactagatttagactg

SEQ ID NO: 126471 - DNA, 570 bp, Cannabis sativa
taattggtttatgttcattttactgtcaaagttgtgagttcattgcagattttatgattgaatcctcaaggttatttccgctgaaattacaacacaaaaacttaattttaagtacactatattatcttttgttaagatatttttatgtgatctttttattagtaacacttaccatatagcttagtagaagaatagcttagtagaagaattagtatatatataataattttgataatataactaattctattatgtataaaatattatttagtaattttataattttttatattaatatattaaaattattttatcaactaatttttttatcagtatatcgtatctacttttaaatataacagaatgaaattttttatagtaatttacaatgtacgttaaattttattaagtttaaagttttatgatttttctcttaaaaatttttataaaagaaacaaaaaaagttatttacataaatgtatacatttttttaaataattacaaaaaatgtgcaaaaaaacacaattttaaaaatatacacatttcaaaacatatttacaaaaattcata

SEQ ID NO: 126472 - DNA, 738 bp, Cannabis sativa
aaaattgttttgaagtgtaaaattgaaaaaattccttttaaattataatgattttaggacataaatattccatttttaaaccaaagatatctaaaatattccaaaaaagaaattaattttcttaatttttgatcaaaaaaaaaaatggataactttccaatttattttaataaaaatcagaattaaaatgagaaactaggagaaaatactcatcatttaaccctctcattgattcattgtcttattttgccactgctaacatccaacacaaacagaccgtcacttttgatattaagttgtggaagatctttgagtactattttctctatcatctcctctaacttgtggtaactaacaagtcttagtttggcatgtgacaagtttgatatttcattctttcgaaccttacctacataagaagtctcagttgacataacatagatagaatctaagagtcgaccgttaatcaacagtgtcccaaatactttaagattttgataaatcttgacatattaagaccattaatgacataatatctaaataatgccaattgagttattgatagtggatttttcttcattttaggcacatgataaatatgttgaaattgaatttttttaaggctaattagcattttttcccccgaactttgacatataccaaatcatgtcccctgaacattttttgccgttaaaaatttcccctgaactattgatattgttaaatttaaggactttt

SEQ ID NO: 126473 - DNA, 1896 bp, Cannabis sativa
aaagaatcgaggatactctaatagacataaagaggtaaaaaaaattcactcgtagtttatatttaatttatgtaatcatgttgagatcttgaggattatggttcatattaaattcatctaaaatactttttataaaatctcgtttccgcaaaaagagactatagtcctacgaggagtgagagtgtatgagatattctcagagttatgaaaagaaaacttctttattgatgatgaaataaaaaaataatttaactttcaaaatattagtatcgccaattacaatttttcgagaggattgcgagtcttttcttttttattttcaacttcaatatttctctattatttatagacactgaataacataaatagtgtcagctaggagatatactaaaaataagacaataaaataatcatttaaaataaaaatactctatccttacttagcatatctttctgttatatctaaaatgtataccaggcaagatgctaagaaaacactcaattctagcatgccccaactaaccctttactgacatcggacacttactatctccatattagtatgatattgtttgctttgggtctacgctctcacatatttatttttgggcattccttttccaaaaagcctcataccaatagacatattgtttatccttatagacccatgatccttctcatttatagccaacattttgaatacacacccaacatactaatcaattcatttccaatcactactccaaatccccaatacaaatgactcatattccctcctatattttttaaaaaaaaaaaaaattgaaagagtttcctctatagaagattatattaaattgctaaaacaccatcaataacattacaactatcataaggagaagataaaattggtaaacaaattatatatatagtgtgttattttttttttttttaggaaaatatatatagtgtgttatgaataaaccttttcaccaatgaaaggcaaaatttaccatatatgtaaatgtacacacattttggttgaagtctcgtcttaatgagcttcaaagttgaaacttgaaagtatagttagagtttctagtttctaccacattggtaatgtgttcaattattgtccattttagaccatttataacaagaaatgtgattagtttctactaagtttaaaaatatacaatataattaaagtcaatatttaataaagaggcatctttttttgtcttagggagccaccactttgtggcttatgcttccacgagatgtcatttaatagtctctccttgtcttgagtgttcttcttgcagtctctgatctctagcactttcgtaagagtgaaacaatacaaattttcactttttctgtgctaaatttgtcattcaccttttgaaagatggaggtataaatctgtaagaaagttggagaggaggatttgattttgggtttgtttggattcaataggttgtgttgtgttcgcaaccagccaaactaatcttacttaaaaataatgattaaaaaatcttgagcaaataaaaaaaataataaaattatttaaaaaaaacataaaaaataatcaatccttctttcttgctcgataattaagataaagaaaattatttgggatatcctcaaattatacacaatgatgtgtaactaattttaaccatataattaaaaagtaatatgctttacttaaagaatataaatagctaagtctatgcaatttgagggtgtatctaactcttttgtcttaaaatgggatacttttttatatcaagttttcagtcaaaagtatttttttagtggatttttttcatccagttcataatatatgcctgtgacgtactcgtgtataagagccatttattccgtgggtgtaaggacccaatggaggcttga

SEQ ID NO: 126474 - DNA, 634 bp, Cannabis sativa
attttttatcctagttttcctataataatctggattaaatgtaacaaaaaaaaaaaaaaaaactgaaacttataagtaacgaaccacactatagagacaaattttttttccttaacaatatttttcataaagtatacaatcagtacatatttaaaccccaaataatcagtacaacacacgaaccacgttggacaaccaccaatagtggcaaaccaccttcgacagccgcaagtcatcgtcaacgaccacaaacaatgaccatgaaacttcgtccaccatgaaaaaccacgaacccgtcgaccacgaaccttagcacctgaggaaagagagaatgtgagagagttgattagcattttagaaaaaataaaaaaagaagtagaacgagattacaggacgttgagcacagatctctcaataacaaaaaagaaaaagaagacaaatggtatctggaagtttcaaagggcatggagctcggatctaaactccattgactcgtccttcgtcagaagaagaccgctggcctgagatgatgcatcaaaatagagagtagggaaggactgaagctgagagatacaccatggcagaacccatttgatcttcatgtgggcaaccgcttagagagagagagagagag

SEQ ID NO: 126475 - DNA, 1352 bp, Cannabis sativa
ctaatccctacagccacagaaatgcaaaaccctaccacaaaaccaacaaaaattcataaaattcacaacctataaggtgtaaacttacctcaataactctaggttgatcatgggttgaataatatgctccaaaggcaaaagaaaatggtgaggagagcctctcttgctggctagttggcttgcacgaaggagaggagaagaatggagtgttttggttacttgtttcctaagttatgaatttatatatatcttagtttcttttttttttccttactctgttttataatagacatccgtaaaagtcaaaagggcaaaaatccaacaattactaaaagacgaatctacccctccaacaacttttaaaataacctaggggcattttagtaattttactaatccattgaaacggcattctaaaaattctaacctagtccggaatatcctcaaaataattctctcattaatgtcatgctatttctgaccacatcatttaattccacagtcgtcaggcccgaaaaaaaaatatttttatttcaaaaatggtatcctcgatacccacttatcccaatataaactctgtaattaataaattacgctttagataatcatttaataaatcctcactaattaccctaagtaagatcataatcttacttcattacaaaaataattacatatttaataaaatatgtctatttagtatcattttatttttctgggatattaacactatcccctccttctaggaacttcgtcatcgaaatttacctgaaaagctcaagacactgctcccacatctgcgactgtaattcccaagtccctttttcaaccttgttgttccgccacaacactttaactagcggaatagtcttgttccgcaacaccttttccttcctgtctaaaatcggtactggttgttcttcatatgacaggtctgtctgaagctcaatgtcttcataacttaagacatgagttatatctgatacatatttctgaagcatcgagacatgaaacacgttatgaatcccagataaagcacaaggtagagcccacagataagctacctaacctactttctcaagaatctcgaacagaccaataaacctgggactcaactttcctttcttcccgaatctttgaactcccttcattgggcatacacgaaggaagacaaaatccccaatttggaattcaacatctctatgcttttcaatagcctcactcattctttggacaactttaggtccaggatacctgcgttcatcggcttcatcccactgaatgggtgagcgacacttccttccataaagcatctcataaggagccatgccaatggtactctgataactatt

SEQ ID NO: 126476 - DNA, 1371 bp, Cannabis sativa
gaataacttgtaaaaacaaagtaatcccacccactagtataagaatttaagaatctgttctcatattaaaggagcggtatttgttggaatagcctgagtaggcaaggtaggagcttagactcttataatgatccgagtcagctatttttcactgtgcaaagtcctttctattgaccactcatatgaaaatcactttttaattttcttttgttctgttaatgctctttggaaaaattgaaactcttgtcctccaagcgataaagatacttaatatgttccctgcttcctttccagactgagcggaaatctctcgctgacaaatttgaatacattatgcatggattgctctataaactggcagaagaaggctcaggttcagagttaaaagtgtaagtaatgtaattaataattgaacatacaagattttggtacatacatgaagattgtatcatctcatacaatcatagaaattggatcatttcttaaggatttgttgtattttgtttcagggggatatatgtttcttatggtgggcttcagatggtgctgaaaggggatcctgcctgttgtactaagtttaggcatgatcagaatttatttttgcttgttagaaaggttccaaatgaacttgttgcaaagtaagagttgatgatgatagaaacaagttctctaatcatattatgtaatgtacatctacacagaattcctaaagtttcaaggggaattatattttaacatcccaaaatgttagaaaggcaccctatttgttattgggttattgggctatattctttctcttctttaacataataaccttctatttgtttctctctttacggcaaaacttgtttcattagcaagtctctctatattcactattatgtgccaatatgaattatccaagtcacgaattttatacgaattttttttttgacatttttgtatattaattaagtaaggtgattctacaatgaactcccttaaaagggatgtattgatgcaccctctacttgtttcgatatttagaaaaaaaaattagtctattttttttttttcactcatgtacgttataactatttaaaatatatgataggaattttcctatcaagattaattaattgcagaaaatagagaaagaataatactttttggacaaaaatggcggaatgcctttcattaatatctaggatttcgagagcttagttctcttcgaaaaattacaaactaaaatcaaattcttcacaccttttctctcactattccttcctatatataatacccctatcccattacaattacacttaggttttttttatttatcttaaggtctaataatatcctacaaaattttgagaaattcggaataattta

SEQ ID NO: 126477 - DNA, 1032 bp, Cannabis sativa
atatttaggatgttaatcaatatacttaatagtaaatctgaatcctggtaaaatatactccaacatggggcatgtcaaccgtcaacctgggcgctgagtccaggttgaagatacacagaatctgtctttttggagcttgatcttcttaatggtggaaagtactcacagaaattcagtttcgtcaaatttgcatggttgttactcggagaacttgggttggtgacctagcgccctggtgacacaccatgtcaacctgggccttgatcttagggtttgatccccctcgacacaatttgtaaagcctcaagtcctagcatcgttccttattgaatttgaggaatcagggtgcaaaaaagttctcggaaagctaaccctagctgtcgtgtcgcctaggttgactgagaatgtcaacctgagcactgggtgccttggtgctccaaactagaagtgttacaatgttggttttgaggcttgtagcttacttgcgacatgtctttcatatgtctaagtggaaaggttgaggggttagcacacaaataaggacctcgagactaaaactaatgcatattaaggcacagaatatcaacttgggcgctggggtagggacctaacttcaggtcgactgttatgacagggatgcaggtctcatagaatgttttcattcttgtcacgtgtcgaaaacgatgtacatgttatcaggactaattttttgataaacaccaccaaataggtaaatttttaattatattcaaagttttgaggattttttctaatttttatttttaaaataataagaaaaattaaggggcgtaatcttttttcatgaagttgcttatttcaaaagaaaaagggggcataattttagagcactctcaacagctgatttaaaataactttaactttaaaatttagctaaaaagagagaaaataagcctccatatcagccagggccgaccctgggcctaggcgggctaggcccgtgcctagggcccactccaacctagggcccaaaaccagccatataatgccttt

SEQ ID NO: 126478 - DNA, 873 bp, Cannabis sativa
  modified_base (525)..(553): a, c, t, g, unknown or other
acttgagatcactaattccttgcttaaacgagcttgaaatgcagaaaaatagatcaaaagctagctgcccctaggtgagtttgaaagagagagagagactagagagaaaaaaatgatttttgcttccttttccaatttttgtaaaatgaataataaaatgggtttatttaattacttcaggaaaatatagttacttaaaatctgaataaagtcacttacttgatccacataaagacaaaacatcaaaagggcaaaaagaccaaaatgcccttgcccacacaaaactaacttaaagggtactaagggtattttggggaaactataaattcccgactaatcccgacattcccaatgtctaactaattgccccgctatacaaaaatactaagatgtgattttaccgagccatacaccgcgttccatgttgccgggcactaaacatgcaaaaatatgaaatttcactacatgacatataaaatgtattctgaattcaaatatatcatcataaataattatttaaatatnnnnnnnnnnnnnnnnnnnnnnnnnnnnnattatctgctaatttctaaatttaaactaagcggtcttgacataatggctttccgtttttcgagcacgggagaaggcggccgagcaggcagactgggctccctaatgcgaattgcatgttcaataggcttgggctgggtcaaaaatttcttcctccttttgagctgagtcacctgctcttgctcagcctcatctttaggattcaagggctcatgagcatattgcttggcccttgcacctcctttcaacttagccgcacgcttaatttggatgagttcattatcctgatgagcttgttcagcccgtccagtaccagatttc

SEQ ID NO: 126479 - DNA, 1047 bp, Cannabis sativa
ttaatttttaattgtatcacttttaaataacatagaaaaaaactagtataaaatttagtatacgtgcctcgcacgtagctttttactagtatatatatataggatctttcattgtgaacttggatcgtgcgtagagactggacccatcatacgtgcgcaaatttgatcagcaactaaagtttatataaatatatacacctaatacaactactacttaacttaagagtgacagatgagaaaaggttctcatctatggcatttgttttttttttcttccttttactttgggagtttgcttaattttggtcaagactcaaagattgcaaacgtgcataatacgtgcggtgctttttgagaggcccactgatcaatactcccacctttcttttacggaaatttacaaaaatattgatttttggttcaatttttataaaaatactatcacacggtagaaataatttttatattattttggctttttttttcttttatattgtaaaaaaaaaaaaaaataaggcctccatcttccacatccacggacataaccatcactggaacaccagaataattagaaaacaaccattaattctgatgagattaagaaaaaatagtgaaatcgacgttaaaaaaataaattatggaaaataaccgtaaaacaacactaaaacaaataaaaaacaaaagagtacaaaaataactaaaaaaaatgaaccatcttctgcacaacctcaacacttgatgcaatagaggctatatttgcaagcccagttctggaaaatcaaattaaaaaaactatactcttatctttccagaaaatgtgacagaacttcaaaaactaaagaaaaaaattaaaagaaaatgaagaagaagaagaagaactgaacaagaaataaaataagagcattgagataaaactaaaaataaaaaacatgtatggattttgaaaaaaaaaggggcgaaacctatgaaaaagattttttttttttgaaaacaggcgtaggaatatattataataattaaaaactagacctcctggtcgttacataa

SEQ ID NO: 126480 - DNA, 1127 bp, Cannabis sativa
  modified_base (1089)..(1098): a, c, t, g, unknown or other
aaatttatatggaatctttaaaatcatcttgctaacttaattagctggtttttcacggctcataatctaattatacaattttttgacttctagaatcggtttttttcttttgaaaattcagatatagaattattgtacattttatatatagattgtgtgattacacgtacagtggacttattattatacatgatttacatacacatattgccttgcacgtattttatgcaatgcatgcatgcacatataacttttcatccaatatatatacagaaatacatgagaatctcattactatattcttatacacattattttcaaataaaacaaatcctctaaagattggatgcacttaaacacgtaaactaaagtaagttttaagtttttttataaggtattcttttaatcaagttctatgaaaaattaacaaacaacgtaaacatgaaatttaattaatattgttgtattatatataaataaatataataaattgtttaatatatattatatataattaaattaaatcggtttttaatttgatttaaaagtgtcatccaataaccaatctaatccaattaaaatttaaaactttttataatattggatagaatttaattaattaatttggtgtataattttattattttggatgttgcccaactatagatttataaatatgtgtattatcattttttttatttgatatgataaatttaattacaccaaaataacatttatctattgagaaaaaaagcatttatcaaactacctatattctattataagatcatgagctagtacctactacgtgcgtgcatcatatcacttgctttaaagatttttgactcattttacatatattgttatgttgttcaataatgtatttttttccccttataatataaatgagcatcttcacttgttttagagactttaacttatttacttttatggttcgtttggtacgccgtattatactttattgtattgtatagtattatataatttttttttgaaggaaaaccgatgcaggttaaaataacaaaggaggatttcttccatctataacagttcattgtctatcctaannnnnnnnnnagataccccaggagaactagacaataaaa

SEQ ID NO: 126481 - DNA, 878 bp, Cannabis sativa
ttattcagaatattcaacagcaagcatggataagatttacactactaactacgcgggacctaattagaatatgaaagttaaacaacaaaacttattagcaaaggctgataattcatgctattgtgttgtgttcgtatcgatacaaacaattatttcatcgtgttaaaatctcaaacacaaacataacactattattttgatgaagcaatgtcttgatatgatatggtaggcttataagaataaaaataaatttgggcaagagtatggaaagctcacaaaaacagaggaagattattcaaaatgttagtaagtttggttggtacattgttataaataccaatttttgaatgctgaatacgactaaaataaaactcaaactaagtataccaatctctctttcagaatgttcacagcaagcatggataagattttgacatataccgaaagaagagaaacatagcagttgtatatactaccaattaccaaactgattttcaaatttacattacaaactactaactacccggaactcgattactcaagagggaagctcaaatggtaaggcatgtggtttgcctttacattagaactactaactacccaagagaggtagctgaaaatgaaatggttaggcacgtggttttctcccacaaggtctgaagttcgagtactcgaactttcctggttcccaaaatattgtatggttagtcggggatcctagttttaaaaagaaaaaactacccgaaactcaattagaatatgaaaattaaacaaagcttatttgcaaagactgacaattcatgttatcattgtagttatcaacacaattattccacatattgaaatctaaacaacaaacacgatacaattactaaaca

SEQ ID NO: 126482 - DNA, 836 bp, Cannabis sativa
gtgactttgtacactgtttggactaatataaattgttgtatttttgagatgaaatgtaagatagctagaactatgagtaaagagattaaatcttgtgtaaaaattaggttcttatggggctgtaatgggggaaaaggaaagcttgatagctttatttttaatgtaattttaggttggctttgagggttgggggtttcggccagctgctttgtattgctcttgttctgtgtattgttcttgttttcttgttcaaaaaaaaaaaaggatcgactgagcatcagggctttggttttgttcatttgtaagtttactgactgtgattatttttccactatcatgttattaatgtttatttagattttttttcttgggttgaatgtttaggcatgaatgaatgtgaattagtgttttatttgagacatgttgagtagctgaagtttggaagataatgggattttatgggaataggatgtttgatcactaataatagtgttgttaattgaaatgagcagagtatatgtttttttggaaatattttctctgagtaacaaattgaagagaagagaactgctaatattatttttttttatttgtaactttacactgcgtagtaattcacctgaaatttggtataactagaacttcactcacattgtaatgactctattttttgagattcttgaagctctttataaagttattatatatgtgctgagattttctcagagcggtgagtgcattagtgcatgtttagcatcataactaaaaaactgttttttgtttttaaaaataaaaaattgttttttttttttaaaataatttgacttgtttggcct

SEQ ID NO: 126483 - DNA, 1145 bp, Cannabis sativa
  modified_base (181)..(193): a, c, t, g, unknown or other
tatgtcttatttatgaatttttattaagtaagggcttaattgtgaagaaaattacaaaaatacggtttcaaggaattttaaacttttctacgattttatttacataaaatacggtcttttttatgttgtaatcttgttaatttgatgttgattttttttatatgtatgttattttttgttnnnnnnnnnnnnntacttttatgtagttttcttattgattttatgttgttttcgtgttatttttaaaaaaaaccgtaaaaatgtaaaaaaaaaaaaaaaaacattctttacacgtaaaaatgtaaatattttacaaaaattagtgccttatgtaattattcctaataaaattataatattatgagtaattattaagtataaataaatattgcttcaaaaataacacttatcaatagaatagagaaagaacacaaaagagagtgtaaaatagagtgtgcttagcaccccctctatattaaaataaaagatatattaaataatactgcgtgaatttatgctcgcaacttttagaggtgtttagtatttaagtaattttatgtaagataaaataaaatattatattttgaaattttagcaatatatatattgagatgatgtggagatggagaatgttgtttccttttaaagtggcttacactggcttacactgatgttgctcttatgttacttttgagttggcttctagttccaatgaaggtttttgtaaaagttcgtaaaaacatctctaatgaaagtactatttacaggtgccaaaaataaacataacattataaaatatcatttttaaattttatctttcatccacataagatttaacatcttttctaaaaatactcaaatagtagacaactcctaaagttgccaaaatacacataattagtttgtttttttttttttttatgaaaatttatccaaaaatgatgacatgaacattgttcaatattagcaacaccttattcaattatatctctattttctcttgaaaattgaaccaaattgattaggtgacaccaacactcttttgagcaattctcattggcgatgttctaaaagcaagtccaaccctaactatgttaatagactcccttttttatctataacatatttgtgacagtcagtagtcc

SEQ ID NO: 126484 - DNA, 1052 bp, Cannabis sativa
ggtattaataggggttccgccggtattaataaaacggtcagaatccccttactaataccggcggaactcgtcggcaataatccgctggtattagtcttttcaaaatttgggcggtcaaaatcccgcccaaactattagaggcggattttgcgccggtaatactaaaattccgccgggaatactaaaattaaataaatatttaattatttttcaattattcaaaaataataccggcagaatgcctttttcgccggtaataaccccattaataccggcggtttggctccgccggtattacttccgccggtagtgagtaaaaatgttgtagtgataaaaaaatagtattaagaacaaaaagccaaaataacttaaccaaaaccaaaaaatcatcacccaaaaccaaaaaatcatcacccatctttaaaaaatcatcacccatctttatatatcacccatctttatatatatatatatatatatatatgttatagacttgttacaattaattattagtaaccatgtcaatatttaaaatgaatattataatgaaatgatctaaactaaaataaaaattagagtaatatataaatagtaactagtcgtgagaaactagttagttaccactgtaactagttactagttataattaattactaattgtaagaaactaagtagttaattataaattatataactagtttcaatatttgaaatgagtaatataataacataattaaaactaagataaaaattaaagtaatatataaatattaactaattgtgagaaactagttagtttcaacttatataactagtaactagttattatatggataaatcatggatgcttgaggagagagacaaaccccaatttaaaattaaatattaattgtattaacattctaatatatgaaaaagggaaaaaaagaaaagaggttgatctatatcacaggcttttttctctctagaatgttcaaggtccttgtgtacgtttcctactctggtacccgaaatgggtttttggtccacccaccggagtggtgtggtggttt

SEQ ID NO: 126485 - DNA, 1381 bp, Cannabis sativa
agggtttacaccatccatgacgacatcgacgttttcctaaggagtttttcatatcactaatttttttgtagccactatggttacaaaaatgtagtggctcagatctttcctcagctgtcaaagaaagcaccaaaatttttaccgagatttttggaaactaatttaatgaaagctttaggaattaaataactattaagtaaatgagacaaatgattttacgtggttcacatgttaattatcccaagtccacgagttagtatattggccttgtaggcgtttaaatgtattacaagtggtgtttacaatgacaccctaactttgcattttttggtttctcttgaagaagatgaaagcttagtgagtattttagcagagcttcgactatgtaattttttgattcctcctttttgaagaaataaagagacttatataggctaaagtgcgagtatgggcatacccatgacccaccctagtgtttcttgtaaaaagtccatccattattgaggtaaaatacataaaaatactcactattgggctccaaataagctctttcttgtggggcaaagcgcccgtacaatcgggaccattgttggtgcatggcacgttcgggcagaggttgcacctgtagacaaaatgctcagaggggccatcagacaaaaggtgtattcagtggaggtgcgtgcactaccatgatctaacataaggggacaagatctgatcatgtgtcaaaaaagtataaccgtgataagagtcattcggctttcacttagtgatagactttctgttttccttgtgcaattgggatccgtcttaaactcttcgtatggctcccataaatccctcgagaagcttagttgatttggtatccttcgacagaagaagggatgacaaggcttccgagtctcggacggtgatttaccttgtggtaaatttctacgcctttcctatattagggcctttcctgggttaatatagtctttccgtgactttctgcaatcaaggaaacttaattggattgtcacttttcatattttaccacgtgtccttcatttagaaacacagataacaatatattattaaaaaatgtgttcactaaaatttaatacaaaattaatatatatacaaaaatagagaaggctgcaaaaagcctagacgcgtgcggacatagggagccgtgccgagaatcctcggcgtgtgcagggtgtcctcgtgtggacgtgcagggtgcacacgggcatgtgcagtaggtcctgaccgaggatttcagaaaaatcttgtctaaatctgcgcgcgcatgctccttgtccgaagcacctggtgcacgtgtgcacctagcttcgacagccatggcatccattcttccaaaattcataactttctc

SEQ ID NO: 126486 - DNA, 2218 bp, Cannabis sativa
aaaaccaacagcaattcgaattgttctctcttgctgttaccttcaactagcaggttacacaattaaatgtcagtaatgctttcttacatggatagcttcaagaaatagtttatatgcattagcctcaaggttttgttgatcctgagaaacctacacatgtatgtcatttgcataaagccttatatggattgaagcaagctcctcgagcttggaatgacaagctcaaccagactttacaagactaggggttctctacatctaggttagattcctctttgtttctttgtggtttaggtcaatgtagatcattttattggtgtgtgttgatgacatacttataactgatctcaattcacaacttatttctaaacttattgaggatttgaatcattccttttccttaaaagatcttggaccagtgcattatttccttggtgttgaaatatatagagattccagtgggatgtatcttttccaaagcaagtatgtcacagattttcttgtcaagttacacattgaaggtgctaaaatttgttcaaaccctacaagtttttctcaaaaattgtctttaacaaaagggcccccttttctagatcctactctatgtagaagcactttgggagctcttcaatatttgaatcttacaagactagatgttgctttcatcatcaaaaaattgggtcaatttatccatgcttcaacaaaggtacattgagaagcttgtaagaggttgttgaggtatctaaagggcataatctcagatggtcttctactcaaacctgctgccaatcttcaattgtatgcttactctgatactgatcaggccagttgtgtagatgataggagatctaccggtgactatgtcgtttatcttggtgagaatctcatctcatggtttgccaaaagtaacaagttattgcacggtctagaactgaaagtgaattcagatcacttgaaaatataattgcagaacttaaatggcttgtccacttgctgcatgagcttcatgtttctcttcttgaagcaccaattatttgggtaggtaattaaagtgtagccgcacttgctacaaacactgtagaaacatgttgtacattgaaattgatcttcactttgtgagagattagattttgaacaaaacactctcggtcagatttgtcccttcaattgatcatgctgtcgatattctaactaaacctctctcaatagactattttctctatttcgcgggcaaacttcaaatgtctttcactccttttcgtttgaagagggatgctagctaacataaccttcagttagtttagttagttattagttagaagttaattaattgtttaccttataattctattttttttttgtttttgttttggtagagctatatttagctccttattttgtccacttatattaactttctgcttataaataaagaatctctcattaacgagagataagttttactattgaatctttctctctttttcctcttgctttttttggttctaactatcttgctttctctgatttttaccatatctttctaatcttgctactgtcaagcttctacaactaatgaccccgaatttttactacgtagagtctacttataataaaataagtatttgtgtcaatattaagtaaaaattataattagataaatattatgttattataattatatatataaaattataatcgctttttgtaaatttatttaatttcatatggtttattaattactataaaatatatttgtgaaatttttattactatttaaatatttatttatcaaataaaataatatatttttatgtatatattttttgtaattggggtatacatgtgtgtctctcattagtactctcagatataaaagttttttgttattagtgttaggtaataatattttcataagtttttggcgtttaaaccatttttattgtcgttttgctaattgtatttaaccatctaagctcaaattttagcggtgaaaccctccaagttactaaactagtagcaactttaaggtgtcatccagttaattgctacaatgggctgcttatgtacatgcttgtacacataacacgtttatattggtacacctaatactattatttgaaaattattttcaaagttaattttaaaattaaagaaaatatttaaaatatatattataaattttgaaataatttttatattctaaataataatatta

SEQ ID NO: 126487 - DNA, 1080 bp, Cannabis sativa
aggaaacccgaaaaacaatcggggtatgattttgttgaagagtttgaatcggaggcctcaagatcaaagaggaaaggcgattccaaaaggctacccaaggataagaagcacaacaaatatatacccctttatgctgaatataccgagctcaataaaactcggaaaaatatctacctcgcacatgcacatgaagtcgtttttaacgagccaaaagctatgagacatgcaaggtgtaaaagggacccgataaaacggtgtgaatatcatgaggatattggaaataccatggaagagtgtcgtcagttgaaggatgagatagaaggtctcatagcgcgaggacactttcaacgatatgtaaaggggtaggacaatgcccatgatcacctcgatctgctcagtaactcgaccgaccagggattataatcctcctctacaggaggaagggacacctaagtaacctcgagagggcgcacgtcacaagaagacaaggggcagttaatccggcaaaacaattaagttaaagaattacgaaatgagtaggtatcgacccactatagttgccatatcaagctaccacgtgtaaagttggacgtcaaccggtataaatcaagtaatcgagccgctcagagagtcgttagttggaagcaaaagaagcgaaagaagcttggagaattacaaacaaatgaatataaaagaggtataaaaaataatatcagtataaggccaacttaccatgaagttatagtccaagctcctcgaaagcatcccttttggactcccaagattgagaaaatcccaatcagggttaagaagagtttgaagtttgcgccagcaagcaactccatacgcctgggcaaattcagacccagcctctcccgctacagccgataaggtctcaatggccttgcacgaggaagcagtagcgtgggtttccttaggacgaggagcattggcgtcggaaacatttagaagaggaacttgttcttgtatctcgttatcagagacctcgagatagatgggctcggccagtgacttcttcttgtgggcggtggttttcctttgcctcttgggaggaaccac

SEQ ID NO: 126488 - DNA, 534 bp, Cannabis sativa
tgttgttgctgaaatattgcattgcagtcaatggatccggataagagtcctagaattaataatatattaaataatagagtgtgggtcattttcatttaaaattatttagtattagaataattttaaaaataaagtagttaaaaatgatgtggatgaaagaaaaaataaaatataatattttaagatgatacaaaaattgttggttattttgtaagatgtttgcattagaattgttctaaggaaagatttaagatctcttgggtcgtggctgagtgtgtttagcctaatgtgtatcaagtttgtttgtgtacagactattactcactccataaattgctcctaagaaataatttttggttactatgttacaatccgcaccatccaacataattcgtactatccaattcaatctgcaaattgcgaatatctgcacttgtacagatttaattgaattgaaaaattcaaaatccacacttgtgcagattagatgttgattgacatgtaaaagtaactgatccaatccaatccacacat

SEQ ID NO: 126489 - DNA, 830 bp, Cannabis sativa
  modified_base (747)..(782): a, c, t, g, unknown or other
tggcatcttaaacatgtggggcaactccaggatattgatctcgggggagaaaggggttccacgtgctcggtccaactcgagattgttgttcctctgaccggtaaggccttggaatatattttttagttcgtccaattgtgcatgcacgactgttctaacctgttcggcctcttggtcgatctgaatcacatcaacatctttttgagcgggattttgagtgcgggttccaggctgtaccattggcgcgtccggttaaccggttttacggagcctgtaaaaccggtggacctgtttgcaccaacaaaccccaaaaatcgcataactcgtccaaatcttccccaaatgcaaccataccttccagaacacctaaaaacacattctaaaacaattcccacacaacagtagcaagaaaaacacaacagaactcaacatgccattgttgagtcaagtttgagctccatgaactcaaacttgacaaacctcacaaatcaccaccaaaataataccaggaatcttaaaacatcattcaagacctactgaagctaaccctaaacgaaaattatcaacacataatcaaattcatcaaaacaatccctaaacctaacaaaaccttccaaaaacatcataaactcacaatagaacaagcttggggttttacctaagttcaaattttcaaatatacacccaatagcctctcaaattggaagagaactccaccctaggttgtgttggaattattttaccagnnnnnnnnnnnnnnnnnnnnnnnnnnnnnnnnnnnncctaatatgaatttctaaaacaacgaaataaacaaatataaagtttag

SEQ ID NO: 126490 - DNA, 3001 bp, Cannabis sativa
  modified_base (1292)..(1293): a, c, t, g, unknown or other
gaaaattggttctaaattaacttttcaacagcgagaaaagcttgtcacttttctcaaacaatatctggatatttttgcctggaaacattcaaatatggtcggattatctctgtaggtcatgtgtctccggtagaacattgaccttgaagtgtgaggtgtccgatagaagcgccgtaaaatggaccccgcgaggtaccaagcgctgaaagaagaagtagatcgccttttggcgtgtggcttcataagggagtagttctacccaaactggttagcaaatcccgtactcgtgcccaagcctaatggctcgtggcgtagatgcattgatttcactgatttaaacaaagcctgtccaaaggacagttttaactttctagcattgaccaacttgtcgatgccactgcaggtcatgaacttctcagtttcatggatgtatactcgagatataaccaaatcctaatgtatgaaccaaaccaggagcatacctcttttattacagatcgaggtttgtactgttgcaaggtaatgcctttggtttgataaatgcaggggcaacatatcagaggctggtaaatatgatgtttgcaaatctaattggtgaaaccatggaggtatatgttaacgatatgctcataaaatctcaacatgcaaaggaccatattacacacttacaagcaatgtttgagatactatgatgatataaaatgtgactcaatcctcataagtgtgtctttggggttggatcaggaaaattcctcgggtttacggtaaatcagggacggattgaagcaaacctcgtgaagattaaagcattggtggaaatgcgatctccaactaaacccaaagaagtctaaagccttacaagtaaagtcgctgctttaaatcgctttatatcacgttcctctgataagtgcaaagaattttttcaaattttaaaaggtaataagaagttttagtggattgagaagtgcgaagaggcttttcaagcacttaaatcacatttggggcaactcccaatcctttcaaaacaaatgcccagagaaatcttatccatctaccttgcagtgtccgaatattcgattagttcagtactaatctgtgaagaccagggaagacagtatctggtgtattacgttagtaagcgcctattagacgctgagactcgctacccgcagatggaaaaactagtatttgttgtggtagtagcatcgagaaaattgcgaccttatttccaggctcatagcattgaaattttaacaaactaccctttgaggcaagttttggcgaaaccaganncatcaggaagattgttaaaatggtaggtagagttgagccagtttgacattaggtataaacctaaatctacgattaaggggcaaacccttgcagactttatacttgagttcccgagcaccaaggtggcacttatagaagaaaaaattgatcccaatgtaccaaaggaagaaggatggactttgtatgttgacagagcctccaacagcgaagggtccggcggtggtataatactcataagccccagtaattttaaggtacatggtgcacttagatttgaattttctacatctaacaatgaagcccagtacgaggctttgattgcaggattgaaactcgctcttgagatgaggatcgagtatttacaagcctttagtgactcctagatcgttgtatgccaagtgaacggagaatctctagccagaggtggacgtctggctagatacctcgccctaacttgcaagttgctacaaaagttcaagaaagtaattctttctcgagtaccacgtgctcataactttcgcaggcgctttggcccgtttcgcctcaacgagagaagctgaattactcaatgtaattcctgtcgatgtgttgactcacccaacagtgagtcggactgaagtaatggagataaatactgccaaagaagtcacatggatgactccaataatggattacttagagaaaggaatcctacctgtagacaagatagaggctcaaaaactgcggtatcgatctgctcaatatgtcatttatgatggcaaactttaccacagaagcttcagccaatcgttgctcaaatgtatagacggagccgaatgcgattacatactctgcgaagtgcatggtggcatctgtggtaaccacgccgggggtagttcccttgctttaaaaataatgcagcaagggtattactggccgacactgggaatagatgcttcaaactttgctaaaaaatgtgacaaatgtcagtggataaccacatatgccaaccaacctccaagctaattaaactccataacgagtccttggccctttgcggtctaggggattttcttaatcggagaattacccaaagggaaaggcagagtcaaatacgctatagtcgcagtcgattatttcaccaaatggactgaggtgaaagcccttgcaactatcacaactttcaaattacgagagtttgtgtataattccatcatctgccgatttggcatcccttacaaacttatctccgataatggaaagtagttcaattgtaaggaaatgcgccaactgtgcgatgagttgggaattaaaaaagcgttttcagcagttgcctatccatagagtaatgggcaaacagaggccgtgaacaaaataattaagcataccattaagggaaaattcgaagagcgtaacggggtatggccagaagagcttctgatgtgaagccatgataccagtcgaagtcggggcagactccctacgaagagatgttttcaacatcaaccaaaatgcggacaagcaattgttccaccttgatcttttaaaagaaaagcgcgatcaggctcatctaaaaaatgcggcctatcagcagcgtactgctcgctattttaattctaaggtcaaagagcgaactctgcgagtaggggatttggttctgcgaaaagtcatgcccaacacatggggttttcggtgacaattgggaaggaccataccttatcgctgaaaa

SEQ ID NO: 126491 - DNA, 1482 bp, Cannabis sativa
tggtgacaaacaccacaattggtatattatttgttggtataaattaatattagtttttaaatatattttaatttaataaaaaatataaaaaattattaaccactcatatcgcacttatccataaagtgcatgcctaatagtaaagctctaatagaatgtgttaattagagcttttcatatttattacctcatgtctcgtctataaattataattatagattatgagaattgctaaaaagcactactggtatctagcacattcttcgatgtcatatcactattatgatatgtttgctaaactgtaattagaatcagaataatcaatggaagaaatgaatcaggttaaaatataaaataataggaaacaattttttaattttttgtttactaaactgaccgaaatggaaatcagaatcatattattttgtttacataattaggaaaggtaattgaaatgacttaatttgattaaattaccattgttagaacatgtaattactttttttatatatatttttgaagggtatatttgtcttttttatttttaattaataaaaatataattaatataaagtaagttaaggaaaggggaatgtattccttatgaaaatagagggagaacctttccctttgttttcttctcaatttgtgtgggccctactagtttttcctattccaaaatttagtaaacaaatgaatgggaatcattctcatacaattgatttccattctcctttagtaaacatgtcattagtgtagtcaagtatcgggtcgtatatgacttaagaaaatagcttttaggaaatatcgttaagtaccaatcgtggggcgccacctataaaaaaatattagattatatattgtcaggcctggccctgggcataggtgggtaggctggaggaaattacattgtatactcactttactttatttattttaatttttacctttattgttatattctttaagatatacccactctgatgtctcaattatatcccttagcttgatgtaaattatatgctagctagacataagtagaaagtgagggtatattaggtaactcactcacaaaagtgggtatattttaatgaaatataatataaaaatattgttgattaataaatacaaaagtgaaatattattaaacttatcccttaggcctgtgcctagggcccaaaaaattctcttttaaaaatacataattttattattaattttgaaatatataatttttttctaaataagggttcaaaatatttttttatgacctactaaattttaagaccgatattgcgacatctaaataatttagtttttactttagcatttataagatattattttgctaattatagtaaaagtgtatgtacatagttgatcatgaagtgttattttaaagggtaatttgaggcataacattttaaagtggataggttttttaatttttaaagaaaaagagaattttttattttttatttt

SEQ ID NO: 126492 - DNA, 801 bp, Cannabis sativa
gccaagaagacaaaaatgccaaacatgttacaattccttcgtctgtatgtgtagtctctttaattggctcaaataaactttcatgttcttatttatagatatttctaccaaaagattagtaattccttcctcatgtcaaacatcccacaaccctacattctttctactctatcctgtgaatgtgtgaaacaaatgagagtgggactgcagtagtttggctttatcaagagtatagtctccacataaaataaaagtttttttcttaaaaaaaaaaattgtatcaaaattgaatttttcccaccctaacttatttggaagatttgtattaagaaaaaacccaattagatgaaaccaacttggaaaatatacgagaataataaactactagtctactaataaaaatatcaacttcgcggattactaattaatttttttttttataaaaaaaaaaaaccataatttaacatataaatatcatttggagagtatcatatcaaacacttcccacctcctcaaaaatatttttagaaagtgttctcccaaatcaaatctatcctatttgaaataaggattagaaaatagtttcccatactttactcgattgttctagaattagcaaaatttgaaaaaaaaaaataaaaaatctcagtcattaccatttcattcatgaatatcaaaaattagagattagtgagttcattcttgttagctttgacaaatatctagtaggggtgttcatccgatccaatccacacttttttggtcaaacaacatccactccgcactaagtgcggatttcat

SEQ ID NO: 126493 - DNA, 744 bp, Cannabis sativa
tgtatgcatatcttattattattaaaatattaataatattttgtgtatgtacatattaaaatattgttaaacacaaacatacaaataataaaaatgaacctattctattcgcctactaagcttaatctagctcctagtaggagatgctatgaggtgttaaattatattagtgtaatttaatattaagtattttactttaataataattataaaaattgttaagtatttatagaatgtgataatggaattacacacaatgatactttattgcaatatgcatctactatcctagtagtatataatatatttaatggcttaaggctaattgaaagcaacttgtctttccactttcctaccaattataccatgaacaatcacacaaagtttgtgatggatacaaattggatatgtccttatcaaaaaaaataaaaataaataaataaataaaaaatggaaatgtgatttttgtttttcggaaatcggatatgggaaattaaatagtgtcggcatttcctttttgtttttttcgttttaaatagtttaataataaataaataaacaaaatattgtcggcatagcaaaaataattcatagttcattcatatatacaatatgaaattacatacatactcaaaattatacaaacttacgtaatcatattatacaaacatgcagaatcgaaattatacaaacgtacgtagatggtataattctttttttttttctttttgtaaaaatatatgt

SEQ ID NO: 126494 - DNA, 1045 bp, Cannabis sativa
aaaaaaatattattgttatctcaatttttgcatagggtgacgtggcacttacttatatgacacgtggagcgcattctatgatctagacaggcggtatgttacatgatgtatcgtccagtgtgatttatcatttataaataactcgtttaataaataagcaagaatattcgaacaaggtacattgcatcgtctgaccaatcttaacgttgcagccagcttgcatacacctaccagggtaaatgcgactggaagatctttagagatactttcgataaaaagttcaagcattcaattctcgatcacatcttaattttgtgggagagatttggtacttagaagagtaagagaaaacatccatagtttccctttttactttatttaatttaggaaagtaactagtttcctttttcattctttatttcttttaggaaacttaatgaatgtaattattccctataaatagtggagtcatttcactatttagggatctaaaattattcattcaaaagagcacttaagctgctaaaatctctataagctttcgagagagatcaagagttcttacttctcttctcacaagtaatacaagtaaaatgggaataggctattaccatcatcacagggttgaacctctatgagaaatctgtatttttattttgcttatttcttattcaaattctataattttctaattattttaaagactcagtgttgttggctaaaagcgatgtcaatattttggtgctttcattgagagcaaagaacacgattgttgttttgaatctcttcaaaacacacaaaaatggttgtgaccacaaggaggggtaatcccactgaaacaactgatttaatggctacagatcctaatgtgaaaactccagcaaatcagtgagatccagtgaggacaaatcctgatccaactattcctcaacctcaaagaggtccccaattagtgggacaaggagtgacaacccctctggctgggttcactctgggaacgcaagaagctggtgttgggttttgtgccctaaataaaacccattac

SEQ ID NO: 126495 - DNA, 1173 bp, Cannabis sativa
ttaaattgggcagtttgcatgcagaattttataacccgatttttatgttgggttggaaaatatatagtataaaccgactaaaccgaccgatgtacagccctagttttagattctttggaggccaacccttttcagctaatcacgaatatataatctctctctctgcacaatatatttatatatatattatttaaataaaataagacggcatgggataatatatatatctctggctaaataagagcagtttaattcgcaatattctgcgtcatttgcagccatgaaaaccgaggggccagaatcctattttataagaattcttaccggtctaacatgatattagaatcaaaattaaaaaaatttctaaaaattaaaaaaatttctaaaaatgttaaaagaaaaataaaaaacacgattccaaaagtagatagttaaaagagttatttgtgatttagagatagtgtcaaggggatgttacaaagtttcacattgttaatgtatagaaatataatagaatatatagaatatataagatcaaaaaactattcctatagtagaatattgattgagatagaacacatcctatgcatccaacaattctaaccagaatcaacagactttgattactatttgtcacaataatacactcttttatatctacccaagtattcattgtcattatccaattacattcttctaaattacatctcaacaatgtttgatcaaaattgagtttgatttgagtgaactcacaaaataacttttttttttttaattattttgcactatgttctagttttgataatattttttgcaaatgattttccatacaccaaacatatgattgaaaattttaaggcacccgatccaaaattttaaccgaagccaaaactatcaaaataatccaaagtacatggtgaactataaaaatgtctatttccacggataacctcatccaataatgcttcttttcatcttttttcatgataaattatctgttaaatattattttctttcatgatctttgtatttaggttcttgatttttttcttcctttctatatatttgtaggatgagtgttgtaggaacacctcttttgttcttattggtaagaacatttttattttcaatatatggaagaaattataatccaaatttttttatatgacaatt

SEQ ID NO: 126496 - DNA, 566 bp, Cannabis sativa
aatcttctctactaggatcattgtttcacacctgtaggccattgaatatgaagtgtgtcctgttgaagttctttttattgtttggtatgcctaatgaactcttggaattttttcgggccagtgagctttatatgcttgaagctttttcttcaacattatttttgagatttttttttacaacttccacttctccatttgcttgtggtctggccacaactgaaacatttttgataattttgtgcttgacacaaaaacaattgaactggtcattgtcaaattattttccattatcaaacacgatcttgtggaagaccatgatgacatactattttctttataatgaagtccaaggccttcttggatgttactgtgttcatagcttcaacttcaactcacttagagaagtaaattggactcctccctttctggttggcaacgatcctactaaatatattccccaaataggaaaaggctatggactactcatcagggttatcactgttggtggagctctaagaactttggaatagtgttggcagtattcttattttcggacataatcaatg

SEQ ID NO: 126497 - DNA, 955 bp, Cannabis sativa
cgacatgaccccaacagatccgtcgagcttcgactccggcgagtgattcacaactgaagacaatgatgcatggactcgggctcatgagtttaggggttttagaccacaacggggttgttgacgacatcctttagacctcttgacggatggaggtggtctgttgtggctacactgagagggacaagaaaactagagagggaagcctgagaatgagagagcccatgcgggttgtgacaaagatgatctatcgacttctagttgtgagcaacgagggagagagacgagtcgagggagagatcatgtaggttaatttttttaattgaatgatgcagctaagagtgtgtgtgagagagagagtgatattgtgattgtgataaaatttatttacgtatacaaattttttatattatttgattgagaccaattaatactatttatctttcattgtttatttacattaatatataatttgtggtctacaatcagccaaaatggaaaaaaggcctcttttaatctttttttccttgaatcacgagagatttaaattcttaattaattaggggcattatatatattggtgattaaaaattcctatatggtcattttctaaaatcttagattattatatataaattaatgtgacaattcttatattaaagcattggctgagataattattatttcataagtattttttaaagttacactcacatccaacattgatggacgtggtccacctagaccacatccaacaatattggacataaattatactcaaaaattttaaaaaaataattatctatttaaattattaaatatataacgtccttttattttttttatatccaacattattggacatgatatacattttttctagtccatcaatgttggacatgaaatcttctaaaaaaatattttatgtccaacaccatttttgttggacatgaaaaag

SEQ ID NO: 126498 - DNA, 3661 bp, Cannabis sativa
gtaaaataaattccaacatgtaccgctaccgtacaagtgttggtagtgtatgaatcacaacaagcatgcatatatatttctcacatacatacattcgcatatatatcacatgttgtacactattcttacctcttttctgaattcaagtgagttggccgacctgaacggaaagtctcgtgctggatggatgctctaatcatatattaaaaccgtgtgaataacacgccaaaaccctaattcgagaaacccgaacctccaacttaaggttctgctactactaattggaactacaatatcctaggagatagggaaacacccaaacgaggcactaaagtggacacgaattgaatcgaattgttcggggaatctgccacaggtcctggcaaacaggttaaccagtttgcaccaagtttccccaaataattaacaacctgctcaaaacatgtccaaatgccaccaaactttccaaaacacctaaaatgagcttacacaatatattccaatcaataacacccaaaaaaaatgcacaaatacaaaacatgccatggatgaaccaagcttgagtgtgcatccatcacccaaaacaaccgaaacagctgcaagaagctacttccaacttaaattaaacttaaaaatcgaatcacaacccaatcaaaccctaacaacccctattctctaaaatcacaagtcaaaacaaactaaaacattaagaaattcataaactaagagtgtctagggcttacctacactaattactccttgaatccaagctaaaatccaaaaagatggtgatgaaggtggctagttcctcctggtgtggtggtgctcaaagagagagagagagagagaaaaaagaatgagtttttcttatttttttcttatttttccttcaatttctttatttcacaaaaggactattaactaattaaacttaacttggctgaaaaacacactaaatggccagctgccattctctaaaacaaccacctaagcctcctcttaaaatgacaaaaatacccttttgcttacaatttaggcaatttaaggtctaggggtaaaatggttaaaaaccataaccccgcccaaacccagtattttatttttctccaatagagaaactcacaggaaaacatgctccctgcctaaaatgtaatgtctttactcttcagattagcataacttttctacctactttgcgacgcaagcatccgagccttgatattgtctatagcttcattggtcctttgaactaattccggacccaagtacttcctttctttagttttgtcccaatggattggggaacgacacttcctaccatacaacatctcataaggagccatacctatcgtactctgctagctgtagttgtaggagaattcaattaaaggcaagtacttactccacgtacccttaaagtccatgcgacaggctcgcaaaaattcttctaatatctaattggttctttctgattgcccattagtttgagggtgaaaagttgtattgaacttcagtttgtacccatagctctctgaagacttacccagaattttgatgtaaactttggatctctgtctgaaacaatgaatttaggagctccatggagatgaactatctccttcacatacagttctacatactaatccactgtataggtagtctttactggtaaaaaatgagttgacttcatgaaacggtccactatgacccataccgaatcgtacagtcctgtgattctaggcaaaccaaccacgaagtccattgcaatatcctctcacttccatttaggaagggctaatggttgtagtaaccctcccgacctctgatgcttagatttgatttgctaacaggttaaatattttgtcacataacccaccaactttttcttcattccactccatcaataatagggtttcaaatcctgatacattttagtggtttccgggtgcaacgaataaggtgtagtgtgagcttcatcaagaatttcctttttaagctcaccattatttggaatgcaaacctgagatttttatagtaacatttcgttattcgagatcaaaaagtccctaggtcgaccggccaatacctcatcccaaattttaactagtttaggatcttccaatttcgcccttctaatcctttccaacaaatctgattgaagtcttaagttgtgcaatttcccaaccacaaattcaatttaagccttaaccatttctgaagctagctgaggagctatcattacagtgttaaaaacttgcccacgaccttttctgctcaaggcatctgccacaacattggctttcctgggatgatacagaatctcaaaatcataatctttaaccaattctagccaccgtctctgctgcatatttaaatctttttgagtgaagaaatacttgaggctcttatgatgagtgtaattctcacacttttcacgataaatgtagtgtcgcaatattttttgaccaaaaactacagcaacaagctctaaatcatgcattgggtaacggtgctcataatccgttagttgacgagaggcataagctataaccctgtcagcttgcattagaatgcatcccagaccctattggatgcatcacagtaaacaacaaaattttcttgatctgttggcaaagctaacactgatgctattattaaccgctgctttagctcctgaaaaatcgtttcacacttgttagaccatatgaaccgttgattcttcttagttaactcggttagtgccatagagatcttagaaaatccttcgacaaaatgtcgataataccttgctaatccaagaaaaattcgcacttccgtcactattcttggcctcagccaatttttcactgactcaatcttgcccgggtcaaccatgattccatcttttccgacaatgtgccttagaaaagatacctctgacaaccagaattcacactttttgaatttttcatacaacttgtgatccctgaatcgttgtaataccattcagagatgttgctcatgctcctcttctgtctgagagtacacaaggatgtcatcgataaacactataacacagctatcgaggaaattattgaatactctgttcataagatccataaaggctgctggagcatttttcaacccaaatgacattactagaaactcataatgactagatctggtgcaaaaagtggtctttagaatatcttattctcgaattctcagttgatgataaccagatcgcaagtcgatctatgaaaatacagtcttcccctaaagctaatcgaacaaattatcaaccctgggcaacagatacttgtttttgatcgtcagcttgtttaattctcgataatcaatacacattcggagggaaccgtccttctttttcacaaataaaactggagctccccagggcgatagactgggtcgggtaaaccctaaatcgagttcccctgaagttgtatttttagctccttgagttctgctggagccattcaatatggcgccttcgaaaccggttcagctccacgtgccaaatcaattataaaatctatctcctgctgtggtggcaatcgcggcaactcctaggggtgttcacggattggtttggtccgaattttcatagtttttgaaccaaaccagtataacggttttttcaatattagaaaccaaaccagac

SEQ ID NO: 126499 - DNA, 1118 bp, Cannabis sativa
tggataacaagtaactcctccaaatattacaaaatgatgtcatatgttacatattagtttgttacatgtacatatttaatttatacaatatattatttataaataatataacagttttaaaattccgcggtacgattgtaatttaagaaattaaaaaaattatctatgtagtttggttaaaaaaagtaaaagttataacctgcactactcacactgccaacactcttaaaaaaccataaacatattattcaaacaaacaatataattaaacttcaaaataaaattaaaaaaaccttaaagcaaaattgctttagtatgttaaacacaaacacaagaagaaatgattatataattatgcctctttagttaataagttagtgacttaaatacactggataacaattaggttattaatcttacttatttctgcatataaattattttgcatttcaatgactttcttaacattatttttacctaatttaataaaaataaaacaataaaacaaacacattacactattactattttattataatcaaaccaagttcaaaagttagaagtcatgtggataagattggtaccaagcaacttctttaaacttcacatgacgacgtggagaccaaatccacatcgaccatgaacgggaacaactacctaagtacgaggagttcaaattgaaaaatacattttttatttattgattaaccaaatctatttctaatttatatttaattaaaatatattttttatatatatattgtacctaaaataccctaatataagagaatcatacgaagagtatattaaagtaacaaggacaaaattgataaaatatttaaaaaaataaaatgttaaaaaaaaattaaaaaataaaagagaacaatataaaaaagatattagaatctaagagcatgtttggtattgttttttttttttcttttctgtgttttgttttcaaaaaattatttttagaaatgagaacaaaaaatagtttttagagtttttaaaaataagtcatgtttggttagtgtttttttaaaatactattgaccaaaagtgagttggtttttaaaacagaaaacaacattttgtcgttttcaaaatttttatttttt
